United States Patent Application Publication US 2023/0212319 A1 - sequence listing, part 6

SEQ ID NO: 7347 - DNA, 2568 bp, Artificial Sequence
  Synthetic Polynucloetide
atggccttaccagtgaccgccttgctcctgccgctggccttgctgctccacgccgccaggccggacatccagatgacacagagccctagcagcctgtctgccagcgtgggagacagagtgaccatcacatgcaaggccagcgaccacatcaacaactggctggcctggtatcagcagaagcctggacaggcccctaagctgctgatctacggcgctaccacactggaaacaggcgtgcccagcagattttctggcagcggctctggcaccgactacaccctgacaatatccagcctccagcctgaggacttcgccacctactactgtcagcagagctggaacaccccttggacattcggccagggcaccaagctggaaatcaagagactcgaggacctgaagaacgtgttcccacctgaggtggccgtgttcgagcctagcaaggccgagatcgcccacacccagaaagccaccctcgtgtgcctggctaccggcttctaccccgaccatgtggaactgtcttggtgggtcaacggcaaagaggtgcacagcggcgtgtgtaccgacccccagccactgaaagaacagcccgccctgaacgacagccggtactgcctgagcagcagactgagagtgtccgccaccttctggcagaacccccggaaccacttcagatgccaggtgcagttctacggcctgagcgagaacgacgagtggacccaggacagagccaagcccgtgacccagatcgtgtctgccgaagcctggggcagagccgattgcggcatcaccagcgccagctaccaccagggcgtgctgagcgccaccatcctgtacgagatcctgctgggcaaggccaccctgtacgccgtgctggtgtctgccctggtgctgatggctatggtcaagcggaaggacagccggggaagggccaagcgatctggatctggagcaacaaacttctcactactcaaacaagcaggtgacgtggaggagaatcccgggcctactagtatggactggatttggcgcatccttttccttgtcggcgctgctaccggcgcgcattccttcgaacaagttcagcttcaacagcctggcgctgagctggtcaaacctggcgcttctgtgaagatgagctgcaaagccagcggctacgccttcagcagctactggatcaactggatgaagcagaaacccggccagggactcgaatggatcggccaaatctatcccggcgacggcgacaccaactacaacggcaagttcaagggcagagccacactgaccgccgatacctctagcagcacagcctacatgcagctgagcagcctgaccagcgaagatagcgccgtgtacttctgtgcccggtccatcacaacagtcgtgggctgcgctatggactattggggccagggaacaagcgtgaccgtgtctagtacgcgtatccagaaccctgatcctgccgtgtaccagctgcgggatagcaagagcagcgacaagagcgtgtgtctgttcaccgacttcgacagccagaccaacgtgtcccagagcaaggactccgacgtgtacatcaccgataagtgcgtgctggacatgcggagcatggacttcaagagcaactccgccgtggcctggtccaacaagtccgatttcgcctgcgccaacgccttcaacaacagcattatccccgaggacacattcttcccaagcagcgacgtgccctgcgacgtgaagctggtggaaaagagcttcgagacagacaccaacctgaacttccagaacctgagcgtgatcggcttcagaatcctgctgctgaaagtggccggctttaacctgctgatgaccctgcggctgtggtccagccgcgccaagagaagcggatctggcgtgaagcagaccctgaatttcgacctgctgaagctggctggcgacgtggaatccaacccaggcccttctagaggccatatgaccgagtacaagcccacggtgcgcctcgccacccgcgacgacgtccccagggccgtacgcaccctcgccgccgcgttcgccgactaccccgccacgcgccacaccgtcgatccggaccgccacatcgagcgggtcaccgagctgcaagaactcttcctcacgcgcgtcgggctcgacatcggcaaggtgtgggtcgcggacgacggcgccgcggtggcggtctggaccacgccggagagcgtcgaagcgggggcggtgttcgccgagatcggcccgcgcatggccgagttgagcggttcccggctggccgcgcagcaacagatggaaggcctcctggcgccgcaccggcccaaggagcccgcgtggttcctggccaccgtcggcgtctcgcccgaccaccagggcaagggtctgggcagcgccgtcgtgctccccggagtggaggcggccgagcgcgccggggtgcccgccttcctggagacctccgcgccccgcaacctccccttctacgagcggctcggcttcaccgtcaccgccgacgtcgaggtgcccgaaggaccgcgcacctggtgcatgacccgcaagcccggtgcctga

SEQ ID NO: 7348 - DNA, 1866 bp, Artificial Sequence
  Synthetic Polynucloetide
atggccttaccagtgaccgccttgctcctgccgctggccttgctgctccacgccgccaggccggacatccagatgacacagagccctagcagcctgtctgccagcgtgggagacagagtgaccatcacatgcaaggccagcgaccacatcaacaactggctggcctggtatcagcagaagcctggacaggcccctaagctgctgatctacggcgctaccacactggaaacaggcgtgcccagcagattttctggcagcggctctggcaccgactacaccctgacaatatccagcctccagcctgaggacttcgccacctactactgtcagcagagctggaacaccccttggacattcggccagggcaccaagctggaaatcaagagactcgaggacctgaagaacgtgttcccacctgaggtggccgtgttcgagcctagcgaggccgagatcagccacacccagaaagccaccctcgtgtgcctggctaccggcttctaccccgaccatgtggaactgtcttggtgggtcaacggcaaagaggtgcacagcggcgtgtgtaccgacccccagccactgaaagaacagcccgccctgaacgacagccggtactgcctgagcagcagactgagagtgtccgccaccttctggcagaacccccggaaccacttcagatgccaggtgcagttctacggcctgagcgagaacgacgagtggacccaggacagagccaagcccgtgacccagatcgtgtctgccgaagcctggggcagagccgattgcggctttaccagcgagagctaccagcagggcgtgctgagcgccaccatcctgtacgagatcctgctgggcaaggccaccctgtacgccgtgctggtgtctgccctggtgctgatggctatggtcaagcggaaggacagccggggaagggccaagcgatctggatctggagcaacaaacttctcactactcaaacaagcaggtgacgtggaggagaatcccgggcctactagtatggactggatttggcgcatccttttccttgtcggcgctgctaccggcgcgcattccttcgaacaagttcagcttcaacagcctggcgctgagctggtcaaacctggcgcttctgtgaagatgagctgcaaagccagcggctacgccttcagcagctactggatcaactggatgaagcagaaacccggccagggactcgaatggatcggccaaatctatcccggcgacggcgacaccaactacaacggcaagttcaagggcagagccacactgaccgccgatacctctagcagcacagcctacatgcagctgagcagcctgaccagcgaagatagcgccgtgtacttctgtgcccggtccatcacaacagtcgtgggctgcgctatggactattggggccagggaacaagcgtgaccgtgtctagtacgcgtatccagaaccctgatcctgccgtgtaccagctgcgggatagcaagagcagcgacaagagcgtgtgtctgttcaccgacttcgacagccagaccaacgtgtcccagagcaaggactccgacgtgtacatcaccgataagtgcgtgctggacatgcggagcatggacttcaagagcaactccgccgtggcctggtccaacaagtccgatttcgcctgcgccaacgccttcaacaacagcattatccccgaggacacattcttcccaagccccgagagcagctgcgacgtgaagctggtggaaaagagcttcgagacagacaccaacctgaacttccagaacctgagcgtgatcggcttcagaatcctgctgctgaaagtggccggctttaacctgctgatgaccctgcggctgtggtccagc

SEQ ID NO: 7349 - DNA, 2541 bp, Artificial Sequence
  Synthetic Polynucloetide
atggccttaccagtgaccgccttgctcctgccgctggccttgctgctccacgccgccaggccggacatccagatgacacagagccctagcagcctgtctgccagcgtgggagacagagtgaccatcacatgcaaggccagcgaccacatcaacaactggctggcctggtatcagcagaagcctggacaggcccctaagctgctgatctacggcgctaccacactggaaacaggcgtgcccagcagattttctggcagcggctctggcaccgactacaccctgacaatatccagcctccagcctgaggacttcgccacctactactgtcagcagagctggaacaccccttggacattcggccagggcaccaagctggaaatcaagagactcgaggacctgaagaacgtgttcccacctgaggtggccgtgttcgagcctagcgaggccgagatcagccacacccagaaagccaccctcgtgtgcctggctaccggcttctaccccgaccatgtggaactgtcttggtgggtcaacggcaaagaggtgcacagcggcgtgtgtaccgacccccagccactgaaagaacagcccgccctgaacgacagccggtactgcctgagcagcagactgagagtgtccgccaccttctggcagaacccccggaaccacttcagatgccaggtgcagttctacggcctgagcgagaacgacgagtggacccaggacagagccaagcccgtgacccagatcgtgtctgccgaagcctggggcagagccgattgcggctttaccagcgagagctaccagcagggcgtgctgagcgccaccatcctgtacgagatcctgctgggcaaggccaccctgtacgccgtgctggtgtctgccctggtgctgatggctatggtcaagcggaaggacagccggggaagggccaagcgatctggatctggagcaacaaacttctcactactcaaacaagcaggtgacgtggaggagaatcccgggcctactagtatggactggatttggcgcatccttttccttgtcggcgctgctaccggcgcgcattccttcgaacaagttcagcttcaacagcctggcgctgagctggtcaaacctggcgcttctgtgaagatgagctgcaaagccagcggctacgccttcagcagctactggatcaactggatgaagcagaaacccggccagggactcgaatggatcggccaaatctatcccggcgacggcgacaccaactacaacggcaagttcaagggcagagccacactgaccgccgatacctctagcagcacagcctacatgcagctgagcagcctgaccagcgaagatagcgccgtgtacttctgtgcccggtccatcacaacagtcgtgggctgcgctatggactattggggccagggaacaagcgtgaccgtgtctagtacgcgtatccagaaccctgatcctgccgtgtaccagctgcgggatagcaagagcagcgacaagagcgtgtgtctgttcaccgacttcgacagccagaccaacgtgtcccagagcaaggactccgacgtgtacatcaccgataagtgcgtgctggacatgcggagcatggacttcaagagcaactccgccgtggcctggtccaacaagtccgatttcgcctgcgccaacgccttcaacaacagcattatccccgaggacacattcttcccaagccccgagagcagctgcgacgtgaagctggtggaaaagagcttcgagacagacaccaacctgaacttccagaacctgagcgtgatcggcttcagaatcctgctgctgaaagtggccggctttaacctgctgatgaccctgcggctgtggtccagccgcgccaagagaagcggatctggcgtgaagcagaccctgaatttcgacctgctgaagctggctggcgacgtggaatccaacccaggcccttctagaggcgggatccacaccatggctacctacgaggtgctgtgcgaggtggcaagaaagctgggcaccgacgacagagaagtggtgctgttcctgctgaacgtgttcatccctcagcctacactggcccagctgatcggtgcactgagagccctgaaagaggaaggccggctgacctttcctctgctggccgaatgcctgttcagagccggaagaagggatctgctgcgggacctgctgcatctggaccccagatttctggaaagacacctggccggcaccatgagctacttcagcccttaccagctgaccgtgctgcacgttgacggcgaactgtgcgccagagatattcggagcctgatcttcctgagcaaggacaccatcggcagccggtctacccctcagacatttctgcactgggtgtactgcatggaaaacctggacctgctcggccccacagatgtggatgccctgatgtccatgctgagaagcctgagcagagtggacctccagagacaggtgcagacactgatgggactgcacctgagcggacctagccacagccagcactacagacacacccct

SEQ ID NO: 7350 - DNA, 1878 bp, Artificial Sequence
  Synthetic Polynucloetide
atggccttaccagtgaccgccttgctcctgccgctggccttgctgctccacgccgccaggccggacatccagatgacacagagccctagcagcctgtctgccagcgtgggagacagagtgaccatcacatgcaaggccagcgaccacatcaacaactggctggcctggtatcagcagaagcctggacaggcccctaagctgctgatctacggcgctaccacactggaaacaggcgtgcccagcagattttctggcagcggctctggcaccgactacaccctgacaatatccagcctccagcctgaggacttcgccacctactactgtcagcagagctggaacaccccttggacattcggccagggcaccaagctggaaatcaagagactcgagatccagaaccctgatcctgccgtgtaccagctgcgggatagcaagagcagcgacaagagcgtgtgtctgttcaccgacttcgacagccagaccaacgtgtcccagagcaaggactccgacgtgtacatcaccgataagtgcgtgctggacatgcggagcatggacttcaagagcaactccgccgtggcctggtccaacaagtccgatttcgcctgcgccaacgccttcaacaacagcattatccccgaggacacattcttcccaagccccgagagcagctgcgacgtgaagctggtggaaaagagcttcgagacagacaccaacctgaacttccagaacctgagcgtgatcggcttcagaatcctgctgctgaaagtggccggctttaacctgctgatgaccctgcggctgtggtccagccgcgccaagagaagcggatctggcgtgaagcagaccctgaatttcgacctgctgaagctggctggcgacgtggaatccaacccaggccctactagtatggactggatttggcgcatccttttccttgtcggcgctgctaccggcgcgcattccttcgaacaagttcagcttcaacagcctggcgctgagctggtcaaacctggcgcttctgtgaagatgagctgcaaagccagcggctacgccttcagcagctactggatcaactggatgaagcagaaacccggccagggactcgaatggatcggccaaatctatcccggcgacggcgacaccaactacaacggcaagttcaagggcagagccacactgaccgccgatacctctagcagcacagcctacatgcagctgagcagcctgaccagcgaagatagcgccgtgtacttctgtgcccggtccatcacaacagtcgtgggctgcgctatggactattggggccagggaacaagcgtgaccgtgtctagtacgcgtgaggacctgaagaacgtgttcccacctgaggtggccgtgttcgagcctagcgaggccgagatcagccacacccagaaagccaccctcgtgtgcctggctaccggcttctaccccgaccatgtggaactgtcttggtgggtcaacggcaaagaggtgcacagcggcgtgtgtaccgacccccagccactgaaagaacagcccgccctgaacgacagccggtactgcctgagcagcagactgagagtgtccgccaccttctggcagaacccccggaaccacttcagatgccaggtgcagttctacggcctgagcgagaacgacgagtggacccaggacagagccaagcccgtgacccagatcgtgtctgccgaagcctggggcagagccgattgcggctttaccagcgagagctaccagcagggcgtgctgagcgccaccatcctgtacgagatcctgctgggcaaggccaccctgtacgccgtgctggtgtctgccctggtgctgatggctatggtcaagcggaaggacagccgggga

SEQ ID NO: 7351 - DNA, 2544 bp, Artificial Sequence
  Synthetic Polynucloetide
atggccttaccagtgaccgccttgctcctgccgctggccttgctgctccacgccgccaggccggacatccagatgacacagagccctagcagcctgtctgccagcgtgggagacagagtgaccatcacatgcaaggccagcgaccacatcaacaactggctggcctggtatcagcagaagcctggacaggcccctaagctgctgatctacggcgctaccacactggaaacaggcgtgcccagcagattttctggcagcggctctggcaccgactacaccctgacaatatccagcctccagcctgaggacttcgccacctactactgtcagcagagctggaacaccccttggacattcggccagggcaccaagctggaaatcaagagactcgagatccagaaccctgatcctgccgtgtaccagctgcgggatagcaagagcagcgacaagagcgtgtgtctgttcaccgacttcgacagccagaccaacgtgtcccagagcaaggactccgacgtgtacatcaccgataagtgcgtgctggacatgcggagcatggacttcaagagcaactccgccgtggcctggtccaacaagtccgatttcgcctgcgccaacgccttcaacaacagcattatccccgaggacacattcttcccaagccccgagagcagctgcgacgtgaagctggtggaaaagagcttcgagacagacaccaacctgaacttccagaacctgagcgtgatcggcttcagaatcctgctgctgaaagtggccggctttaacctgctgatgaccctgcggctgtggtccagccgcgccaagagaagcggatctggcgtgaagcagaccctgaatttcgacctgctgaagctggctggcgacgtggaatccaacccaggccctactagtatggactggatttggcgcatccttttccttgtcggcgctgctaccggcgcgcattccttcgaacaagttcagcttcaacagcctggcgctgagctggtcaaacctggcgcttctgtgaagatgagctgcaaagccagcggctacgccttcagcagctactggatcaactggatgaagcagaaacccggccagggactcgaatggatcggccaaatctatcccggcgacggcgacaccaactacaacggcaagttcaagggcagagccacactgaccgccgatacctctagcagcacagcctacatgcagctgagcagcctgaccagcgaagatagcgccgtgtacttctgtgcccggtccatcacaacagtcgtgggctgcgctatggactattggggccagggaacaagcgtgaccgtgtctagtacgcgtgaggacctgaagaacgtgttcccacctgaggtggccgtgttcgagcctagcgaggccgagatcagccacacccagaaagccaccctcgtgtgcctggctaccggcttctaccccgaccatgtggaactgtcttggtgggtcaacggcaaagaggtgcacagcggcgtgtgtaccgacccccagccactgaaagaacagcccgccctgaacgacagccggtactgcctgagcagcagactgagagtgtccgccaccttctggcagaacccccggaaccacttcagatgccaggtgcagttctacggcctgagcgagaacgacgagtggacccaggacagagccaagcccgtgacccagatcgtgtctgccgaagcctggggcagagccgattgcggctttaccagcgagagctaccagcagggcgtgctgagcgccaccatcctgtacgagatcctgctgggcaaggccaccctgtacgccgtgctggtgtctgccctggtgctgatggctatggtcaagcggaaggacagccggggaagggccaagcgatctggatctggagcaacaaacttctcactactcaaacaagcaggtgacgtggaggagaatcccgggccttctagaggcgggatccacaccatggctacctacgaggtgctgtgcgaggtggcaagaaagctgggcaccgacgacagagaagtggtgctgttcctgctgaacgtgttcatccctcagcctacactggcccagctgatcggtgcactgagagccctgaaagaggaaggccggctgacctttcctctgctggccgaatgcctgttcagagccggaagaagggatctgctgcgggacctgctgcatctggaccccagatttctggaaagacacctggccggcaccatgagctacttcagcccttaccagctgaccgtgctgcacgttgacggcgaactgtgcgccagagatattcggagcctgatcttcctgagcaaggacaccatcggcagccggtctacccctcagacatttctgcactgggtgtactgcatggaaaacctggacctgctcggccccacagatgtggatgccctgatgtccatgctgagaagcctgagcagagtggacctccagagacaggtgcagacactgatgggactgcacctgagcggacctagccacagccagcactacagacacacccct

SEQ ID NO: 7352 - DNA, 2703 bp, Artificial Sequence
  Synthetic Polynucloetide
atggccttaccagtgaccgccttgctcctgccgctggccttgctgctccacgccgccaggccgctcgaggggaaaccaattcccaaccctcttctgggactggattcaaccggcagcggcgaggacctgaagaacgtgttcccacctgaggtggccgtgttcgagcctagcaaggccgagatcgcccacacccagaaagccaccctcgtgtgcctggctaccggcttctaccccgaccatgtggaactgtcttggtgggtcaacggcaaagaggtgcacagcggcgtgtgtaccgacccccagccactgaaagaacagcccgccctgaacgacagccggtactgcctgagcagcagactgagagtgtccgccaccttctggcagaacccccggaaccacttcagatgccaggtgcagttctacggcctgagcgagaacgacgagtggacccaggacagagccaagcccgtgacccagatcgtgtctgccgaagcctggggcagagccgattgcggcatcaccagcgccagctaccaccagggcgtgctgagcgccaccatcctgtacgagatcctgctgggcaaggccaccctgtacgccgtgctggtgtctgccctggtgctgatggctatggtcaagcggaaggacagccggggaagggccaagcgatctggatctggagcaacaaacttctcactactcaaacaagcaggtgacgtggaggagaatcccgggcctactagcatggccttaccagtgaccgccttgctcctgccgctggccttgctgctccacgccgccaggccggacatccagatgacacagagccctagcagcctgtctgccagcgtgggagacagagtgaccatcacatgcaaggccagcgaccacatcaacaactggctggcctggtatcagcagaagcctggacaggcccctaagctgctgatctacggcgctaccacactggaaacaggcgtgcccagcagattttctggcagcggctctggcaccgactacaccctgacaatatccagcctccagcctgaggacttcgccacctactactgtcagcagagctggaacaccccttggacattcggccagggcaccaagctggaaatcaagagaggcggaggcggaagtggaggcggaggatctggcggcggaggctctcaagttcagcttcaacagcctggcgctgagctggtcaaacctggcgcttctgtgaagatgagctgcaaagccagcggctacgccttcagcagctactggatcaactggatgaagcagaaacccggccagggactcgaatggatcggccaaatctatcccggcgacggcgacaccaactacaacggcaagttcaagggcagagccacactgaccgccgatacctctagcagcacagcctacatgcagctgagcagcctgaccagcgaagatagcgccgtgtacttctgtgcccggtccatcacaacagtcgtgggctgcgctatggactattggggccagggaacaagcgtgaccgtgtctagtacgcgtgagcagaaactgatctcggaagaggatgggagcggcatccagaaccctgatcctgccgtgtaccagctgcgggatagcaagagcagcgacaagagcgtgtgtctgttcaccgacttcgacagccagaccaacgtgtcccagagcaaggactccgacgtgtacatcaccgataagtgcgtgctggacatgcggagcatggacttcaagagcaactccgccgtggcctggtccaacaagtccgatttcgcctgcgccaacgccttcaacaacagcattatccccgaggacacattcttcccaagcagcgacgtgccctgcgacgtgaagctggtggaaaagagcttcgagacagacaccaacctgaacttccagaacctgagcgtgatcggcttcagaatcctgctgctgaaagtggccggctttaacctgctgatgaccctgcggctgtggtccagccgcgccaagagaagcggatctggcgtgaagcagaccctgaatttcgacctgctgaagctggctggcgacgtggaatccaacccaggcccttctagaggccatatgaccgagtacaagcccacggtgcgcctcgccacccgcgacgacgtccccagggccgtacgcaccctcgccgccgcgttcgccgactaccccgccacgcgccacaccgtcgatccggaccgccacatcgagcgggtcaccgagctgcaagaactcttcctcacgcgcgtcgggctcgacatcggcaaggtgtgggtcgcggacgacggcgccgcggtggcggtctggaccacgccggagagcgtcgaagcgggggcggtgttcgccgagatcggcccgcgcatggccgagttgagcggttcccggctggccgcgcagcaacagatggaaggcctcctggcgccgcaccggcccaaggagcccgcgtggttcctggccaccgtcggcgtctcgcccgaccaccagggcaagggtctgggcagcgccgtcgtgctccccggagtggaggcggccgagcgcgccggggtgcccgccttcctggagacctccgcgccccgcaacctccccttctacgagcggctcggcttcaccgtcaccgccgacgtcgaggtgcccgaaggaccgcgcacctggtgcatgacccgcaagcccggtgcctga

SEQ ID NO: 7353 - DNA, 2706 bp, Artificial Sequence
  Synthetic Polynucloetide
atggccttaccagtgaccgccttgctcctgccgctggccttgctgctccacgccgccaggccgctcgagcagaaactgatctcggaagaggatctgggctccggcgatcgccctgatcctgccgtgtaccagctgcgggatagcaagagcagcgacaagagcgtgtgtctgttcaccgacttcgacagccagaccaacgtgtcccagagcaaggactccgacgtgtacatcaccgataagtgcgtgctggacatgcggagcatggacttcaagagcaactccgccgtggcctggtccaacaagtccgatttcgcctgcgccaacgccttcaacaacagcattatccccgaggacacattcttcccaagccccgagagcagctgcgacgtgaagctggtggaaaagagcttcgagacagacaccaacctgaacttccagaacctgagcgtgatcggcttcagaatcctgctgctgaaagtggccggctttaacctgctgatgaccctgcggctgtggtccagctctagtcgcgccaagagaagcggatctggcgtgaagcagaccctgaatttcgacctgctgaagctggctggcgacgtggaatccaacccaggccccactagcatggccttaccagtgaccgccttgctcctgccgctggccttgctgctccacgccgccaggccggacatccagatgacacagagccctagcagcctgtctgccagcgtgggagacagagtgaccatcacatgcaaggccagcgaccacatcaacaactggctggcctggtatcagcagaagcctggacaggcccctaagctgctgatctacggcgctaccacactggaaacaggcgtgcccagcagattttctggcagcggctctggcaccgactacaccctgacaatatccagcctccagcctgaggacttcgccacctactactgtcagcagagctggaacaccccttggacattcggccagggcaccaagctggaaatcaagagaggcggaggcggaagtggaggcggaggatctggcggcggaggctctcaagttcagcttcaacagcctggcgctgagctggtcaaacctggcgcttctgtgaagatgagctgcaaagccagcggctacgccttcagcagctactggatcaactggatgaagcagaaacccggccagggactcgaatggatcggccaaatctatcccggcgacggcgacaccaactacaacggcaagttcaagggcagagccacactgaccgccgatacctctagcagcacagcctacatgcagctgagcagcctgaccagcgaagatagcgccgtgtacttctgtgcccggtccatcacaacagtcgtgggctgcgctatggactattggggccagggaacaagcgtgaccgtgtctagtacgcgtgggaaaccaattcccaaccctcttctgggactggattcaaccggcagcggcgaggacctgaagaacgtgttcccacctgaggtggccgtgttcgagcctagcgaggccgagatcagccacacccagaaagccaccctcgtgtgcctggctaccggcttctaccccgaccatgtggaactgtcttggtgggtcaacggcaaagaggtgcacagcggcgtgtgtaccgacccccagccactgaaagaacagcccgccctgaacgacagccggtactgcctgagcagcagactgagagtgtccgccaccttctggcagaacccccggaaccacttcagatgccaggtgcagttctacggcctgagcgagaacgacgagtggacccaggacagagccaagcccgtgacccagatcgtgtctgccgaagcctggggcagagccgattgcggctttaccagcgagagctaccagcagggcgtgctgagcgccaccatcctgtacgagatcctgctgggcaaggccaccctgtacgccgtgctggtgtctgccctggtgctgatggctatggtcaagcggaaggacagccggggaagggccaagcgatctggatctggagcaacaaacttctcactactcaaacaagcaggtgacgtggaggagaatcccgggccttctagaggccatatgaccgagtacaagcccacggtgcgcctcgccacccgcgacgacgtccccagggccgtacgcaccctcgccgccgcgttcgccgactaccccgccacgcgccacaccgtcgatccggaccgccacatcgagcgggtcaccgagctgcaagaactcttcctcacgcgcgtcgggctcgacatcggcaaggtgtgggtcgcggacgacggcgccgcggtggcggtctggaccacgccggagagcgtcgaagcgggggcggtgttcgccgagatcggcccgcgcatggccgagttgagcggttcccggctggccgcgcagcaacagatggaaggcctcctggcgccgcaccggcccaaggagcccgcgtggttcctggccaccgtcggcgtctcgcccgaccaccagggcaagggtctgggcagcgccgtcgtgctccccggagtggaggcggccgagcgcgccggggtgcccgccttcctggagacctccgcgccccgcaacctccccttctacgagcggctcggcttcaccgtcaccgccgacgtcgaggtgcccgaaggaccgcgcacctggtgcatgacccgcaagcccggtgcctga

SEQ ID NO: 7354 - DNA, 2568 bp, Artificial Sequence
  Synthetic Polynucloetide
atggccttaccagtgaccgccttgctcctgccgctggccttgctgctccacgccgccaggccggacatccagatgacacagagccctagcagcctgtctgccagcgtgggagacagagtgaccatcacatgcaaggccagcgaccacatcaacaactggctggcctggtatcagcagaagcctggacaggcccctaagctgctgatctacggcgctaccacactggaaacaggcgtgcccagcagattttctggcagcggctctggcaccgactacaccctgacaatatccagcctccagcctgaggacttcgccacctactactgtcagcagagctggaacaccccttggacattcggccagggcaccaagctggaaatcaagagactcgaggacctgaagaacgtgttcccacctgaggtggccgtgttcgagcctagcgaggccgagatcagccacacccagaaagccaccctcgtgtgcctggctaccggcttctaccccgaccatgtggaactgtcttggtgggtcaacggcaaagaggtgcacagcggcgtgtctaccgacccccagccactgaaagaacagcccgccctgaacgacagccggtactgcctgagcagcagactgagagtgtccgccaccttctggcagaacccccggaaccacttcagatgccaggtgcagttctacggcctgagcgagaacgacgagtggacccaggacagagccaagcccgtgacccagatcgtgtctgccgaagcctggggcagagccgattgcggctttaccagcgagagctaccagcagggcgtgctgagcgccaccatcctgtacgagatcctgctgggcaaggccaccctgtacgccgtgctggtgtctgccctggtgctgatggctatggtcaagcggaaggacagccggggaagggccaagcgatctggatctggagcaacaaacttctcactactcaaacaagcaggtgacgtggaggagaatcccgggcctactagtatggactggatttggcgcatccttttccttgtcggcgctgctaccggcgcgcattccttcgaacaagttcagcttcaacagcctggcgctgagctggtcaaacctggcgcttctgtgaagatgagctgcaaagccagcggctacgccttcagcagctactggatcaactggatgaagcagaaacccggccagggactcgaatggatcggccaaatctatcccggcgacggcgacaccaactacaacggcaagttcaagggcagagccacactgaccgccgatacctctagcagcacagcctacatgcagctgagcagcctgaccagcgaagatagcgccgtgtacttctgtgcccggtccatcacaacagtcgtgggctgcgctatggactattggggccagggaacaagcgtgaccgtgtctagtacgcgtatccagaaccctgatcctgccgtgtaccagctgcgggatagcaagagcagcgacaagagcgtgtgtctgttcaccgacttcgacagccagaccaacgtgtcccagagcaaggactccgacgtgtacatcaccgataagaccgtgctggacatgcggagcatggacttcaagagcaactccgccgtggcctggtccaacaagtccgatttcgcctgcgccaacgccttcaacaacagcattatccccgaggacacattcttcccaagccccgagagcagctgcgacgtgaagctggtggaaaagagcttcgagacagacaccaacctgaacttccagaacctgagcgtgatcggcttcagaatcctgctgctgaaagtggccggctttaacctgctgatgaccctgcggctgtggtccagccgcgccaagagaagcggatctggcgtgaagcagaccctgaatttcgacctgctgaagctggctggcgacgtggaatccaacccaggcccttctagaggccatatgaccgagtacaagcccacggtgcgcctcgccacccgcgacgacgtccccagggccgtacgcaccctcgccgccgcgttcgccgactaccccgccacgcgccacaccgtcgatccggaccgccacatcgagcgggtcaccgagctgcaagaactcttcctcacgcgcgtcgggctcgacatcggcaaggtgtgggtcgcggacgacggcgccgcggtggcggtctggaccacgccggagagcgtcgaagcgggggcggtgttcgccgagatcggcccgcgcatggccgagttgagcggttcccggctggccgcgcagcaacagatggaaggcctcctggcgccgcaccggcccaaggagcccgcgtggttcctggccaccgtcggcgtctcgcccgaccaccagggcaagggtctgggcagcgccgtcgtgctccccggagtggaggcggccgagcgcgccggggtgcccgccttcctggagacctccgcgccccgcaacctccccttctacgagcggctcggcttcaccgtcaccgccgacgtcgaggtgcccgaaggaccgcgcacctggtgcatgacccgcaagcccggtgcctga

SEQ ID NO: 7355 - DNA, 2814 bp, Artificial Sequence
  Synthetic Polynucloetide
atggccttaccagtgaccgccttgctcctgccgctggccttgctgctccacgccgccaggccggacatccagatgacacagagccctagcagcctgtctgccagcgtgggagacagagtgaccatcacatgcaaggccagcgaccacatcaacaactggctggcctggtatcagcagaagcctggacaggcccctaagctgctgatctacggcgctaccacactggaaacaggcgtgcccagcagattttctggcagcggctctggcaccgactacaccctgacaatatccagcctccagcctgaggacttcgccacctactactgtcagcagagctggaacaccccttggacattcggccagggcaccaagctggaaatcaagagactcgaggacctgaagaacgtgttcccacctgaggtggccgtgttcgagcctagcgaggccgagatcagccacacccagaaagccaccctcgtgtgcctggctaccggcttctaccccgaccatgtggaactgtcttggtgggtcaacggcaaagaggtgcacagcggcgtgtctaccgacccccagccactgaaagaacagcccgccctgaacgacagccggtactgcctgagcagcagactgagagtgtccgccaccttctggcagaacccccggaaccacttcagatgccaggtgcagttctacggcctgagcgagaacgacgagtggacccaggacagagccaagcccgtgacccagatcgtgtctgccgaagcctggggcagagccgattgcggctttaccagcgagagctaccagcagggcgtgctgagcgccaccatcctgtacgagatcctgctgggcaaggccaccctgtacgccgtgctggtgtctgccctggtgctgatggctatggtcaagcggaaggacagccggggaagggccaagcgatctggatctggagcaacaaacttctcactactcaaacaagcaggtgacgtggaggagaatcccgggcctactagtatggactggatttggcgcatccttttccttgtcggcgctgctaccggcgcgcattccttcgaacaagttcagcttcaacagcctggcgctgagctggtcaaacctggcgcttctgtgaagatgagctgcaaagccagcggctacgccttcagcagctactggatcaactggatgaagcagaaacccggccagggactcgaatggatcggccaaatctatcccggcgacggcgacaccaactacaacggcaagttcaagggcagagccacactgaccgccgatacctctagcagcacagcctacatgcagctgagcagcctgaccagcgaagatagcgccgtgtacttctgtgcccggtccatcacaacagtcgtgggctgcgctatggactattggggccagggaacaagcgtgaccgtgtctagtacgcgtgagcagaaactgatctcggaagaggatgggagcggcaccccattcccttctctggcccctcccatcatgctgctggtggacggcaagcagcagatggtggtcgtgtgcctggtgctggatgtggccccacctggactggacagccccatctggtttagcgccggcaatggctctgccctggacgcctttacctacggcccaagccctgccaccgatggcacctggacaaatctggcccacctgagcctgcccagcgaggaactggcttcttgggagcctctcgtgtgccacacaggacctggcgctgagggacacagcagatccacccagcctatgcacctgtctggcgaggccagcaccgccagaacctgtcctcaggaacctctgagaggcacccctggcggagcactgtggctgggagtgctgagactgctgctgttcaagctgctgctgtttgacctgctgctgacctgctcctgtctgtgcgatcctgccggccctctgccttctcctgccaccaccacaagactgagagccctgggcagccacagactgcaccctgccacagagacaggcggcagagaggccacaagcagccctagaccccagcccagagacagaagatggggcgataccccccctggcagaaagcctggatctccagtccgcgccaagagaagcggatctggcgtgaagcagaccctgaatttcgacctgctgaagctggctggcgacgtggaatccaacccaggcccttctagaggccatatgaccgagtacaagcccacggtgcgcctcgccacccgcgacgacgtccccagggccgtacgcaccctcgccgccgcgttcgccgactaccccgccacgcgccacaccgtcgatccggaccgccacatcgagcgggtcaccgagctgcaagaactcttcctcacgcgcgtcgggctcgacatcggcaaggtgtgggtcgcggacgacggcgccgcggtggcggtctggaccacgccggagagcgtcgaagcgggggcggtgttcgccgagatcggcccgcgcatggccgagttgagcggttcccggctggccgcgcagcaacagatggaaggcctcctggcgccgcaccggcccaaggagcccgcgtggttcctggccaccgtcggcgtctcgcccgaccaccagggcaagggtctgggcagcgccgtcgtgctccccggagtggaggcggccgagcgcgccggggtgcccgccttcctggagacctccgcgccccgcaacctccccttctacgagcggctcggcttcaccgtcaccgccgacgtcgaggtgcccgaaggaccgcgcacctggtgcatgacccgcaagcccggtgcctga

SEQ ID NO: 7356 - DNA, 2868 bp, Artificial Sequence
  Synthetic Polynucloetide
atggccttaccagtgaccgccttgctcctgccgctggccttgctgctccacgccgccaggccgctcgaggacctgaagaacgtgttcccacctgaggtggccgtgttcgagcctagcgaggccgagatcagccacacccagaaagccaccctcgtgtgcctggctaccggcttctaccccgaccatgtggaactgtcttggtgggtcaacggcaaagaggtgcacagcggcgtgtctaccgacccccagccactgaaagaacagcccgccctgaacgacagccggtactgcctgagcagcagactgagagtgtccgccaccttctggcagaacccccggaaccacttcagatgccaggtgcagttctacggcctgagcgagaacgacgagtggacccaggacagagccaagcccgtgacccagatcgtgtctgccgaagcctggggcagagccgattgcggctttaccagcgagagctaccagcagggcgtgctgagcgccaccatcctgtacgagatcctgctgggcaaggccaccctgtacgccgtgctggtgtctgccctggtgctgatggctatggtcaagcggaaggacagccggggaagggccaagcgatctggatctggagcaacaaacttctcactactcaaacaagcaggtgacgtggaggagaatcccgggcctactagcatggccttaccagtgaccgccttgctcctgccgctggccttgctgctccacgccgccaggccggacatccagatgacacagagccctagcagcctgtctgccagcgtgggagacagagtgaccatcacatgcaaggccagcgaccacatcaacaactggctggcctggtatcagcagaagcctggacaggcccctaagctgctgatctacggcgctaccacactggaaacaggcgtgcccagcagattttctggcagcggctctggcaccgactacaccctgacaatatccagcctccagcctgaggacttcgccacctactactgtcagcagagctggaacaccccttggacattcggccagggcaccaagctggaaatcaagagaggcggaggcggaagtggaggcggaggatctggcggcggaggctctcaagttcagcttcaacagcctggcgctgagctggtcaaacctggcgcttctgtgaagatgagctgcaaagccagcggctacgccttcagcagctactggatcaactggatgaagcagaaacccggccagggactcgaatggatcggccaaatctatcccggcgacggcgacaccaactacaacggcaagttcaagggcagagccacactgaccgccgatacctctagcagcacagcctacatgcagctgagcagcctgaccagcgaagatagcgccgtgtacttctgtgcccggtccatcacaacagtcgtgggctgcgctatggactattggggccagggaacaagcgtgaccgtgtctagtacgcgtgagcagaaactgatctcggaagaggatctggggagcggcaccccattcccttctctggcccctcccatcatgctgctggtggacggcaagcagcagatggtggtcgtgtgcctggtgctggatgtggccccacctggactggacagccccatctggtttagcgccggcaatggctctgccctggacgcctttacctacggcccaagccctgccaccgatggcacctggacaaatctggcccacctgagcctgcccagcgaggaactggcttcttgggagcctctcgtgtgccacacaggacctggcgctgagggacacagcagatccacccagcctatgcacctgtctggcgaggccagcaccgccagaacctgtcctcaggaacctctgagaggcacccctggcggagcactgtggctgggagtgctgagactgctgctgttcaagctgctgctgtttgacctgctgctgacctgctcctgtctgtgcgatcctgccggccctctgccttctcctgccaccaccacaagactgagagccctgggcagccacagactgcaccctgccacagagacaggcggcagagaggccacaagcagccctagaccccagcccagagacagaagatggggcgataccccccctggcagaaagcctggatctccagtccgcgccaagagaagcggatctggcgtgaagcagaccctgaatttcgacctgctgaagctggctggcgacgtggaatccaacccaggcccttctagatctagaggccatatgaccgagtacaagcccacggtgcgcctcgccacccgcgacgacgtccccagggccgtacgcaccctcgccgccgcgttcgccgactaccccgccacgcgccacaccgtcgatccggaccgccacatcgagcgggtcaccgagctgcaagaactcttcctcacgcgcgtcgggctcgacatcggcaaggtgtgggtcgcggacgacggcgccgcggtggcggtctggaccacgccggagagcgtcgaagcgggggcggtgttcgccgagatcggcccgcgcatggccgagttgagcggttcccggctggccgcgcagcaacagatggaaggcctcctggcgccgcaccggcccaaggagcccgcgtggttcctggccaccgtcggcgtctcgcccgaccaccagggcaagggtctgggcagcgccgtcgtgctccccggagtggaggcggccgagcgcgccggggtgcccgccttcctggagacctccgcgccccgcaacctccccttctacgagcggctcggcttcaccgtcaccgccgacgtcgaggtgcccgaaggaccgcgcacctggtgcatgacccgcaagcccggtgcctga

SEQ ID NO: 7357 - DNA, 2679 bp, Artificial Sequence
  Synthetic Polynucloetide
atggccttaccagtgaccgccttgctcctgccgctggccttgctgctccacgccgccaggccggacatccagatgacacagagccctagcagcctgtctgccagcgtgggagacagagtgaccatcacatgcaaggccagcgaccacatcaacaactggctggcctggtatcagcagaagcctggacaggcccctaagctgctgatctacggcgctaccacactggaaacaggcgtgcccagcagattttctggcagcggctctggcaccgactacaccctgacaatatccagcctccagcctgaggacttcgccacctactactgtcagcagagctggaacaccccttggacattcggccagggcaccaagctggaaatcaagagactcgaggggaaaccaattcccaaccctcttctgggactggattcaaccggcagcggcgacaagcagctggacgccgacgtgtcccccaagcctaccatcttcctgccctctatcgccgagacaaagctccagaaggccggcacctacctgtgcctgctggaaaagttcttcccagatgtgattaagatccactggcaggaaaagaagtccaacaccatcctgggcagccaggaaggcaacaccatgaagaccaacgacacctacatgaagttcagctggctgaccgtgcccgagaagtccctggacaaagaacacagatgcatcgtgcggcacgaaaacaacaagaacggcgtggaccaggaaatcatcttcccacccatcaagaccgatgtgattacaatggaccccaaggacaactgctccaaggacgccaacgataccctgctgctccagctgaccaacaccagcgcctactacatgtacttgttgctgctgctgaagtccgtggtgtacttcgccatcatcacatgctgcctgctgcggagaaccgccttctgctgcaacggcgagaagtctagggccaagcgatctggatctggagcaacaaacttctcactactcaaacaagcaggtgacgtggaggagaatcccgggcctactagtatggactggatttggcgcatccttttccttgtcggcgctgctaccggcgcgcattccttcgaacaagttcagcttcaacagcctggcgctgagctggtcaaacctggcgcttctgtgaagatgagctgcaaagccagcggctacgccttcagcagctactggatcaactggatgaagcagaaacccggccagggactcgaatggatcggccaaatctatcccggcgacggcgacaccaactacaacggcaagttcaagggcagagccacactgaccgccgatacctctagcagcacagcctacatgcagctgagcagcctgaccagcgaagatagcgccgtgtacttctgtgcccggtccatcacaacagtcgtgggctgcgctatggactattggggccagggaacaagcgtgaccgtgtctagtacgcgtgagcagaaactgatctcggaagaggatgggagcggcagccagcctcacaccaagcccagcgtgttcgtgatgaagaacggcaccaacgtggcctgcctcgtgaaagagttctaccccaaggacatcaggatcaacctggtgtccagcaagaagatcaccgagttcgaccccgccatcgtgatctcccccagcggcaagtacaacgccgtgaagctggggaagtacgaggacagcaacagcgtgacctgctccgtgcagcacgacaacaagaccgtgcacagcaccgactttgaagtgaaaaccgactccaccgaccacgtgaagcccaaagagacagagaacaccaagcagcccagcaagagctgccacaagcccaaggccatcgtgcacaccgagaaagtgaacatgatgagcctgaccgtgctgggcctgcggatgctgttcgccaaaaccgtggccgtgaacttcctgctgaccgccaagctgttcttcctccgcgccaagagaagcggatctggcgtgaagcagaccctgaatttcgacctgctgaagctggctggcgacgtggaatccaacccaggcccttctagaggccatatgaccgagtacaagcccacggtgcgcctcgccacccgcgacgacgtccccagggccgtacgcaccctcgccgccgcgttcgccgactaccccgccacgcgccacaccgtcgatccggaccgccacatcgagcgggtcaccgagctgcaagaactcttcctcacgcgcgtcgggctcgacatcggcaaggtgtgggtcgcggacgacggcgccgcggtggcggtctggaccacgccggagagcgtcgaagcgggggcggtgttcgccgagatcggcccgcgcatggccgagttgagcggttcccggctggccgcgcagcaacagatggaaggcctcctggcgccgcaccggcccaaggagcccgcgtggttcctggccaccgtcggcgtctcgcccgaccaccagggcaagggtctgggcagcgccgtcgtgctccccggagtggaggcggccgagcgcgccggggtgcccgccttcctggagacctccgcgccccgcaacctccccttctacgagcggctcggcttcaccgtcaccgccgacgtcgaggtgcccgaaggaccgcgcacctggtgcatgacccgcaagcccggtgcctga

SEQ ID NO: 7358 - DNA, 1890 bp, Artificial Sequence
  Synthetic Polynucloetide
atggccttaccagtgaccgccttgctcctgccgctggccttgctgctccacgccgccaggccggacatccagatgacacagagccctagcagcctgtctgccagcgtgggagacagagtgaccatcacatgcaaggccagcgaccacatcaacaactggctggcctggtatcagcagaagcctggacaggcccctaagctgctgatctacggcgctaccacactggaaacaggcgtgcccagcagattttctggcagcggctctggcaccgactacaccctgacaatatccagcctccagcctgaggacttcgccacctactactgtcagcagagctggaacaccccttggacattcggccagggcaccaagctggaaatcaagagactcgagagccagcctcacaccaagcccagcgtgttcgtgatgaagaacggcaccaacgtggcctgcctcgtgaaagagttctaccccaaggacatcaggatcaacctggtgtccagcaagaagatcaccgagttcgaccccgccatcgtgatctcccccagcggcaagtacaacgccgtgaagctggggaagtacgaggacagcaacagcgtgacctgctccgtgcagcacgacaacaagaccgtgcacagcaccgactttgaagtgaaaaccgactccaccgaccacgtgaagcccaaagagacagagaacaccaagcagcccagcaagagctgccacaagcccaaggccatcgtgcacaccgagaaagtgaacatgatgagcctgaccgtgctgggcctgcggatgctgttcgccaaaaccgtggccgtgaacttcctgctgaccgccaagctgttcttcctcagggccaagcgatctggatctggagcaacaaacttctcactactcaaacaagcaggtgacgtggaggagaatcccgggcctactagtatggactggatttggcgcatccttttccttgtcggcgctgctaccggcgcgcattccttcgaacaagttcagcttcaacagcctggcgctgagctggtcaaacctggcgcttctgtgaagatgagctgcaaagccagcggctacgccttcagcagctactggatcaactggatgaagcagaaacccggccagggactcgaatggatcggccaaatctatcccggcgacggcgacaccaactacaacggcaagttcaagggcagagccacactgaccgccgatacctctagcagcacagcctacatgcagctgagcagcctgaccagcgaagatagcgccgtgtacttctgtgcccggtccatcacaacagtcgtgggctgcgctatggactattggggccagggaacaagcgtgaccgtgtctagtacgcgtgacaagcagctggacgccgacgtgtcccccaagcctaccatcttcctgccctctatcgccgagacaaagctccagaaggccggcacctacctgtgcctgctggaaaagttcttcccagatgtgattaagatccactggcaggaaaagaagtccaacaccatcctgggcagccaggaaggcaacaccatgaagaccaacgacacctacatgaagttcagctggctgaccgtgcccgagaagtccctggacaaagaacacagatgcatcgtgcggcacgaaaacaacaagaacggcgtggaccaggaaatcatcttcccacccatcaagaccgatgtgattacaatggaccccaaggacaactgctccaaggacgccaacgataccctgctgctccagctgaccaacaccagcgcctactacatgtacttgttgctgctgctgaagtccgtggtgtacttcgccatcatcacatgctgcctgctgcggagaaccgccttctgctgcaacggcgagaagtct

SEQ ID NO: 7359 - DNA, 2724 bp, Artificial Sequence
  Synthetic Polynucloetide
atggccttaccagtgaccgccttgctcctgccgctggccttgctgctccacgccgccaggccgctcgaggggaaaccaattcccaaccctcttctgggactggattcaaccggcagcggcgacaagcagctggacgccgacgtgtcccccaagcctaccatcttcctgccctctatcgccgagacaaagctccagaaggccggcacctacctgtgcctgctggaaaagttcttcccagatgtgattaagatccactggcaggaaaagaagtccaacaccatcctgggcagccaggaaggcaacaccatgaagaccaacgacacctacatgaagttcagctggctgaccgtgcccgagaagtccctggacaaagaacacagatgcatcgtgcggcacgaaaacaacaagaacggcgtggaccaggaaatcatcttcccacccatcaagaccgatgtgattacaatggaccccaaggacaactgctccaaggacgccaacgataccctgctgctccagctgaccaacaccagcgcctactacatgtacttgttgctgctgctgaagtccgtggtgtacttcgccatcatcacatgctgcctgctgcggagaaccgccttctgctgcaacggcgagaagtctagggccaagcgatctggatctggagcaacaaacttctcactactcaaacaagcaggtgacgtggaggagaatcccgggcctactagcatggccttaccagtgaccgccttgctcctgccgctggccttgctgctccacgccgccaggccggacatccagatgacacagagccctagcagcctgtctgccagcgtgggagacagagtgaccatcacatgcaaggccagcgaccacatcaacaactggctggcctggtatcagcagaagcctggacaggcccctaagctgctgatctacggcgctaccacactggaaacaggcgtgcccagcagattttctggcagcggctctggcaccgactacaccctgacaatatccagcctccagcctgaggacttcgccacctactactgtcagcagagctggaacaccccttggacattcggccagggcaccaagctggaaatcaagagaggcggaggcggaagtggaggcggaggatctggcggcggaggctctcaagttcagcttcaacagcctggcgctgagctggtcaaacctggcgcttctgtgaagatgagctgcaaagccagcggctacgccttcagcagctactggatcaactggatgaagcagaaacccggccagggactcgaatggatcggccaaatctatcccggcgacggcgacaccaactacaacggcaagttcaagggcagagccacactgaccgccgatacctctagcagcacagcctacatgcagctgagcagcctgaccagcgaagatagcgccgtgtacttctgtgcccggtccatcacaacagtcgtgggctgcgctatggactattggggccagggaacaagcgtgaccgtgtctagtacgcgtgagcagaaactgatctcggaagaggatgggagcggcagccagcctcacaccaagcccagcgtgttcgtgatgaagaacggcaccaacgtggcctgcctcgtgaaagagttctaccccaaggacatcaggatcaacctggtgtccagcaagaagatcaccgagttcgaccccgccatcgtgatctcccccagcggcaagtacaacgccgtgaagctggggaagtacgaggacagcaacagcgtgacctgctccgtgcagcacgacaacaagaccgtgcacagcaccgactttgaagtgaaaaccgactccaccgaccacgtgaagcccaaagagacagagaacaccaagcagcccagcaagagctgccacaagcccaaggccatcgtgcacaccgagaaagtgaacatgatgagcctgaccgtgctgggcctgcggatgctgttcgccaaaaccgtggccgtgaacttcctgctgaccgccaagctgttcttcctccgcgccaagagaagcggatctggcgtgaagcagaccctgaatttcgacctgctgaagctggctggcgacgtggaatccaacccaggcccttctagaggccatatgaccgagtacaagcccacggtgcgcctcgccacccgcgacgacgtccccagggccgtacgcaccctcgccgccgcgttcgccgactaccccgccacgcgccacaccgtcgatccggaccgccacatcgagcgggtcaccgagctgcaagaactcttcctcacgcgcgtcgggctcgacatcggcaaggtgtgggtcgcggacgacggcgccgcggtggcggtctggaccacgccggagagcgtcgaagcgggggcggtgttcgccgagatcggcccgcgcatggccgagttgagcggttcccggctggccgcgcagcaacagatggaaggcctcctggcgccgcaccggcccaaggagcccgcgtggttcctggccaccgtcggcgtctcgcccgaccaccagggcaagggtctgggcagcgccgtcgtgctccccggagtggaggcggccgagcgcgccggggtgcccgccttcctggagacctccgcgccccgcaacctccccttctacgagcggctcggcttcaccgtcaccgccgacgtcgaggtgcccgaaggaccgcgcacctggtgcatgacccgcaagcccggtgcctga

SEQ ID NO: 7360 - DNA, 3099 bp, Artificial Sequence
  Synthetic Polynucloetide
atggccttaccagtgaccgccttgctcctgccgctggccttgctgctccacgccgccaggccggacatccagatgacacagagccctagcagcctgtctgccagcgtgggagacagagtgaccatcacatgcaaggccagcgaccacatcaacaactggctggcctggtatcagcagaagcctggacaggcccctaagctgctgatctacggcgctaccacactggaaacaggcgtgcccagcagattttctggcagcggctctggcaccgactacaccctgacaatatccagcctccagcctgaggacttcgccacctactactgtcagcagagctggaacaccccttggacattcggccagggcaccaagctggaaatcaagagaggacagcctaaggccaatcctaccgtgacactgttccctccaagcagcgaagaactccaggccaacaaggccacacttgtgtgcctgatctccgacttctaccctggggctgtgacagtggcttggaaggccgatggatctcctgtgaaagccggcgtggaaaccaccaagccatccaagcagagcaacaacaaatacgccgccagctcctacctgagcctgacacctgagcagtggaagtcccacagatcctacagctgccaagtgacccacgaaggcagcaccgtggaaaagacagtggcccctacagagtgcagcggatcccagagcttcggcctgctggaccccaagctgtgctacctgctggatggcatcctgttcatctacggcgtgatcctgaccgccctgttcctgagagtgaagttcagcagaagcgccgacgcccctgcctaccagcagggacagaaccaactgtacaacgagctgaacctgggcagacgggaagagtacgacgtgctggacaagcggagaggcagggaccctgagatgggcggaaagccccagcggagaaagaacccccaggaaggactgtataacgaactccagaaagacaagatggccgaagcctacagcgagatcggcatgaagggcgagcggagaagaggcaagggccacgatggcctgtaccagggcctgagcaccgccaccaaggacacctatgacgccctgcacatgcaggccctgcctccaagaagggccaagcgatctggatctggagcaacaaacttctcactactcaaacaagcaggtgacgtggaggagaatcccgggcctactagtatggactggatttggcgcatccttttccttgtcggcgctgctaccggcgcgcattccttcgaacaagttcagcttcaacagcctggcgctgagctggtcaaacctggcgcttctgtgaagatgagctgcaaagccagcggctacgccttcagcagctactggatcaactggatgaagcagaaacccggccagggactcgaatggatcggccaaatctatcccggcgacggcgacaccaactacaacggcaagttcaagggcagagccacactgaccgccgatacctctagcagcacagcctacatgcagctgagcagcctgaccagcgaagatagcgccgtgtacttctgtgcccggtccatcacaacagtcgtgggctgcgctatggactattggggccagggaacaagcgtgaccgtgtctagtgcctctacaaagggaccctccgtgtttcctctggctcccagcagcaagtctacaagcggaggaacagccgctctgggctgcctggtcaaggattactttcccgagcctgtgaccgtgtcctggaatagcggagcactgacaagcggcgtgcacacctttccagccgtgctgcaaagcagcggcctgtactctctgagcagcgtggtcacagtgcctagctctagcctgggcacccagacctacatctgcaatgtgaaccacaagcctagcaacaccaaggtggacaagagagtggaacccaagagctgtggtacccagagttttgggttgttggaccctaaattgtgctatctgttggacggaatcctgttcatttacggagtgatcctgaccgcattgttcctgcgggttaagttttccagatccgcagacgcacccgcttaccaacaagggcagaaccaactctacaatgaacttaatttggggcggagggaagagtacgacgttctggacaaaaggaggggacgagatcccgagatgggcggaaagcctcagcgaaggaagaatccgcaagaggggctttataacgaactccagaaagataaaatggcagaagcctatagtgagattgggatgaagggagaaaggaggaggggtaaaggtcacgatgggttgtaccaaggattgagcacagccactaaagatacctatgatgcgctccacatgcaggccctgccgccaagacgcgccaagagaagcggatctggcgtgaagcagaccctgaatttcgacctgctgaagctggctggcgacgtggaatccaacccaggcccttctagaggccatatgaccgagtacaagcccacggtgcgcctcgccacccgcgacgacgtccccagggccgtacgcaccctcgccgccgcgttcgccgactaccccgccacgcgccacaccgtcgatccggaccgccacatcgagcgggtcaccgagctgcaagaactcttcctcacgcgcgtcgggctcgacatcggcaaggtgtgggtcgcggacgacggcgccgcggtggcggtctggaccacgccggagagcgtcgaagcgggggcggtgttcgccgagatcggcccgcgcatggccgagttgagcggttcccggctggccgcgcagcaacagatggaaggcctcctggcgccgcaccggcccaaggagcccgcgtggttcctggccaccgtcggcgtctcgcccgaccaccagggcaagggtctgggcagcgccgtcgtgctccccggagtggaggcggccgagcgcgccggggtgcccgccttcctggagacctccgcgccccgcaacctccccttctacgagcggctcggcttcaccgtcaccgccgacgtcgaggtgcccgaaggaccgcgcacctggtgcatgacccgcaagcccggtgcctga

SEQ ID NO: 7361 - DNA, 2454 bp, Artificial Sequence
  Synthetic Polynucloetide
atggccttaccagtgaccgccttgctcctgccgctggccttgctgctccacgccgccaggccggacatccagatgacacagagccctagcagcctgtctgccagcgtgggagacagagtgaccatcacatgcaaggccagcgaccacatcaacaactggctggcctggtatcagcagaagcctggacaggcccctaagctgctgatctacggcgctaccacactggaaacaggcgtgcccagcagattttctggcagcggctctggcaccgactacaccctgacaatatccagcctccagcctgaggacttcgccacctactactgtcagcagagctggaacaccccttggacattcggccagggcaccaagctggaaatcaagagactcgaggacctgaagaacgtgttcccacctgaggtggccgtgttcgagcctagcgaggccgagatcagccacacccagaaagccaccctcgtgtgcctggctaccggcttctaccccgaccatgtggaactgtcttggtgggtcaacggcaaagaggtgcacagcggcgtgtctaccgacccccagccactgaaagaacagcccgccctgaacgacagccggtactgcctgagcagcagactgagagtgtccgccaccttctggcagaacccccggaaccacttcagatgccaggtgcagttctacggcctgagcgagaacgacgagtggacccaggacagagccaagcccgtgacccagatcgtgtctgccgaagcctggggcagagccgattgcggatcccagagcttcggcctgctggaccccaagctgtgctacctgctggatggcatcctgttcatctacggcgtgatcctgaccgccctgttcctgagagtgaagttcagcagaagcgccgacgcccctgcctaccagcagggacagaaccaactgtacaacgagctgaacctgggcagacgggaagagtacgacgtgctggacaagcggagaggcagggaccctgagatgggcggaaagccccagcggagaaagaacccccaggaaggactgtataacgaactccagaaagacaagatggccgaagcctacagcgagatcggcatgaagggcgagcggagaagaggcaagggccacgatggcctgtaccagggcctgagcaccgccaccaaggacacctatgacgccctgcacatgcaggccctgcctccaagaagggccaagcgatctggatctggagcaacaaacttctcactactcaaacaagcaggtgacgtggaggagaatcccgggcctactagtatggactggatttggcgcatccttttccttgtcggcgctgctaccggcgcgcattccttcgaacaagttcagcttcaacagcctggcgctgagctggtcaaacctggcgcttctgtgaagatgagctgcaaagccagcggctacgccttcagcagctactggatcaactggatgaagcagaaacccggccagggactcgaatggatcggccaaatctatcccggcgacggcgacaccaactacaacggcaagttcaagggcagagccacactgaccgccgatacctctagcagcacagcctacatgcagctgagcagcctgaccagcgaagatagcgccgtgtacttctgtgcccggtccatcacaacagtcgtgggctgcgctatggactattggggccagggaacaagcgtgaccgtgtctagtacgcgtatccagaaccctgatcctgccgtgtaccagctgcgggatagcaagagcagcgacaagagcgtgtgtctgttcaccgacttcgacagccagaccaacgtgtcccagagcaaggactccgacgtgtacatcaccgataagaccgtgctggacatgcggagcatggacttcaagagcaactccgccgtggcctggtccaacaagtccgatttcgcctgcgccaacgccttcaacaacagcattatccccgaggacacattcttcccaagccccgagagcagctgcggtacccagagttttgggttgttggaccctaaattgtgctatctgttggacggaatcctgttcatttacggagtgatcctgaccgcattgttcctgcgggttaagttttccagatccgcagacgcacccgcttaccaacaagggcagaaccaactctacaatgaacttaatttggggcggagggaagagtacgacgttctggacaaaaggaggggacgagatcccgagatgggcggaaagcctcagcgaaggaagaatccgcaagaggggctttataacgaactccagaaagataaaatggcagaagcctatagtgagattgggatgaagggagaaaggaggaggggtaaaggtcacgatgggttgtaccaaggattgagcacagccactaaagatacctatgatgcgctccacatgcaggccctgccgccaaga

SEQ ID NO: 7362 - DNA, 2454 bp, Artificial Sequence
  Synthetic Polynucloetide
atggccttaccagtgaccgccttgctcctgccgctggccttgctgctccacgccgccaggccggacatccagatgacacagagccctagcagcctgtctgccagcgtgggagacagagtgaccatcacatgcaaggccagcgaccacatcaacaactggctggcctggtatcagcagaagcctggacaggcccctaagctgctgatctacggcgctaccacactggaaacaggcgtgcccagcagattttctggcagcggctctggcaccgactacaccctgacaatatccagcctccagcctgaggacttcgccacctactactgtcagcagagctggaacaccccttggacattcggccagggcaccaagctggaaatcaagagactcgaggacctgaagaacgtgttcccacctgaggtggccgtgttcgagcctagcaaggccgagatcgcccacacccagaaagccaccctcgtgtgcctggctaccggcttctaccccgaccatgtggaactgtcttggtgggtcaacggcaaagaggtgcacagcggcgtgtgtaccgacccccagccactgaaagaacagcccgccctgaacgacagccggtactgcctgagcagcagactgagagtgtccgccaccttctggcagaacccccggaaccacttcagatgccaggtgcagttctacggcctgagcgagaacgacgagtggacccaggacagagccaagcccgtgacccagatcgtgtctgccgaagcctggggcagagccgattgcggatcccagagcttcggcctgctggaccccaagctgtgctacctgctggatggcatcctgttcatctacggcgtgatcctgaccgccctgttcctgagagtgaagttcagcagaagcgccgacgcccctgcctaccagcagggacagaaccaactgtacaacgagctgaacctgggcagacgggaagagtacgacgtgctggacaagcggagaggcagggaccctgagatgggcggaaagccccagcggagaaagaacccccaggaaggactgtataacgaactccagaaagacaagatggccgaagcctacagcgagatcggcatgaagggcgagcggagaagaggcaagggccacgatggcctgtaccagggcctgagcaccgccaccaaggacacctatgacgccctgcacatgcaggccctgcctccaagaagggccaagcgatctggatctggagcaacaaacttctcactactcaaacaagcaggtgacgtggaggagaatcccgggcctactagtatggactggatttggcgcatccttttccttgtcggcgctgctaccggcgcgcattccttcgaacaagttcagcttcaacagcctggcgctgagctggtcaaacctggcgcttctgtgaagatgagctgcaaagccagcggctacgccttcagcagctactggatcaactggatgaagcagaaacccggccagggactcgaatggatcggccaaatctatcccggcgacggcgacaccaactacaacggcaagttcaagggcagagccacactgaccgccgatacctctagcagcacagcctacatgcagctgagcagcctgaccagcgaagatagcgccgtgtacttctgtgcccggtccatcacaacagtcgtgggctgcgctatggactattggggccagggaacaagcgtgaccgtgtctagtacgcgtatccagaaccctgatcctgccgtgtaccagctgcgggatagcaagagcagcgacaagagcgtgtgtctgttcaccgacttcgacagccagaccaacgtgtcccagagcaaggactccgacgtgtacatcaccgataagtgcgtgctggacatgcggagcatggacttcaagagcaactccgccgtggcctggtccaacaagtccgatttcgcctgcgccaacgccttcaacaacagcattatccccgaggacacattcttcccaagcagcgacgtgccctgcggtacccagagttttgggttgttggaccctaaattgtgctatctgttggacggaatcctgttcatttacggagtgatcctgaccgcattgttcctgcgggttaagttttccagatccgcagacgcacccgcttaccaacaagggcagaaccaactctacaatgaacttaatttggggcggagggaagagtacgacgttctggacaaaaggaggggacgagatcccgagatgggcggaaagcctcagcgaaggaagaatccgcaagaggggctttataacgaactccagaaagataaaatggcagaagcctatagtgagattgggatgaagggagaaaggaggaggggtaaaggtcacgatgggttgtaccaaggattgagcacagccactaaagatacctatgatgcgctccacatgcaggccctgccgccaaga

SEQ ID NO: 7363 - DNA, 2667 bp, Artificial Sequence
  Synthetic Polynucloetide
atggccttaccagtgaccgccttgctcctgccgctggccttgctgctccacgccgccaggccggacatccagatgacacagagccctagcagcctgtctgccagcgtgggagacagagtgaccatcacatgcaaggccagcgaccacatcaacaactggctggcctggtatcagcagaagcctggacaggcccctaagctgctgatctacggcgctaccacactggaaacaggcgtgcccagcagattttctggcagcggctctggcaccgactacaccctgacaatatccagcctccagcctgaggacttcgccacctactactgtcagcagagctggaacaccccttggacattcggccagggcaccaagctggaaatcaagagactcgaggggaaaccaattcccaaccctcttctgggactggattcaaccggcagcggcgaggacctgaagaacgtgttcccacctgaggtggccgtgttcgagcctagcgaggccgagatcagccacacccagaaagccaccctcgtgtgcctggctaccggcttctaccccgaccatgtggaactgtcttggtgggtcaacggcaaagaggtgcacagcggcgtgtctaccgacccccagccactgaaagaacagcccgccctgaacgacagccggtactgcctgagcagcagactgagagtgtccgccaccttctggcagaacccccggaaccacttcagatgccaggtgcagttctacggcctgagcgagaacgacgagtggacccaggacagagccaagcccgtgacccagatcgtgtctgccgaagcctggggcagagccgattgcggatcccagagcttcggcctgctggaccccaagctgtgctacctgctggatggcatcctgttcatctacggcgtgatcctgaccgccctgttcctgagagtgaagttcagcagaagcgccgacgcccctgcctaccagcagggacagaaccaactgtacaacgagctgaacctgggcagacgggaagagtacgacgtgctggacaagcggagaggcagggaccctgagatgggcggaaagccccagcggagaaagaacccccaggaaggactgtataacgaactccagaaagacaagatggccgaagcctacagcgagatcggcatgaagggcgagcggagaagaggcaagggccacgatggcctgtaccagggcctgagcaccgccaccaaggacacctatgacgccctgcacatgcaggccctgcctccaagaagggccaagcgatctggatctggagcaacaaacttctcactactcaaacaagcaggtgacgtggaggagaatcccgggcctactagtatggactggatttggcgcatccttttccttgtcggcgctgctaccggcgcgcattccttcgaacaagttcagcttcaacagcctggcgctgagctggtcaaacctggcgcttctgtgaagatgagctgcaaagccagcggctacgccttcagcagctactggatcaactggatgaagcagaaacccggccagggactcgaatggatcggccaaatctatcccggcgacggcgacaccaactacaacggcaagttcaagggcagagccacactgaccgccgatacctctagcagcacagcctacatgcagctgagcagcctgaccagcgaagatagcgccgtgtacttctgtgcccggtccatcacaacagtcgtgggctgcgctatggactattggggccagggaacaagcgtgaccgtgtctagtacgcgtgagcagaaactgatctcggaagaggatgggagcggcatccagaaccctgatcctgccgtgtaccagctgcgggatagcaagagcagcgacaagagcgtgtgtctgttcaccgacttcgacagccagaccaacgtgtcccagagcaaggactccgacgtgtacatcaccgataagaccgtgctggacatgcggagcatggacttcaagagcaactccgccgtggcctggtccaacaagtccgatttcgcctgcgccaacgccttcaacaacagcattatccccgaggacacattcttcccaagccccgagagcagctgcggtacccagagttttgggttgttggaccctaaattgtgctatctgttggacggaatcctgttcatttacggagtgatcctgaccgcattgttcctgaggagcaagcggtcacggctgctccacagcgattacatgaatatgacaccacgaagaccgggtcctactcgcaaacactaccaaccctacgcacctccccgcgactttgcagcgtaccgatctcgggttaagttttccagatccgcagacgcacccgcttaccaacaagggcagaaccaactctacaatgaacttaatttggggcggagggaagagtacgacgttctggacaaaaggaggggacgagatcccgagatgggcggaaagcctcagcgaaggaagaatccgcaagaggggctttataacgaactccagaaagataaaatggcagaagcctatagtgagattgggatgaagggagaaaggaggaggggtaaaggtcacgatgggttgtaccaaggattgagcacagccactaaagatacctatgatgcgctccacatgcaggccctgccgccaaga

SEQ ID NO: 7364 - DNA, 2790 bp, Artificial Sequence
  Synthetic Polynucloetide
atggccttaccagtgaccgccttgctcctgccgctggccttgctgctccacgccgccaggccggacatccagatgacacagagccctagcagcctgtctgccagcgtgggagacagagtgaccatcacatgcaaggccagcgaccacatcaacaactggctggcctggtatcagcagaagcctggacaggcccctaagctgctgatctacggcgctaccacactggaaacaggcgtgcccagcagattttctggcagcggctctggcaccgactacaccctgacaatatccagcctccagcctgaggacttcgccacctactactgtcagcagagctggaacaccccttggacattcggccagggcaccaagctggaaatcaagagactcgaggggaaaccaattcccaaccctcttctgggactggattcaaccggcagcggcgaggacctgaagaacgtgttcccacctgaggtggccgtgttcgagcctagcgaggccgagatcagccacacccagaaagccaccctcgtgtgcctggctaccggcttctaccccgaccatgtggaactgtcttggtgggtcaacggcaaagaggtgcacagcggcgtgtctaccgacccccagccactgaaagaacagcccgccctgaacgacagccggtactgcctgagcagcagactgagagtgtccgccaccttctggcagaacccccggaaccacttcagatgccaggtgcagttctacggcctgagcgagaacgacgagtggacccaggacagagccaagcccgtgacccagatcgtgtctgccgaagcctggggcagagccgattgcggatcccagagcttcggcctgctggaccccaagctgtgctacctgctggatggcatcctgttcatctacggcgtgatcctgaccgccctgttcctgaggagtaagaggagcaggctcctgcacagtgactacatgaacatgactccacgccgccccggacccacccgcaagcattaccagccctatgccccaccacgcgacttcgcagcctatcgctccagagtgaagttcagcagaagcgccgacgcccctgcctaccagcagggacagaaccaactgtacaacgagctgaacctgggcagacgggaagagtacgacgtgctggacaagcggagaggcagggaccctgagatgggcggaaagccccagcggagaaagaacccccaggaaggactgtataacgaactccagaaagacaagatggccgaagcctacagcgagatcggcatgaagggcgagcggagaagaggcaagggccacgatggcctgtaccagggcctgagcaccgccaccaaggacacctatgacgccctgcacatgcaggccctgcctccaagaagggccaagcgatctggatctggagcaacaaacttctcactactcaaacaagcaggtgacgtggaggagaatcccgggcctactagtatggactggatttggcgcatccttttccttgtcggcgctgctaccggcgcgcattccttcgaacaagttcagcttcaacagcctggcgctgagctggtcaaacctggcgcttctgtgaagatgagctgcaaagccagcggctacgccttcagcagctactggatcaactggatgaagcagaaacccggccagggactcgaatggatcggccaaatctatcccggcgacggcgacaccaactacaacggcaagttcaagggcagagccacactgaccgccgatacctctagcagcacagcctacatgcagctgagcagcctgaccagcgaagatagcgccgtgtacttctgtgcccggtccatcacaacagtcgtgggctgcgctatggactattggggccagggaacaagcgtgaccgtgtctagtacgcgtgagcagaaactgatctcggaagaggatgggagcggcatccagaaccctgatcctgccgtgtaccagctgcgggatagcaagagcagcgacaagagcgtgtgtctgttcaccgacttcgacagccagaccaacgtgtcccagagcaaggactccgacgtgtacatcaccgataagaccgtgctggacatgcggagcatggacttcaagagcaactccgccgtggcctggtccaacaagtccgatttcgcctgcgccaacgccttcaacaacagcattatccccgaggacacattcttcccaagccccgagagcagctgcggtacccagagttttgggttgttggaccctaaattgtgctatctgttggacggaatcctgttcatttacggagtgatcctgaccgcattgttcctgaggagcaagcggtcacggctgctccacagcgattacatgaatatgacaccacgaagaccgggtcctactcgcaaacactaccaaccctacgcacctccccgcgactttgcagcgtaccgatctcgggttaagttttccagatccgcagacgcacccgcttaccaacaagggcagaaccaactctacaatgaacttaatttggggcggagggaagagtacgacgttctggacaaaaggaggggacgagatcccgagatgggcggaaagcctcagcgaaggaagaatccgcaagaggggctttataacgaactccagaaagataaaatggcagaagcctatagtgagattgggatgaagggagaaaggaggaggggtaaaggtcacgatgggttgtaccaaggattgagcacagccactaaagatacctatgatgcgctccacatgcaggccctgccgccaaga

SEQ ID NO: 7365 - DNA, 2673 bp, Artificial Sequence
  Synthetic Polynucloetide
atggccttaccagtgaccgccttgctcctgccgctggccttgctgctccacgccgccaggccggacatccagatgacacagagccctagcagcctgtctgccagcgtgggagacagagtgaccatcacatgcaaggccagcgaccacatcaacaactggctggcctggtatcagcagaagcctggacaggcccctaagctgctgatctacggcgctaccacactggaaacaggcgtgcccagcagattttctggcagcggctctggcaccgactacaccctgacaatatccagcctccagcctgaggacttcgccacctactactgtcagcagagctggaacaccccttggacattcggccagggcaccaagctggaaatcaagagactcgaggggaaaccaattcccaaccctcttctgggactggattcaaccggcagcggcgaggacctgaagaacgtgttcccacctgaggtggccgtgttcgagcctagcgaggccgagatcagccacacccagaaagccaccctcgtgtgcctggctaccggcttctaccccgaccatgtggaactgtcttggtgggtcaacggcaaagaggtgcacagcggcgtgtctaccgacccccagccactgaaagaacagcccgccctgaacgacagccggtactgcctgagcagcagactgagagtgtccgccaccttctggcagaacccccggaaccacttcagatgccaggtgcagttctacggcctgagcgagaacgacgagtggacccaggacagagccaagcccgtgacccagatcgtgtctgccgaagcctggggcagagccgattgcggatcccagagcttcggcctgctggaccccaagctgtgctacctgctggatggcatcctgttcatctacggcgtgatcctgaccgccctgttcctgagagtgaagttcagcagaagcgccgacgcccctgcctaccagcagggacagaaccaactgtacaacgagctgaacctgggcagacgggaagagtacgacgtgctggacaagcggagaggcagggaccctgagatgggcggaaagccccagcggagaaagaacccccaggaaggactgtataacgaactccagaaagacaagatggccgaagcctacagcgagatcggcatgaagggcgagcggagaagaggcaagggccacgatggcctgtaccagggcctgagcaccgccaccaaggacacctatgacgccctgcacatgcaggccctgcctccaagaagggccaagcgatctggatctggagcaacaaacttctcactactcaaacaagcaggtgacgtggaggagaatcccgggcctactagtatggactggatttggcgcatccttttccttgtcggcgctgctaccggcgcgcattccttcgaacaagttcagcttcaacagcctggcgctgagctggtcaaacctggcgcttctgtgaagatgagctgcaaagccagcggctacgccttcagcagctactggatcaactggatgaagcagaaacccggccagggactcgaatggatcggccaaatctatcccggcgacggcgacaccaactacaacggcaagttcaagggcagagccacactgaccgccgatacctctagcagcacagcctacatgcagctgagcagcctgaccagcgaagatagcgccgtgtacttctgtgcccggtccatcacaacagtcgtgggctgcgctatggactattggggccagggaacaagcgtgaccgtgtctagtacgcgtgagcagaaactgatctcggaagaggatctggggagcggcatccagaaccctgatcctgccgtgtaccagctgcgggatagcaagagcagcgacaagagcgtgtgtctgttcaccgacttcgacagccagaccaacgtgtcccagagcaaggactccgacgtgtacatcaccgataagaccgtgctggacatgcggagcatggacttcaagagcaactccgccgtggcctggtccaacaagtccgatttcgcctgcgccaacgccttcaacaacagcattatccccgaggacacattcttcccaagccccgagagcagctgcggtacccagagttttgggttgttggaccctaaattgtgctatctgttggacggaatcctgttcatttacggagtgatcctgaccgcattgttcctgaagagaggccggaagaagctgctgtacatcttcaagcagcctttcatgcggcccgtgcagaccacccaggaagaggacggctgctcctgccggttccccgaggaagaagaaggcggctgcgagctgcgggttaagttttccagatccgcagacgcacccgcttaccaacaagggcagaaccaactctacaatgaacttaatttggggcggagggaagagtacgacgttctggacaaaaggaggggacgagatcccgagatgggcggaaagcctcagcgaaggaagaatccgcaagaggggctttataacgaactccagaaagataaaatggcagaagcctatagtgagattgggatgaagggagaaaggaggaggggtaaaggtcacgatgggttgtaccaaggattgagcacagccactaaagatacctatgatgcgctccacatgcaggccctgccgccaaga

SEQ ID NO: 7366 - DNA, 2799 bp, Artificial Sequence
  Synthetic Polynucloetide
atggccttaccagtgaccgccttgctcctgccgctggccttgctgctccacgccgccaggccggacatccagatgacacagagccctagcagcctgtctgccagcgtgggagacagagtgaccatcacatgcaaggccagcgaccacatcaacaactggctggcctggtatcagcagaagcctggacaggcccctaagctgctgatctacggcgctaccacactggaaacaggcgtgcccagcagattttctggcagcggctctggcaccgactacaccctgacaatatccagcctccagcctgaggacttcgccacctactactgtcagcagagctggaacaccccttggacattcggccagggcaccaagctggaaatcaagagactcgaggggaaaccaattcccaaccctcttctgggactggattcaaccggcagcggcgaggacctgaagaacgtgttcccacctgaggtggccgtgttcgagcctagcgaggccgagatcagccacacccagaaagccaccctcgtgtgcctggctaccggcttctaccccgaccatgtggaactgtcttggtgggtcaacggcaaagaggtgcacagcggcgtgtctaccgacccccagccactgaaagaacagcccgccctgaacgacagccggtactgcctgagcagcagactgagagtgtccgccaccttctggcagaacccccggaaccacttcagatgccaggtgcagttctacggcctgagcgagaacgacgagtggacccaggacagagccaagcccgtgacccagatcgtgtctgccgaagcctggggcagagccgattgcggatcccagagcttcggcctgctggaccccaagctgtgctacctgctggatggcatcctgttcatctacggcgtgatcctgaccgccctgttcctgaaacggggcagaaagaaactcctgtatatattcaaacaaccatttatgagaccagtacaaactactcaagaggaagatggctgtagctgccgatttccagaagaagaagaaggaggatgtgaactgagagtgaagttcagcagaagcgccgacgcccctgcctaccagcagggacagaaccaactgtacaacgagctgaacctgggcagacgggaagagtacgacgtgctggacaagcggagaggcagggaccctgagatgggcggaaagccccagcggagaaagaacccccaggaaggactgtataacgaactccagaaagacaagatggccgaagcctacagcgagatcggcatgaagggcgagcggagaagaggcaagggccacgatggcctgtaccagggcctgagcaccgccaccaaggacacctatgacgccctgcacatgcaggccctgcctccaagaagggccaagcgatctggatctggagcaacaaacttctcactactcaaacaagcaggtgacgtggaggagaatcccgggcctactagtatggactggatttggcgcatccttttccttgtcggcgctgctaccggcgcgcattccttcgaacaagttcagcttcaacagcctggcgctgagctggtcaaacctggcgcttctgtgaagatgagctgcaaagccagcggctacgccttcagcagctactggatcaactggatgaagcagaaacccggccagggactcgaatggatcggccaaatctatcccggcgacggcgacaccaactacaacggcaagttcaagggcagagccacactgaccgccgatacctctagcagcacagcctacatgcagctgagcagcctgaccagcgaagatagcgccgtgtacttctgtgcccggtccatcacaacagtcgtgggctgcgctatggactattggggccagggaacaagcgtgaccgtgtctagtacgcgtgagcagaaactgatctcggaagaggatctggggagcggcatccagaaccctgatcctgccgtgtaccagctgcgggatagcaagagcagcgacaagagcgtgtgtctgttcaccgacttcgacagccagaccaacgtgtcccagagcaaggactccgacgtgtacatcaccgataagaccgtgctggacatgcggagcatggacttcaagagcaactccgccgtggcctggtccaacaagtccgatttcgcctgcgccaacgccttcaacaacagcattatccccgaggacacattcttcccaagccccgagagcagctgcggtacccagagttttgggttgttggaccctaaattgtgctatctgttggacggaatcctgttcatttacggagtgatcctgaccgcattgttcctgaagagaggccggaagaagctgctgtacatcttcaagcagcctttcatgcggcccgtgcagaccacccaggaagaggacggctgctcctgccggttccccgaggaagaagaaggcggctgcgagctgcgggttaagttttccagatccgcagacgcacccgcttaccaacaagggcagaaccaactctacaatgaacttaatttggggcggagggaagagtacgacgttctggacaaaaggaggggacgagatcccgagatgggcggaaagcctcagcgaaggaagaatccgcaagaggggctttataacgaactccagaaagataaaatggcagaagcctatagtgagattgggatgaagggagaaaggaggaggggtaaaggtcacgatgggttgtaccaaggattgagcacagccactaaagatacctatgatgcgctccacatgcaggccctgccgccaaga

SEQ ID NO: 7367 - DNA, 2472 bp, Artificial Sequence
  Synthetic Polynucloetide
atggccttaccagtgaccgccttgctcctgccgctggccttgctgctccacgccgccaggccggacatccagatgacacagagccctagcagcctgtctgccagcgtgggagacagagtgaccatcacatgcaaggccagcgaccacatcaacaactggctggcctggtatcagcagaagcctggacaggcccctaagctgctgatctacggcgctaccacactggaaacaggcgtgcccagcagattttctggcagcggctctggcaccgactacaccctgacaatatccagcctccagcctgaggacttcgccacctactactgtcagcagagctggaacaccccttggacattcggccagggcaccaagctggaaatcaagagactcgagcagagcttcggcctgctggaccccaagctgtgctacctgctggatggcatcctgttcatctacggcgtgatcctgaccgccctgttcctgagagtgaagttcagcagaagcgccgacgcccctgcctaccagcagggacagaaccaactgtacaacgagctgaacctgggcagacgggaagagtacgacgtgctggacaagcggagaggcagggaccctgagatgggcggaaagccccagcggagaaagaacccccaggaaggactgtataacgaactccagaaagacaagatggccgaagcctacagcgagatcggcatgaagggcgagcggagaagaggcaagggccacgatggcctgtaccagggcctgagcaccgccaccaaggacacctatgacgccctgcacatgcaggccctgcctccaagaagggccaagcgatctggatctggagcaacaaacttctcactactcaaacaagcaggtgacgtggaggagaatcccgggcctactagtatggactggatttggcgcatccttttccttgtcggcgctgctaccggcgcgcattccttcgaacaagttcagcttcaacagcctggcgctgagctggtcaaacctggcgcttctgtgaagatgagctgcaaagccagcggctacgccttcagcagctactggatcaactggatgaagcagaaacccggccagggactcgaatggatcggccaaatctatcccggcgacggcgacaccaactacaacggcaagttcaagggcagagccacactgaccgccgatacctctagcagcacagcctacatgcagctgagcagcctgaccagcgaagatagcgccgtgtacttctgtgcccggtccatcacaacagtcgtgggctgcgctatggactattggggccagggaacaagcgtgaccgtgtctagtacgcgtcagagttttgggttgttggaccctaaattgtgctatctgttggacggaatcctgttcatttacggagtgatcctgaccgcattgttcctgcgggttaagttttccagatccgcagacgcacccgcttaccaacaagggcagaaccaactctacaatgaacttaatttggggcggagggaagagtacgacgttctggacaaaaggaggggacgagatcccgagatgggcggaaagcctcagcgaaggaagaatccgcaagaggggctttataacgaactccagaaagataaaatggcagaagcctatagtgagattgggatgaagggagaaaggaggaggggtaaaggtcacgatgggttgtaccaaggattgagcacagccactaaagatacctatgatgcgctccacatgcaggccctgccgccaagacgcgccaagagaagcggatctggcgtgaagcagaccctgaatttcgacctgctgaagctggctggcgacgtggaatccaacccaggcccttctagaggccatatgaccgagtacaagcccacggtgcgcctcgccacccgcgacgacgtccccagggccgtacgcaccctcgccgccgcgttcgccgactaccccgccacgcgccacaccgtcgatccggaccgccacatcgagcgggtcaccgagctgcaagaactcttcctcacgcgcgtcgggctcgacatcggcaaggtgtgggtcgcggacgacggcgccgcggtggcggtctggaccacgccggagagcgtcgaagcgggggcggtgttcgccgagatcggcccgcgcatggccgagttgagcggttcccggctggccgcgcagcaacagatggaaggcctcctggcgccgcaccggcccaaggagcccgcgtggttcctggccaccgtcggcgtctcgcccgaccaccagggcaagggtctgggcagcgccgtcgtgctccccggagtggaggcggccgagcgcgccggggtgcccgccttcctggagacctccgcgccccgcaacctccccttctacgagcggctcggcttcaccgtcaccgccgacgtcgaggtgcccgaaggaccgcgcacctggtgcatgacccgcaagcccggtgcctga

SEQ ID NO: 7368 - DNA, 1944 bp, Artificial Sequence
  Synthetic Polynucloetide
atggccttaccagtgaccgccttgctcctgccgctggccttgctgctccacgccgccaggccggacatccagatgacacagagccctagcagcctgtctgccagcgtgggagacagagtgaccatcacatgcaaggccagcgaccacatcaacaactggctggcctggtatcagcagaagcctggacaggcccctaagctgctgatctacggcgctaccacactggaaacaggcgtgcccagcagattttctggcagcggctctggcaccgactacaccctgacaatatccagcctccagcctgaggacttcgccacctactactgtcagcagagctggaacaccccttggacattcggccagggcaccaagctggaaatcaagagactcgagggacagcctaaggccaatcctaccgtgacactgttccctccaagcagcgaagaactccaggccaacaaggccacacttgtgtgcctgatctccgacttctaccctggggctgtgacagtggcttggaaggccgatggatctcctgtgaaagccggcgtggaaaccaccaagccatccaagcagagcaacaacaaatacgccgccagctcctacctgagcctgacacctgagcagtggaagtcccacagatcctacagctgccaagtgacccacgaaggcagcaccgtggaaaagacagtggcccctacagagtgcagccccatcaagaccgatgtgattacaatggaccccaaggacaactgctccaaggacgccaacgataccctgctgctccagctgaccaacaccagcgcctactacatgtacttgttgctgctgctgaagtccgtggtgtacttcgccatcatcacatgctgcctgctgcggagaaccgccttctgctgcaacggcgagaagtctagggccaagcgatctggatctggagcaacaaacttctcactactcaaacaagcaggtgacgtggaggagaatcccgggcctactagtatggactggatttggcgcatccttttccttgtcggcgctgctaccggcgcgcattccttcgaacaagttcagcttcaacagcctggcgctgagctggtcaaacctggcgcttctgtgaagatgagctgcaaagccagcggctacgccttcagcagctactggatcaactggatgaagcagaaacccggccagggactcgaatggatcggccaaatctatcccggcgacggcgacaccaactacaacggcaagttcaagggcagagccacactgaccgccgatacctctagcagcacagcctacatgcagctgagcagcctgaccagcgaagatagcgccgtgtacttctgtgcccggtccatcacaacagtcgtgggctgcgctatggactattggggccagggaacaagcgtgaccgtgtctagtacgcgtgcctctacaaagggaccctccgtgtttcctctggctcccagcagcaagtctacaagcggaggaacagccgctctgggctgcctggtcaaggattactttcccgagcctgtgaccgtgtcctggaatagcggagcactgacaagcggcgtgcacacctttccagccgtgctgcaaagcagcggcctgtactctctgagcagcgtggtcacagtgcctagctctagcctgggcacccagacctacatctgcaatgtgaaccacaagcctagcaacaccaaggtggacaagagagtggaacccaagagctgtgaagtgaaaaccgactccaccgaccacgtgaagcccaaagagacagagaacaccaagcagcccagcaagagctgccacaagcccaaggccatcgtgcacaccgagaaagtgaacatgatgagcctgaccgtgctgggcctgcggatgctgttcgccaaaaccgtggccgtgaacttcctgctgaccgccaagctgttcttcctc

SEQ ID NO: 7369 - DNA, 1878 bp, Artificial Sequence
  Synthetic Polynucloetide
atggccttaccagtgaccgccttgctcctgccgctggccttgctgctccacgccgccaggccggacatccagatgacacagagccctagcagcctgtctgccagcgtgggagacagagtgaccatcacatgcaaggccagcgaccacatcaacaactggctggcctggtatcagcagaagcctggacaggcccctaagctgctgatctacggcgctaccacactggaaacaggcgtgcccagcagattttctggcagcggctctggcaccgactacaccctgacaatatccagcctccagcctgaggacttcgccacctactactgtcagcagagctggaacaccccttggacattcggccagggcaccaagctggaaatcaagagactcgagggacagcctaaggccaatcctaccgtgacactgttccctccaagcagcgaagaactccaggccaacaaggccacacttgtgtgcctgatctccgacttctaccctggggctgtgacagtggcttggaaggccgatggatctcctgtgaaagccggcgtggaaaccaccaagccatccaagcagagcaacaacaaatacgccgccagctcctacctgagcctgacacctgagcagtggaagtcccacagatcctacagctgccaagtgacccacgaaggcagcaccgtggaaaagacagtggcccctacagagtgcagcggcagagccgattgcggcatcaccagcgccagctaccaccagggcgtgctgagcgccaccatcctgtacgagatcctgctgggcaaggccaccctgtacgccgtgctggtgtctgccctggtgctgatggctatggtcaagcggaaggacagccggggaagggccaagcgatctggatctggagcaacaaacttctcactactcaaacaagcaggtgacgtggaggagaatcccgggcctactagtatggactggatttggcgcatccttttccttgtcggcgctgctaccggcgcgcattccttcgaacaagttcagcttcaacagcctggcgctgagctggtcaaacctggcgcttctgtgaagatgagctgcaaagccagcggctacgccttcagcagctactggatcaactggatgaagcagaaacccggccagggactcgaatggatcggccaaatctatcccggcgacggcgacaccaactacaacggcaagttcaagggcagagccacactgaccgccgatacctctagcagcacagcctacatgcagctgagcagcctgaccagcgaagatagcgccgtgtacttctgtgcccggtccatcacaacagtcgtgggctgcgctatggactattggggccagggaacaagcgtgaccgtgtctagtacgcgtgcctctacaaagggaccctccgtgtttcctctggctcccagcagcaagtctacaagcggaggaacagccgctctgggctgcctggtcaaggattactttcccgagcctgtgaccgtgtcctggaatagcggagcactgacaagcggcgtgcacacctttccagccgtgctgcaaagcagcggcctgtactctctgagcagcgtggtcacagtgcctagctctagcctgggcacccagacctacatctgcaatgtgaaccacaagcctagcaacaccaaggtggacaagagagtggaacccaagagctgtatccccgaggacacattcttcccaagcagcgacgtgccctgcgacgtgaagctggtggaaaagagcttcgagacagacaccaacctgaacttccagaacctgagcgtgatcggcttcagaatcctgctgctgaaagtggccggctttaacctgctgatgaccctgcggctgtggtccagc

SEQ ID NO: 7370 - DNA, 1878 bp, Artificial Sequence
  Synthetic Polynucloetide
atggccttaccagtgaccgccttgctcctgccgctggccttgctgctccacgccgccaggccggacatccagatgacacagagccctagcagcctgtctgccagcgtgggagacagagtgaccatcacatgcaaggccagcgaccacatcaacaactggctggcctggtatcagcagaagcctggacaggcccctaagctgctgatctacggcgctaccacactggaaacaggcgtgcccagcagattttctggcagcggctctggcaccgactacaccctgacaatatccagcctccagcctgaggacttcgccacctactactgtcagcagagctggaacaccccttggacattcggccagggcaccaagctggaaatcaagagactcgagggacagcctaaggccaatcctaccgtgacactgttccctccaagcagcgaagaactccaggccaacaaggccacacttgtgtgcctgatctccgacttctaccctggggctgtgacagtggcttggaaggccgatggatctcctgtgaaagccggcgtggaaaccaccaagccatccaagcagagcaacaacaaatacgccgccagctcctacctgagcctgacacctgagcagtggaagtcccacagatcctacagctgccaagtgacccacgaaggcagcaccgtggaaaagacagtggcccctacagagtgcagcggcagagccgattgcggctttaccagcgagagctaccagcagggcgtgctgagcgccaccatcctgtacgagatcctgctgggcaaggccaccctgtacgccgtgctggtgtctgccctggtgctgatggctatggtcaagcggaaggacagccggggaagggccaagcgatctggatctggagcaacaaacttctcactactcaaacaagcaggtgacgtggaggagaatcccgggcctactagtatggactggatttggcgcatccttttccttgtcggcgctgctaccggcgcgcattccttcgaacaagttcagcttcaacagcctggcgctgagctggtcaaacctggcgcttctgtgaagatgagctgcaaagccagcggctacgccttcagcagctactggatcaactggatgaagcagaaacccggccagggactcgaatggatcggccaaatctatcccggcgacggcgacaccaactacaacggcaagttcaagggcagagccacactgaccgccgatacctctagcagcacagcctacatgcagctgagcagcctgaccagcgaagatagcgccgtgtacttctgtgcccggtccatcacaacagtcgtgggctgcgctatggactattggggccagggaacaagcgtgaccgtgtctagtacgcgtgcctctacaaagggaccctccgtgtttcctctggctcccagcagcaagtctacaagcggaggaacagccgctctgggctgcctggtcaaggattactttcccgagcctgtgaccgtgtcctggaatagcggagcactgacaagcggcgtgcacacctttccagccgtgctgcaaagcagcggcctgtactctctgagcagcgtggtcacagtgcctagctctagcctgggcacccagacctacatctgcaatgtgaaccacaagcctagcaacaccaaggtggacaagagagtggaacccaagagctgtatccccgaggacacattcttcccaagccccgagagcagctgcgacgtgaagctggtggaaaagagcttcgagacagacaccaacctgaacttccagaacctgagcgtgatcggcttcagaatcctgctgctgaaagtggccggctttaacctgctgatgaccctgcggctgtggtccagc

SEQ ID NO: 7371 - DNA, 1356 bp, Artificial Sequence
  Synthetic Polynucloetide
atggccttaccagtgaccgccttgctcctgccgctggccttgctgctccacgccgccaggccggacatccagatgacacagagccctagcagcctgtctgccagcgtgggagacagagtgaccatcacatgcaaggccagcgaccacatcaacaactggctggcctggtatcagcagaagcctggacaggcccctaagctgctgatctacggcgctaccacactggaaacaggcgtgcccagcagattttctggcagcggctctggcaccgactacaccctgacaatatccagcctccagcctgaggacttcgccacctactactgtcagcagagctggaacaccccttggacattcggccagggcaccaagctggaaatcaagagaggcggaggcggaagtggaggcggaggatctggcggcggaggctctcaagttcagcttcaacagcctggcgctgagctggtcaaacctggcgcttctgtgaagatgagctgcaaagccagcggctacgccttcagcagctactggatcaactggatgaagcagaaacccggccagggactcgaatggatcggccaaatctatcccggcgacggcgacaccaactacaacggcaagttcaagggcagagccacactgaccgccgatacctctagcagcacagcctacatgcagctgagcagcctgaccagcgaagatagcgccgtgtacttctgtgcccggtccatcacaacagtcgtgggctgcgctatggactattggggccagggaacaagcgtgaccgtgtctagtacgcgtgacggtaacgaggagatgggaggaatcactcaaaccccttacaaagtctcaatttcaggaacaactgttatccttacatgtccccagtatcctggcagcgagatcctttggcagcataacgacaagaatatagggggagatgaagacgataagaatatcggatctgacgaggatcacttgagcctgaaagagttctccgagcttgaacaaagcggatattatgtgtgctatccgcgcgggtcaaagccggaagacgctaacttttacctttatctccgagccagagtgtgcgaaaattgcatggaaatggacgttatgtccgttgctacaatagttatcgtagatatatgcatcacgggtggactgcttctgctggtttattattggtccaagaatagaaaggccaaagctaaacccgtgaccagaggcgctggcgcaggcggaaggcaaaggggacaaaacaaagaacggccaccaccagtgccaaatccagattatgagcctattcggaaaggacagagggacctgtactctggcctgaatcagagaagaatc

SEQ ID NO: 7372 - DNA, 1251 bp, Artificial Sequence
  Synthetic Polynucloetide
atggccttaccagtgaccgccttgctcctgccgctggccttgctgctccacgccgccaggccggacatccagatgacacagagccctagcagcctgtctgccagcgtgggagacagagtgaccatcacatgcaaggccagcgaccacatcaacaactggctggcctggtatcagcagaagcctggacaggcccctaagctgctgatctacggcgctaccacactggaaacaggcgtgcccagcagattttctggcagcggctctggcaccgactacaccctgacaatatccagcctccagcctgaggacttcgccacctactactgtcagcagagctggaacaccccttggacattcggccagggcaccaagctggaaatcaagagaggcggaggcggaagtggaggcggaggatctggcggcggaggctctcaagttcagcttcaacagcctggcgctgagctggtcaaacctggcgcttctgtgaagatgagctgcaaagccagcggctacgccttcagcagctactggatcaactggatgaagcagaaacccggccagggactcgaatggatcggccaaatctatcccggcgacggcgacaccaactacaacggcaagttcaagggcagagccacactgaccgccgatacctctagcagcacagcctacatgcagctgagcagcctgaccagcgaagatagcgccgtgtacttctgtgcccggtccatcacaacagtcgtgggctgcgctatggactattggggccagggaacaagcgtgaccgtgtctagtacgcgtttcaagatccccatcgaggaactggaagatcgggtgttcgtgaactgcaacacctctatcacctgggtggaaggcaccgtgggaacactgctgagcgacatcaccagactggacctcggcaagcggattctggaccctcggggcatctacagatgcaacggcaccgacatctacaaggacaaagaaagcaccgtgcaggtccactacagaatgtgccagtcctgcgtggaactggaccctgctacagtggccggcatcatcgtgaccgatgtgatcgctactctgctgctggctctgggagtgttctgcttcgccggacacgaaacaggcagactgtctggcgctgccgatacacaggccctgctgagaaacgaccaagtgtatcagcccctgcgcgacagagatgatgcccagtattctcacctcggcggcaactgggctagaaacaag

SEQ ID NO: 7373 - DNA, 1281 bp, Artificial Sequence
  Synthetic Polynucloetide
atggccttaccagtgaccgccttgctcctgccgctggccttgctgctccacgccgccaggccggacatccagatgacacagagccctagcagcctgtctgccagcgtgggagacagagtgaccatcacatgcaaggccagcgaccacatcaacaactggctggcctggtatcagcagaagcctggacaggcccctaagctgctgatctacggcgctaccacactggaaacaggcgtgcccagcagattttctggcagcggctctggcaccgactacaccctgacaatatccagcctccagcctgaggacttcgccacctactactgtcagcagagctggaacaccccttggacattcggccagggcaccaagctggaaatcaagagaggcggaggcggaagtggaggcggaggatctggcggcggaggctctcaagttcagcttcaacagcctggcgctgagctggtcaaacctggcgcttctgtgaagatgagctgcaaagccagcggctacgccttcagcagctactggatcaactggatgaagcagaaacccggccagggactcgaatggatcggccaaatctatcccggcgacggcgacaccaactacaacggcaagttcaagggcagagccacactgaccgccgatacctctagcagcacagcctacatgcagctgagcagcctgaccagcgaagatagcgccgtgtacttctgtgcccggtccatcacaacagtcgtgggctgcgctatggactattggggccagggaacaagcgtgaccgtgtctagtacgcgtcagagcatcaagggcaaccacctggtcaaggtgtacgactaccaagaggacggcagcgtgctgctgacatgtgatgccgaggccaagaacatcacctggtttaaggacggcaagatgatcggcttcctgaccgaggacaagaagaagtggaacctgggcagcaacgctaaggaccccagaggcatgtatcagtgcaagggcagccagaacaagagcaagcccctccaggtgtactaccggatgtgccagaactgcatcgagctgaacgccgctaccatcagcggctttctgttcgccgagatcgtgtccatcttcgtgctggccgtgggcgtgtactttatcgctggacaggatggcgtgcggcagagcagagcttccgataagcaaaccctgctgcctaacgaccagctgtaccagcctctgaaggacagagaggacgaccagtacagccacctccagggcaatcagctgagaagaaac

SEQ ID NO: 7374 - DNA, 1230 bp, Artificial Sequence
  Synthetic Polynucloetide
atggccttaccagtgaccgccttgctcctgccgctggccttgctgctccacgccgccaggccggacatccagatgacacagagccctagcagcctgtctgccagcgtgggagacagagtgaccatcacatgcaaggccagcgaccacatcaacaactggctggcctggtatcagcagaagcctggacaggcccctaagctgctgatctacggcgctaccacactggaaacaggcgtgcccagcagattttctggcagcggctctggcaccgactacaccctgacaatatccagcctccagcctgaggacttcgccacctactactgtcagcagagctggaacaccccttggacattcggccagggcaccaagctggaaatcaagagaggcggaggcggaagtggaggcggaggatctggcggcggaggctctcaagttcagcttcaacagcctggcgctgagctggtcaaacctggcgcttctgtgaagatgagctgcaaagccagcggctacgccttcagcagctactggatcaactggatgaagcagaaacccggccagggactcgaatggatcggccaaatctatcccggcgacggcgacaccaactacaacggcaagttcaagggcagagccacactgaccgccgatacctctagcagcacagcctacatgcagctgagcagcctgaccagcgaagatagcgccgtgtacttctgtgcccggtccatcacaacagtcgtgggctgcgctatggactattggggccagggaacaagcgtgaccgtgtctagtacgcgtcagagttttgggttgttggaccctaaattgtgctatctgttggacggaatcctgttcatttacggagtgatcctgaccgcattgttcctgcgggttaagttttccagatccgcagacgcacccgcttaccaacaagggcagaaccaactctacaatgaacttaatttggggcggagggaagagtacgacgttctggacaaaaggaggggacgagatcccgagatgggcggaaagcctcagcgaaggaagaatccgcaagaggggctttataacgaactccagaaagataaaatggcagaagcctatagtgagattgggatgaagggagaaaggaggaggggtaaaggtcacgatgggttgtaccaaggattgagcacagccactaaagatacctatgatgcgctccacatgcaggccctgccgccaaga

SEQ ID NO: 7375 - DNA, 1356 bp, Artificial Sequence
  Synthetic Polynucloetide
atggccttaccagtgaccgccttgctcctgccgctggccttgctgctccacgccgccaggccgcaagttcagcttcaacagcctggcgctgagctggtcaaacctggcgcttctgtgaagatgagctgcaaagccagcggctacgccttcagcagctactggatcaactggatgaagcagaaacccggccagggactcgaatggatcggccaaatctatcccggcgacggcgacaccaactacaacggcaagttcaagggcagagccacactgaccgccgatacctctagcagcacagcctacatgcagctgagcagcctgaccagcgaagatagcgccgtgtacttctgtgcccggtccatcacaacagtcgtgggctgcgctatggactattggggccagggaacaagcgtgaccgtgtctagtggcggaggcggaagtggaggcggaggatctggcggcggaggctctgacatccagatgacacagagccctagcagcctgtctgccagcgtgggagacagagtgaccatcacatgcaaggccagcgaccacatcaacaactggctggcctggtatcagcagaagcctggacaggcccctaagctgctgatctacggcgctaccacactggaaacaggcgtgcccagcagattttctggcagcggctctggcaccgactacaccctgacaatatccagcctccagcctgaggacttcgccacctactactgtcagcagagctggaacaccccttggacattcggccagggcaccaagctggaaatcaagagaacgcgtgacggtaacgaggagatgggaggaatcactcaaaccccttacaaagtctcaatttcaggaacaactgttatccttacatgtccccagtatcctggcagcgagatcctttggcagcataacgacaagaatatagggggagatgaagacgataagaatatcggatctgacgaggatcacttgagcctgaaagagttctccgagcttgaacaaagcggatattatgtgtgctatccgcgcgggtcaaagccggaagacgctaacttttacctttatctccgagccagagtgtgcgaaaattgcatggaaatggacgttatgtccgttgctacaatagttatcgtagatatatgcatcacgggtggactgcttctgctggtttattattggtccaagaatagaaaggccaaagctaaacccgtgaccagaggcgctggcgcaggcggaaggcaaaggggacaaaacaaagaacggccaccaccagtgccaaatccagattatgagcctattcggaaaggacagagggacctgtactctggcctgaatcagagaagaatc

SEQ ID NO: 7376 - DNA, 1251 bp, Artificial Sequence
  Synthetic Polynucloetide
atggccttaccagtgaccgccttgctcctgccgctggccttgctgctccacgccgccaggccgcaagttcagcttcaacagcctggcgctgagctggtcaaacctggcgcttctgtgaagatgagctgcaaagccagcggctacgccttcagcagctactggatcaactggatgaagcagaaacccggccagggactcgaatggatcggccaaatctatcccggcgacggcgacaccaactacaacggcaagttcaagggcagagccacactgaccgccgatacctctagcagcacagcctacatgcagctgagcagcctgaccagcgaagatagcgccgtgtacttctgtgcccggtccatcacaacagtcgtgggctgcgctatggactattggggccagggaacaagcgtgaccgtgtctagtggcggaggcggaagtggaggcggaggatctggcggcggaggctctgacatccagatgacacagagccctagcagcctgtctgccagcgtgggagacagagtgaccatcacatgcaaggccagcgaccacatcaacaactggctggcctggtatcagcagaagcctggacaggcccctaagctgctgatctacggcgctaccacactggaaacaggcgtgcccagcagattttctggcagcggctctggcaccgactacaccctgacaatatccagcctccagcctgaggacttcgccacctactactgtcagcagagctggaacaccccttggacattcggccagggcaccaagctggaaatcaagagaacgcgtttcaagatccccatcgaggaactggaagatcgggtgttcgtgaactgcaacacctctatcacctgggtggaaggcaccgtgggaacactgctgagcgacatcaccagactggacctcggcaagcggattctggaccctcggggcatctacagatgcaacggcaccgacatctacaaggacaaagaaagcaccgtgcaggtccactacagaatgtgccagtcctgcgtggaactggaccctgctacagtggccggcatcatcgtgaccgatgtgatcgctactctgctgctggctctgggagtgttctgcttcgccggacacgaaacaggcagactgtctggcgctgccgatacacaggccctgctgagaaacgaccaagtgtatcagcccctgcgcgacagagatgatgcccagtattctcacctcggcggcaactgggctagaaacaag

SEQ ID NO: 7377 - DNA, 1281 bp, Artificial Sequence
  Synthetic Polynucloetide
atggccttaccagtgaccgccttgctcctgccgctggccttgctgctccacgccgccaggccgcaagttcagcttcaacagcctggcgctgagctggtcaaacctggcgcttctgtgaagatgagctgcaaagccagcggctacgccttcagcagctactggatcaactggatgaagcagaaacccggccagggactcgaatggatcggccaaatctatcccggcgacggcgacaccaactacaacggcaagttcaagggcagagccacactgaccgccgatacctctagcagcacagcctacatgcagctgagcagcctgaccagcgaagatagcgccgtgtacttctgtgcccggtccatcacaacagtcgtgggctgcgctatggactattggggccagggaacaagcgtgaccgtgtctagtggcggaggcggaagtggaggcggaggatctggcggcggaggctctgacatccagatgacacagagccctagcagcctgtctgccagcgtgggagacagagtgaccatcacatgcaaggccagcgaccacatcaacaactggctggcctggtatcagcagaagcctggacaggcccctaagctgctgatctacggcgctaccacactggaaacaggcgtgcccagcagattttctggcagcggctctggcaccgactacaccctgacaatatccagcctccagcctgaggacttcgccacctactactgtcagcagagctggaacaccccttggacattcggccagggcaccaagctggaaatcaagagaacgcgtcagagcatcaagggcaaccacctggtcaaggtgtacgactaccaagaggacggcagcgtgctgctgacatgtgatgccgaggccaagaacatcacctggtttaaggacggcaagatgatcggcttcctgaccgaggacaagaagaagtggaacctgggcagcaacgctaaggaccccagaggcatgtatcagtgcaagggcagccagaacaagagcaagcccctccaggtgtactaccggatgtgccagaactgcatcgagctgaacgccgctaccatcagcggctttctgttcgccgagatcgtgtccatcttcgtgctggccgtgggcgtgtactttatcgctggacaggatggcgtgcggcagagcagagcttccgataagcaaaccctgctgcctaacgaccagctgtaccagcctctgaaggacagagaggacgaccagtacagccacctccagggcaatcagctgagaagaaac

SEQ ID NO: 7378 - DNA, 1230 bp, Artificial Sequence
  Synthetic Polynucloetide
atggccttaccagtgaccgccttgctcctgccgctggccttgctgctccacgccgccaggccgcaagttcagcttcaacagcctggcgctgagctggtcaaacctggcgcttctgtgaagatgagctgcaaagccagcggctacgccttcagcagctactggatcaactggatgaagcagaaacccggccagggactcgaatggatcggccaaatctatcccggcgacggcgacaccaactacaacggcaagttcaagggcagagccacactgaccgccgatacctctagcagcacagcctacatgcagctgagcagcctgaccagcgaagatagcgccgtgtacttctgtgcccggtccatcacaacagtcgtgggctgcgctatggactattggggccagggaacaagcgtgaccgtgtctagtggcggaggcggaagtggaggcggaggatctggcggcggaggctctgacatccagatgacacagagccctagcagcctgtctgccagcgtgggagacagagtgaccatcacatgcaaggccagcgaccacatcaacaactggctggcctggtatcagcagaagcctggacaggcccctaagctgctgatctacggcgctaccacactggaaacaggcgtgcccagcagattttctggcagcggctctggcaccgactacaccctgacaatatccagcctccagcctgaggacttcgccacctactactgtcagcagagctggaacaccccttggacattcggccagggcaccaagctggaaatcaagagaacgcgtcagagttttgggttgttggaccctaaattgtgctatctgttggacggaatcctgttcatttacggagtgatcctgaccgcattgttcctgcgggttaagttttccagatccgcagacgcacccgcttaccaacaagggcagaaccaactctacaatgaacttaatttggggcggagggaagagtacgacgttctggacaaaaggaggggacgagatcccgagatgggcggaaagcctcagcgaaggaagaatccgcaagaggggctttataacgaactccagaaagataaaatggcagaagcctatagtgagattgggatgaagggagaaaggaggaggggtaaaggtcacgatgggttgtaccaaggattgagcacagccactaaagatacctatgatgcgctccacatgcaggccctgccgccaaga

SEQ ID NO: 7379 - DNA, 1932 bp, Artificial Sequence
  Synthetic Polynucloetide
atggccttaccagtgaccgccttgctcctgccgctggccttgctgctccacgccgccaggccggacatccagatgacacagagccctagcagcctgtctgccagcgtgggagacagagtgaccatcacatgcaaggccagcgaccacatcaacaactggctggcctggtatcagcagaagcctggacaggcccctaagctgctgatctacggcgctaccacactggaaacaggcgtgcccagcagattttctggcagcggctctggcaccgactacaccctgacaatatccagcctccagcctgaggacttcgccacctactactgtcagcagagctggaacaccccttggacattcggccagggcaccaagctggaaatcaagagaggcggaggcggaagtggaggcggaggatctggcggcggaggctctcaagttcagcttcaacagcctggcgctgagctggtcaaacctggcgcttctgtgaagatgagctgcaaagccagcggctacgccttcagcagctactggatcaactggatgaagcagaaacccggccagggactcgaatggatcggccaaatctatcccggcgacggcgacaccaactacaacggcaagttcaagggcagagccacactgaccgccgatacctctagcagcacagcctacatgcagctgagcagcctgaccagcgaagatagcgccgtgtacttctgtgcccggtccatcacaacagtcgtgggctgcgctatggactattggggccagggaacaagcgtgaccgtgtctagtacgcgtgggagcggcatccagaaccctgatcctgccgtgtaccagctgcgggatagcaagagcagcgacaagagcgtgtgtctgttcaccgacttcgacagccagaccaacgtgtcccagagcaaggactccgacgtgtacatcaccgataagaccgtgctggacatgcggagcatggacttcaagagcaactccgccgtggcctggtccaacaagtccgatttcgcctgcgccaacgccttcaacaacagcattatccccgaggacacattcttcccaagccccgagagcagctgcgacgtgaagctggtggaaaagagcttcgagacagacaccaacctgaacttccagaacctgagcgtgatcggcttcagaatcctgctgctgaaagtggccggctttaacctgctgatgaccctgcggctgtggtccagccgcgccaagagaagcggatctggcgtgaagcagaccctgaatttcgacctgctgaagctggctggcgacgtggaatccaacccaggcccttctagaggccatatgaccgagtacaagcccacggtgcgcctcgccacccgcgacgacgtccccagggccgtacgcaccctcgccgccgcgttcgccgactaccccgccacgcgccacaccgtcgatccggaccgccacatcgagcgggtcaccgagctgcaagaactcttcctcacgcgcgtcgggctcgacatcggcaaggtgtgggtcgcggacgacggcgccgcggtggcggtctggaccacgccggagagcgtcgaagcgggggcggtgttcgccgagatcggcccgcgcatggccgagttgagcggttcccggctggccgcgcagcaacagatggaaggcctcctggcgccgcaccggcccaaggagcccgcgtggttcctggccaccgtcggcgtctcgcccgaccaccagggcaagggtctgggcagcgccgtcgtgctccccggagtggaggcggccgagcgcgccggggtgcccgccttcctggagacctccgcgccccgcaacctccccttctacgagcggctcggcttcaccgtcaccgccgacgtcgaggtgcccgaaggaccgcgcacctggtgcatgacccgcaagcccggtgcctga

SEQ ID NO: 7380 - DNA, 2028 bp, Artificial Sequence
  Synthetic Polynucloetide
atggccttaccagtgaccgccttgctcctgccgctggccttgctgctccacgccgccaggccggacatccagatgacacagagccctagcagcctgtctgccagcgtgggagacagagtgaccatcacatgcaaggccagcgaccacatcaacaactggctggcctggtatcagcagaagcctggacaggcccctaagctgctgatctacggcgctaccacactggaaacaggcgtgcccagcagattttctggcagcggctctggcaccgactacaccctgacaatatccagcctccagcctgaggacttcgccacctactactgtcagcagagctggaacaccccttggacattcggccagggcaccaagctggaaatcaagagaggcggaggcggaagtggaggcggaggatctggcggcggaggctctcaagttcagcttcaacagcctggcgctgagctggtcaaacctggcgcttctgtgaagatgagctgcaaagccagcggctacgccttcagcagctactggatcaactggatgaagcagaaacccggccagggactcgaatggatcggccaaatctatcccggcgacggcgacaccaactacaacggcaagttcaagggcagagccacactgaccgccgatacctctagcagcacagcctacatgcagctgagcagcctgaccagcgaagatagcgccgtgtacttctgtgcccggtccatcacaacagtcgtgggctgcgctatggactattggggccagggaacaagcgtgaccgtgtctagtctcgaggacctgaagaacgtgttcccacctgaggtggccgtgttcgagcctagcgaggccgagatcagccacacccagaaagccaccctcgtgtgcctggctaccggcttctaccccgaccatgtggaactgtcttggtgggtcaacggcaaagaggtgcacagcggcgtgtctaccgacccccagccactgaaagaacagcccgccctgaacgacagccggtactgcctgagcagcagactgagagtgtccgccaccttctggcagaacccccggaaccacttcagatgccaggtgcagttctacggcctgagcgagaacgacgagtggacccaggacagagccaagcccgtgacccagatcgtgtctgccgaagcctggggcagagccgattgcggctttaccagcgagagctaccagcagggcgtgctgagcgccaccatcctgtacgagatcctgctgggcaaggccaccctgtacgccgtgctggtgtctgccctggtgctgatggctatggtcaagcggaaggacagccggggaagggccaagcgatctggatctggagcaacaaacttctcactactcaaacaagcaggtgacgtggaggagaatcccgggcctactagaggccatatgaccgagtacaagcccacggtgcgcctcgccacccgcgacgacgtccccagggccgtacgcaccctcgccgccgcgttcgccgactaccccgccacgcgccacaccgtcgatccggaccgccacatcgagcgggtcaccgagctgcaagaactcttcctcacgcgcgtcgggctcgacatcggcaaggtgtgggtcgcggacgacggcgccgcggtggcggtctggaccacgccggagagcgtcgaagcgggggcggtgttcgccgagatcggcccgcgcatggccgagttgagcggttcccggctggccgcgcagcaacagatggaaggcctcctggcgccgcaccggcccaaggagcccgcgtggttcctggccaccgtcggcgtctcgcccgaccaccagggcaagggtctgggcagcgccgtcgtgctccccggagtggaggcggccgagcgcgccggggtgcccgccttcctggagacctccgcgccccgcaacctccccttctacgagcggctcggcttcaccgtcaccgccgacgtcgaggtgcccgaaggaccgcgcacctggtgcatgacccgcaagcccggtgcctga

SEQ ID NO: 7381 - DNA, 2178 bp, Artificial Sequence
  Synthetic Polynucloetide
atggccttaccagtgaccgccttgctcctgccgctggccttgctgctccacgccgccaggccggacatccagatgacacagagccctagcagcctgtctgccagcgtgggagacagagtgaccatcacatgcaaggccagcgaccacatcaacaactggctggcctggtatcagcagaagcctggacaggcccctaagctgctgatctacggcgctaccacactggaaacaggcgtgcccagcagattttctggcagcggctctggcaccgactacaccctgacaatatccagcctccagcctgaggacttcgccacctactactgtcagcagagctggaacaccccttggacattcggccagggcaccaagctggaaatcaagagaggcggaggcggaagtggaggcggaggatctggcggcggaggctctcaagttcagcttcaacagcctggcgctgagctggtcaaacctggcgcttctgtgaagatgagctgcaaagccagcggctacgccttcagcagctactggatcaactggatgaagcagaaacccggccagggactcgaatggatcggccaaatctatcccggcgacggcgacaccaactacaacggcaagttcaagggcagagccacactgaccgccgatacctctagcagcacagcctacatgcagctgagcagcctgaccagcgaagatagcgccgtgtacttctgtgcccggtccatcacaacagtcgtgggctgcgctatggactattggggccagggaacaagcgtgaccgtgtctagtacgcgtgagcagaaactgatctcggaagaggatctggggagcggcaccccattcccttctctggcccctcccatcatgctgctggtggacggcaagcagcagatggtggtcgtgtgcctggtgctggatgtggccccacctggactggacagccccatctggtttagcgccggcaatggctctgccctggacgcctttacctacggcccaagccctgccaccgatggcacctggacaaatctggcccacctgagcctgcccagcgaggaactggcttcttgggagcctctcgtgtgccacacaggacctggcgctgagggacacagcagatccacccagcctatgcacctgtctggcgaggccagcaccgccagaacctgtcctcaggaacctctgagaggcacccctggcggagcactgtggctgggagtgctgagactgctgctgttcaagctgctgctgtttgacctgctgctgacctgctcctgtctgtgcgatcctgccggccctctgccttctcctgccaccaccacaagactgagagccctgggcagccacagactgcaccctgccacagagacaggcggcagagaggccacaagcagccctagaccccagcccagagacagaagatggggcgataccccccctggcagaaagcctggatctccagtccgcgccaagagaagcggatctggcgtgaagcagaccctgaatttcgacctgctgaagctggctggcgacgtggaatccaacccaggcccttctagatctagaggccatatgaccgagtacaagcccacggtgcgcctcgccacccgcgacgacgtccccagggccgtacgcaccctcgccgccgcgttcgccgactaccccgccacgcgccacaccgtcgatccggaccgccacatcgagcgggtcaccgagctgcaagaactcttcctcacgcgcgtcgggctcgacatcggcaaggtgtgggtcgcggacgacggcgccgcggtggcggtctggaccacgccggagagcgtcgaagcgggggcggtgttcgccgagatcggcccgcgcatggccgagttgagcggttcccggctggccgcgcagcaacagatggaaggcctcctggcgccgcaccggcccaaggagcccgcgtggttcctggccaccgtcggcgtctcgcccgaccaccagggcaagggtctgggcagcgccgtcgtgctccccggagtggaggcggccgagcgcgccggggtgcccgccttcctggagacctccgcgccccgcaacctccccttctacgagcggctcggcttcaccgtcaccgccgacgtcgaggtgcccgaaggaccgcgcacctggtgcatgacccgcaagcccggtgcctga

SEQ ID NO: 7382 - DNA, 1620 bp, Artificial Sequence
  Synthetic Polynucloetide
atggccttaccagtgaccgccttgctcctgccgctggccttgctgctccacgccgccaggccggacatccagatgacacagagccctagcagcctgtctgccagcgtgggagacagagtgaccatcacatgcaaggccagcgaccacatcaacaactggctggcctggtatcagcagaagcctggacaggcccctaagctgctgatctacggcgctaccacactggaaacaggcgtgcccagcagattttctggcagcggctctggcaccgactacaccctgacaatatccagcctccagcctgaggacttcgccacctactactgtcagcagagctggaacaccccttggacattcggccagggcaccaagctggaaatcaagagactcgaggacctgaagaacgtgttcccacctgaggtggccgtgttcgagcctagcgaggccgagatcagccacacccagaaagccaccctcgtgtgcctggctaccggcttctaccccgaccatgtggaactgtcttggtgggtcaacggcaaagaggtgcacagcggcgtgtctaccgacccccagccactgaaagaacagcccgccctgaacgacagccggtactgcctgagcagcagactgagagtgtccgccaccttctggcagaacccccggaaccacttcagatgccaggtgcagttctacggcctgagcgagaacgacgagtggacccaggacagagccaagcccgtgacccagatcgtgtctgccgaagcctggggcagagccgattgcggctttaccagcgagagctaccagcagggcgtgctgagcgccaccatcctgtacgagatcctgctgggcaaggccaccctgtacgccgtgctggtgtctgccctggtgctgatggctatggtcaagcggaaggacagccggggaagggccaagcgatctggatctggagcaacaaacttctcactactcaaacaagcaggtgacgtggaggagaatcccgggcctactagaggccatatgaccgagtacaagcccacggtgcgcctcgccacccgcgacgacgtccccagggccgtacgcaccctcgccgccgcgttcgccgactaccccgccacgcgccacaccgtcgatccggaccgccacatcgagcgggtcaccgagctgcaagaactcttcctcacgcgcgtcgggctcgacatcggcaaggtgtgggtcgcggacgacggcgccgcggtggcggtctggaccacgccggagagcgtcgaagcgggggcggtgttcgccgagatcggcccgcgcatggccgagttgagcggttcccggctggccgcgcagcaacagatggaaggcctcctggcgccgcaccggcccaaggagcccgcgtggttcctggccaccgtcggcgtctcgcccgaccaccagggcaagggtctgggcagcgccgtcgtgctccccggagtggaggcggccgagcgcgccggggtgcccgccttcctggagacctccgcgccccgcaacctccccttctacgagcggctcggcttcaccgtcaccgccgacgtcgaggtgcccgaaggaccgcgcacctggtgcatgacccgcaagcccggtgcctga

SEQ ID NO: 7383 - DNA, 927 bp, Artificial Sequence
  Synthetic Polynucloetide
atggccttaccagtgaccgccttgctcctgccgctggccttgctgctccacgccgccaggccggacatccagatgacacagagccctagcagcctgtctgccagcgtgggagacagagtgaccatcacatgcaaggccagcgaccacatcaacaactggctggcctggtatcagcagaagcctggacaggcccctaagctgctgatctacggcgctaccacactggaaacaggcgtgcccagcagattttctggcagcggctctggcaccgactacaccctgacaatatccagcctccagcctgaggacttcgccacctactactgtcagcagagctggaacaccccttggacattcggccagggcaccaagctggaaatcaagagactcgaggacctgaagaacgtgttcccacctgaggtggccgtgttcgagcctagcgaggccgagatcagccacacccagaaagccaccctcgtgtgcctggctaccggcttctaccccgaccatgtggaactgtcttggtgggtcaacggcaaagaggtgcacagcggcgtgtctaccgacccccagccactgaaagaacagcccgccctgaacgacagccggtactgcctgagcagcagactgagagtgtccgccaccttctggcagaacccccggaaccacttcagatgccaggtgcagttctacggcctgagcgagaacgacgagtggacccaggacagagccaagcccgtgacccagatcgtgtctgccgaagcctggggcagagccgattgcggctttaccagcgagagctaccagcagggcgtgctgagcgccaccatcctgtacgagatcctgctgggcaaggccaccctgtacgccgtgctggtgtctgccctggtgctgatggctatggtcaagcggaaggacagccgggga

SEQ ID NO: 7384 - DNA, 1353 bp, Artificial Sequence; identical to SEQ ID NO: 4155
  Synthetic Polynucloetide

SEQ ID NO: 7385 - DNA, 852 bp, Artificial Sequence; identical to SEQ ID NO: 4156
  Synthetic Polynucloetide

SEQ ID NO: 7386 - DNA, 1674 bp, Artificial Sequence
  Synthetic Polynucloetide
atggccttaccagtgaccgccttgctcctgccgctggccttgctgctccacgccgccaggccggacatccagatgacacagagccctagcagcctgtctgccagcgtgggagacagagtgaccatcacatgcaaggccagcgaccacatcaacaactggctggcctggtatcagcagaagcctggacaggcccctaagctgctgatctacggcgctaccacactggaaacaggcgtgcccagcagattttctggcagcggctctggcaccgactacaccctgacaatatccagcctccagcctgaggacttcgccacctactactgtcagcagagctggaacaccccttggacattcggccagggcaccaagctggaaatcaagagactcgaggggaaaccaattcccaaccctcttctgggactggattcaaccggcagcggcgaggacctgaagaacgtgttcccacctgaggtggccgtgttcgagcctagcgaggccgagatcagccacacccagaaagccaccctcgtgtgcctggctaccggcttctaccccgaccatgtggaactgtcttggtgggtcaacggcaaagaggtgcacagcggcgtgtgtaccgacccccagccactgaaagaacagcccgccctgaacgacagccggtactgcctgagcagcagactgagagtgtccgccaccttctggcagaacccccggaaccacttcagatgccaggtgcagttctacggcctgagcgagaacgacgagtggacccaggacagagccaagcccgtgacccagatcgtgtctgccgaagcctggggcagagccgattgcggctttaccagcgagagctaccagcagggcgtgctgagcgccaccatcctgtacgagatcctgctgggcaaggccaccctgtacgccgtgctggtgtctgccctggtgctgatggctatggtcaagcggaaggacagccggggaagggccaagcgatctggatctggagcaacaaacttctcactactcaaacaagcaggtgacgtggaggagaatcccgggcctactagaggccatatgaccgagtacaagcccacggtgcgcctcgccacccgcgacgacgtccccagggccgtacgcaccctcgccgccgcgttcgccgactaccccgccacgcgccacaccgtcgatccggaccgccacatcgagcgggtcaccgagctgcaagaactcttcctcacgcgcgtcgggctcgacatcggcaaggtgtgggtcgcggacgacggcgccgcggtggcggtctggaccacgccggagagcgtcgaagcgggggcggtgttcgccgagatcggcccgcgcatggccgagttgagcggttcccggctggccgcgcagcaacagatggaaggcctcctggcgccgcaccggcccaaggagcccgcgtggttcctggccaccgtcggcgtctcgcccgaccaccagggcaagggtctgggcagcgccgtcgtgctccccggagtggaggcggccgagcgcgccggggtgcccgccttcctggagacctccgcgccccgcaacctccccttctacgagcggctcggcttcaccgtcaccgccgacgtcgaggtgcccgaaggaccgcgcacctggtgcatgacccgcaagcccggtgcctga

SEQ ID NO: 7387 - DNA, 984 bp, Artificial Sequence
  Synthetic Polynucloetide
atggccttaccagtgaccgccttgctcctgccgctggccttgctgctccacgccgccaggccggacatccagatgacacagagccctagcagcctgtctgccagcgtgggagacagagtgaccatcacatgcaaggccagcgaccacatcaacaactggctggcctggtatcagcagaagcctggacaggcccctaagctgctgatctacggcgctaccacactggaaacaggcgtgcccagcagattttctggcagcggctctggcaccgactacaccctgacaatatccagcctccagcctgaggacttcgccacctactactgtcagcagagctggaacaccccttggacattcggccagggcaccaagctggaaatcaagagactcgaggggaaaccaattcccaaccctcttctgggactggattcaaccggcagcggcgaggacctgaagaacgtgttcccacctgaggtggccgtgttcgagcctagcgaggccgagatcagccacacccagaaagccaccctcgtgtgcctggctaccggcttctaccccgaccatgtggaactgtcttggtgggtcaacggcaaagaggtgcacagcggcgtgtgtaccgacccccagccactgaaagaacagcccgccctgaacgacagccggtactgcctgagcagcagactgagagtgtccgccaccttctggcagaacccccggaaccacttcagatgccaggtgcagttctacggcctgagcgagaacgacgagtggacccaggacagagccaagcccgtgacccagatcgtgtctgccgaagcctggggcagagccgattgcggctttaccagcgagagctaccagcagggcgtgctgagcgccaccatcctgtacgagatcctgctgggcaaggccaccctgtacgccgtgctggtgtctgccctggtgctgatggctatggtcaagcggaaggacagccggggatga

SEQ ID NO: 7388 - DNA, 1389 bp, Artificial Sequence; identical to SEQ ID NO: 4159
  Synthetic Polynucloetide

SEQ ID NO: 7389 - DNA, 891 bp, Artificial Sequence; identical to SEQ ID NO: 4160
  Synthetic Polynucloetide

SEQ ID NO: 7390 - DNA, 1932 bp, Artificial Sequence
  Synthetic Polynucloetide
atggccttaccagtgaccgccttgctcctgccgctggccttgctgctccacgccgccaggccggacatccagatgacacagagccctagcagcctgtctgccagcgtgggagacagagtgaccatcacatgcaaggccagcgaccacatcaacaactggctggcctggtatcagcagaagcctggacaggcccctaagctgctgatctacggcgctaccacactggaaacaggcgtgcccagcagattttctggcagcggctctggcaccgactacaccctgacaatatccagcctccagcctgaggacttcgccacctactactgtcagcagagctggaacaccccttggacattcggccagggcaccaagctggaaatcaagagaggcggaggcggaagtggaggcggaggatctggcggcggaggctctcaagttcagcttcaacagcctggcgctgagctggtcaaacctggcgcttctgtgaagatgagctgcaaagccagcggctacgccttcagcagctactggatcaactggatgaagcagaaacccggccagggactcgaatggatcggccaaatctatcccggcgacggcgacaccaactacaacggcaagttcaagggcagagccacactgaccgccgatacctctagcagcacagcctacatgcagctgagcagcctgaccagcgaagatagcgccgtgtacttctgtgcccggtccatcacaacagtcgtgggctgcgctatggactattggggccagggaacaagcgtgaccgtgtctagtacgcgtgggagcggcatccagaaccctgatcctgccgtgtaccagctgcgggatagcaagagcagcgacaagagcgtgtgtctgttcaccgacttcgacagccagaccaacgtgtcccagagcaaggactccgacgtgtacatcaccgataagaccgtgctggacatgcggagcatggacttcaagagcaactccgccgtggcctggtccaacaagtccgatttcgcctgcgccaacgccttcaacaacagcattatccccgaggacacattcttcccaagcagcgacgtgccctgcgacgtgaagctggtggaaaagagcttcgagacagacaccaacctgaacttccagaacctgagcgtgatcggcttcagaatcctgctgctgaaagtggccggctttaacctgctgatgaccctgcggctgtggtccagccgcgccaagagaagcggatctggcgtgaagcagaccctgaatttcgacctgctgaagctggctggcgacgtggaatccaacccaggcccttctagaggccatatgaccgagtacaagcccacggtgcgcctcgccacccgcgacgacgtccccagggccgtacgcaccctcgccgccgcgttcgccgactaccccgccacgcgccacaccgtcgatccggaccgccacatcgagcgggtcaccgagctgcaagaactcttcctcacgcgcgtcgggctcgacatcggcaaggtgtgggtcgcggacgacggcgccgcggtggcggtctggaccacgccggagagcgtcgaagcgggggcggtgttcgccgagatcggcccgcgcatggccgagttgagcggttcccggctggccgcgcagcaacagatggaaggcctcctggcgccgcaccggcccaaggagcccgcgtggttcctggccaccgtcggcgtctcgcccgaccaccagggcaagggtctgggcagcgccgtcgtgctccccggagtggaggcggccgagcgcgccggggtgcccgccttcctggagacctccgcgccccgcaacctccccttctacgagcggctcggcttcaccgtcaccgccgacgtcgaggtgcccgaaggaccgcgcacctggtgcatgacccgcaagcccggtgcctga

SEQ ID NO: 7391 - DNA, 2028 bp, Artificial Sequence
  Synthetic Polynucloetide
atggccttaccagtgaccgccttgctcctgccgctggccttgctgctccacgccgccaggccggacatccagatgacacagagccctagcagcctgtctgccagcgtgggagacagagtgaccatcacatgcaaggccagcgaccacatcaacaactggctggcctggtatcagcagaagcctggacaggcccctaagctgctgatctacggcgctaccacactggaaacaggcgtgcccagcagattttctggcagcggctctggcaccgactacaccctgacaatatccagcctccagcctgaggacttcgccacctactactgtcagcagagctggaacaccccttggacattcggccagggcaccaagctggaaatcaagagaggcggaggcggaagtggaggcggaggatctggcggcggaggctctcaagttcagcttcaacagcctggcgctgagctggtcaaacctggcgcttctgtgaagatgagctgcaaagccagcggctacgccttcagcagctactggatcaactggatgaagcagaaacccggccagggactcgaatggatcggccaaatctatcccggcgacggcgacaccaactacaacggcaagttcaagggcagagccacactgaccgccgatacctctagcagcacagcctacatgcagctgagcagcctgaccagcgaagatagcgccgtgtacttctgtgcccggtccatcacaacagtcgtgggctgcgctatggactattggggccagggaacaagcgtgaccgtgtctagtctcgaggacctgaagaacgtgttcccacctgaggtggccgtgttcgagcctagcaaggccgagatcgcccacacccagaaagccaccctcgtgtgcctggctaccggcttctaccccgaccatgtggaactgtcttggtgggtcaacggcaaagaggtgcacagcggcgtgtctaccgacccccagccactgaaagaacagcccgccctgaacgacagccggtactgcctgagcagcagactgagagtgtccgccaccttctggcagaacccccggaaccacttcagatgccaggtgcagttctacggcctgagcgagaacgacgagtggacccaggacagagccaagcccgtgacccagatcgtgtctgccgaagcctggggcagagccgattgcggcatcaccagcgccagctaccaccagggcgtgctgagcgccaccatcctgtacgagatcctgctgggcaaggccaccctgtacgccgtgctggtgtctgccctggtgctgatggctatggtcaagcggaaggacagccggggaagggccaagcgatctggatctggagcaacaaacttctcactactcaaacaagcaggtgacgtggaggagaatcccgggcctactagaggccatatgaccgagtacaagcccacggtgcgcctcgccacccgcgacgacgtccccagggccgtacgcaccctcgccgccgcgttcgccgactaccccgccacgcgccacaccgtcgatccggaccgccacatcgagcgggtcaccgagctgcaagaactcttcctcacgcgcgtcgggctcgacatcggcaaggtgtgggtcgcggacgacggcgccgcggtggcggtctggaccacgccggagagcgtcgaagcgggggcggtgttcgccgagatcggcccgcgcatggccgagttgagcggttcccggctggccgcgcagcaacagatggaaggcctcctggcgccgcaccggcccaaggagcccgcgtggttcctggccaccgtcggcgtctcgcccgaccaccagggcaagggtctgggcagcgccgtcgtgctccccggagtggaggcggccgagcgcgccggggtgcccgccttcctggagacctccgcgccccgcaacctccccttctacgagcggctcggcttcaccgtcaccgccgacgtcgaggtgcccgaaggaccgcgcacctggtgcatgacccgcaagcccggtgcctga

SEQ ID NO: 7392 - DNA, 2097 bp, Artificial Sequence
  Synthetic Polynucloetide
atggccttaccagtgaccgccttgctcctgccgctggccttgctgctccacgccgccaggccggacatccagatgacacagagccctagcagcctgtctgccagcgtgggagacagagtgaccatcacatgcaaggccagcgaccacatcaacaactggctggcctggtatcagcagaagcctggacaggcccctaagctgctgatctacggcgctaccacactggaaacaggcgtgcccagcagattttctggcagcggctctggcaccgactacaccctgacaatatccagcctccagcctgaggacttcgccacctactactgtcagcagagctggaacaccccttggacattcggccagggcaccaagctggaaatcaagagaggcggaggcggaagtggaggcggaggatctggcggcggaggctctcaagttcagcttcaacagcctggcgctgagctggtcaaacctggcgcttctgtgaagatgagctgcaaagccagcggctacgccttcagcagctactggatcaactggatgaagcagaaacccggccagggactcgaatggatcggccaaatctatcccggcgacggcgacaccaactacaacggcaagttcaagggcagagccacactgaccgccgatacctctagcagcacagcctacatgcagctgagcagcctgaccagcgaagatagcgccgtgtacttctgtgcccggtccatcacaacagtcgtgggctgcgctatggactattggggccagggaacaagcgtgaccgtgtctagtacgcgtgggtctggaggcggaggcagcggcggaggcgggagcggcgacggtaacgaggagatgggaggaatcactcaaaccccttacaaagtctcaatttcaggaacaactgttatccttacatgtccccagtatcctggcagcgagatcctttggcagcataacgacaagaatatagggggagatgaagacgataagaatatcggatctgacgaggatcacttgagcctgaaagagttctccgagcttgaacaaagcggatattatgtgtgctatccgcgcgggtcaaagccggaagacgctaacttttacctttatctccgagccagagtgtgcgaaaattgcatggaaatggacgttatgtccgttgctacaatagttatcgtagatatatgcatcacgggtggactgcttctgctggtttattattggtccaagaatagaaaggccaaagctaaacccgtgaccagaggcgctggcgcaggcggaaggcaaaggggacaaaacaaagaacggccaccaccagtgccaaatccagattatgagcctattcggaaaggacagagggacctgtactctggcctgaatcagagaagaatccgcgccaagagaagcggatctggcgtgaagcagaccctgaatttcgacctgctgaagctggctggcgacgtggaatccaacccaggcccttctagaggccatatgaccgagtacaagcccacggtgcgcctcgccacccgcgacgacgtccccagggccgtacgcaccctcgccgccgcgttcgccgactaccccgccacgcgccacaccgtcgatccggaccgccacatcgagcgggtcaccgagctgcaagaactcttcctcacgcgcgtcgggctcgacatcggcaaggtgtgggtcgcggacgacggcgccgcggtggcggtctggaccacgccggagagcgtcgaagcgggggcggtgttcgccgagatcggcccgcgcatggccgagttgagcggttcccggctggccgcgcagcaacagatggaaggcctcctggcgccgcaccggcccaaggagcccgcgtggttcctggccaccgtcggcgtctcgcccgaccaccagggcaagggtctgggcagcgccgtcgtgctccccggagtggaggcggccgagcgcgccggggtgcccgccttcctggagacctccgcgccccgcaacctccccttctacgagcggctcggcttcaccgtcaccgccgacgtcgaggtgcccgaaggaccgcgcacctggtgcatgacccgcaagcccggtgcctga

SEQ ID NO: 7393 - DNA, 1992 bp, Artificial Sequence
  Synthetic Polynucloetide
atggccttaccagtgaccgccttgctcctgccgctggccttgctgctccacgccgccaggccggacatccagatgacacagagccctagcagcctgtctgccagcgtgggagacagagtgaccatcacatgcaaggccagcgaccacatcaacaactggctggcctggtatcagcagaagcctggacaggcccctaagctgctgatctacggcgctaccacactggaaacaggcgtgcccagcagattttctggcagcggctctggcaccgactacaccctgacaatatccagcctccagcctgaggacttcgccacctactactgtcagcagagctggaacaccccttggacattcggccagggcaccaagctggaaatcaagagaggcggaggcggaagtggaggcggaggatctggcggcggaggctctcaagttcagcttcaacagcctggcgctgagctggtcaaacctggcgcttctgtgaagatgagctgcaaagccagcggctacgccttcagcagctactggatcaactggatgaagcagaaacccggccagggactcgaatggatcggccaaatctatcccggcgacggcgacaccaactacaacggcaagttcaagggcagagccacactgaccgccgatacctctagcagcacagcctacatgcagctgagcagcctgaccagcgaagatagcgccgtgtacttctgtgcccggtccatcacaacagtcgtgggctgcgctatggactattggggccagggaacaagcgtgaccgtgtctagtacgcgtgggtctggaggcggaggcagcggcggaggcgggagcggcttcaagatccccatcgaggaactggaagatcgggtgttcgtgaactgcaacacctctatcacctgggtggaaggcaccgtgggaacactgctgagcgacatcaccagactggacctcggcaagcggattctggaccctcggggcatctacagatgcaacggcaccgacatctacaaggacaaagaaagcaccgtgcaggtccactacagaatgtgccagtcctgcgtggaactggaccctgctacagtggccggcatcatcgtgaccgatgtgatcgctactctgctgctggctctgggagtgttctgcttcgccggacacgaaacaggcagactgtctggcgctgccgatacacaggccctgctgagaaacgaccaagtgtatcagcccctgcgcgacagagatgatgcccagtattctcacctcggcggcaactgggctagaaacaagcgcgccaagagaagcggatctggcgtgaagcagaccctgaatttcgacctgctgaagctggctggcgacgtggaatccaacccaggcccttctagaggccatatgaccgagtacaagcccacggtgcgcctcgccacccgcgacgacgtccccagggccgtacgcaccctcgccgccgcgttcgccgactaccccgccacgcgccacaccgtcgatccggaccgccacatcgagcgggtcaccgagctgcaagaactcttcctcacgcgcgtcgggctcgacatcggcaaggtgtgggtcgcggacgacggcgccgcggtggcggtctggaccacgccggagagcgtcgaagcgggggcggtgttcgccgagatcggcccgcgcatggccgagttgagcggttcccggctggccgcgcagcaacagatggaaggcctcctggcgccgcaccggcccaaggagcccgcgtggttcctggccaccgtcggcgtctcgcccgaccaccagggcaagggtctgggcagcgccgtcgtgctccccggagtggaggcggccgagcgcgccggggtgcccgccttcctggagacctccgcgccccgcaacctccccttctacgagcggctcggcttcaccgtcaccgccgacgtcgaggtgcccgaaggaccgcgcacctggtgcatgacccgcaagcccggtgcctga

SEQ ID NO: 7394 - DNA, 2022 bp, Artificial Sequence
  Synthetic Polynucloetide
atggccttaccagtgaccgccttgctcctgccgctggccttgctgctccacgccgccaggccggacatccagatgacacagagccctagcagcctgtctgccagcgtgggagacagagtgaccatcacatgcaaggccagcgaccacatcaacaactggctggcctggtatcagcagaagcctggacaggcccctaagctgctgatctacggcgctaccacactggaaacaggcgtgcccagcagattttctggcagcggctctggcaccgactacaccctgacaatatccagcctccagcctgaggacttcgccacctactactgtcagcagagctggaacaccccttggacattcggccagggcaccaagctggaaatcaagagaggcggaggcggaagtggaggcggaggatctggcggcggaggctctcaagttcagcttcaacagcctggcgctgagctggtcaaacctggcgcttctgtgaagatgagctgcaaagccagcggctacgccttcagcagctactggatcaactggatgaagcagaaacccggccagggactcgaatggatcggccaaatctatcccggcgacggcgacaccaactacaacggcaagttcaagggcagagccacactgaccgccgatacctctagcagcacagcctacatgcagctgagcagcctgaccagcgaagatagcgccgtgtacttctgtgcccggtccatcacaacagtcgtgggctgcgctatggactattggggccagggaacaagcgtgaccgtgtctagtacgcgtgggtctggaggcggaggcagcggcggaggcgggagcggccagagcatcaagggcaaccacctggtcaaggtgtacgactaccaagaggacggcagcgtgctgctgacatgtgatgccgaggccaagaacatcacctggtttaaggacggcaagatgatcggcttcctgaccgaggacaagaagaagtggaacctgggcagcaacgctaaggaccccagaggcatgtatcagtgcaagggcagccagaacaagagcaagcccctccaggtgtactaccggatgtgccagaactgcatcgagctgaacgccgctaccatcagcggctttctgttcgccgagatcgtgtccatcttcgtgctggccgtgggcgtgtactttatcgctggacaggatggcgtgcggcagagcagagcttccgataagcaaaccctgctgcctaacgaccagctgtaccagcctctgaaggacagagaggacgaccagtacagccacctccagggcaatcagctgagaagaaaccgcgccaagagaagcggatctggcgtgaagcagaccctgaatttcgacctgctgaagctggctggcgacgtggaatccaacccaggcccttctagaggccatatgaccgagtacaagcccacggtgcgcctcgccacccgcgacgacgtccccagggccgtacgcaccctcgccgccgcgttcgccgactaccccgccacgcgccacaccgtcgatccggaccgccacatcgagcgggtcaccgagctgcaagaactcttcctcacgcgcgtcgggctcgacatcggcaaggtgtgggtcgcggacgacggcgccgcggtggcggtctggaccacgccggagagcgtcgaagcgggggcggtgttcgccgagatcggcccgcgcatggccgagttgagcggttcccggctggccgcgcagcaacagatggaaggcctcctggcgccgcaccggcccaaggagcccgcgtggttcctggccaccgtcggcgtctcgcccgaccaccagggcaagggtctgggcagcgccgtcgtgctccccggagtggaggcggccgagcgcgccggggtgcccgccttcctggagacctccgcgccccgcaacctccccttctacgagcggctcggcttcaccgtcaccgccgacgtcgaggtgcccgaaggaccgcgcacctggtgcatgacccgcaagcccggtgcctga

SEQ ID NO: 7395 - DNA, 1971 bp, Artificial Sequence
  Synthetic Polynucloetide
atggccttaccagtgaccgccttgctcctgccgctggccttgctgctccacgccgccaggccggacatccagatgacacagagccctagcagcctgtctgccagcgtgggagacagagtgaccatcacatgcaaggccagcgaccacatcaacaactggctggcctggtatcagcagaagcctggacaggcccctaagctgctgatctacggcgctaccacactggaaacaggcgtgcccagcagattttctggcagcggctctggcaccgactacaccctgacaatatccagcctccagcctgaggacttcgccacctactactgtcagcagagctggaacaccccttggacattcggccagggcaccaagctggaaatcaagagaggcggaggcggaagtggaggcggaggatctggcggcggaggctctcaagttcagcttcaacagcctggcgctgagctggtcaaacctggcgcttctgtgaagatgagctgcaaagccagcggctacgccttcagcagctactggatcaactggatgaagcagaaacccggccagggactcgaatggatcggccaaatctatcccggcgacggcgacaccaactacaacggcaagttcaagggcagagccacactgaccgccgatacctctagcagcacagcctacatgcagctgagcagcctgaccagcgaagatagcgccgtgtacttctgtgcccggtccatcacaacagtcgtgggctgcgctatggactattggggccagggaacaagcgtgaccgtgtctagtacgcgtgggtctggaggcggaggcagcggcggaggcgggagcggccagagttttgggttgttggaccctaaattgtgctatctgttggacggaatcctgttcatttacggagtgatcctgaccgcattgttcctgcgggttaagttttccagatccgcagacgcacccgcttaccaacaagggcagaaccaactctacaatgaacttaatttggggcggagggaagagtacgacgttctggacaaaaggaggggacgagatcccgagatgggcggaaagcctcagcgaaggaagaatccgcaagaggggctttataacgaactccagaaagataaaatggcagaagcctatagtgagattgggatgaagggagaaaggaggaggggtaaaggtcacgatgggttgtaccaaggattgagcacagccactaaagatacctatgatgcgctccacatgcaggccctgccgccaagacgcgccaagagaagcggatctggcgtgaagcagaccctgaatttcgacctgctgaagctggctggcgacgtggaatccaacccaggcccttctagaggccatatgaccgagtacaagcccacggtgcgcctcgccacccgcgacgacgtccccagggccgtacgcaccctcgccgccgcgttcgccgactaccccgccacgcgccacaccgtcgatccggaccgccacatcgagcgggtcaccgagctgcaagaactcttcctcacgcgcgtcgggctcgacatcggcaaggtgtgggtcgcggacgacggcgccgcggtggcggtctggaccacgccggagagcgtcgaagcgggggcggtgttcgccgagatcggcccgcgcatggccgagttgagcggttcccggctggccgcgcagcaacagatggaaggcctcctggcgccgcaccggcccaaggagcccgcgtggttcctggccaccgtcggcgtctcgcccgaccaccagggcaagggtctgggcagcgccgtcgtgctccccggagtggaggcggccgagcgcgccggggtgcccgccttcctggagacctccgcgccccgcaacctccccttctacgagcggctcggcttcaccgtcaccgccgacgtcgaggtgcccgaaggaccgcgcacctggtgcatgacccgcaagcccggtgcctga

SEQ ID NO: 7396 - DNA, 2271 bp, Artificial Sequence; identical to SEQ ID NO: 1969
  Synthetic Polynucloetide

SEQ ID NO: 7397 - DNA, 2283 bp, Artificial Sequence; identical to SEQ ID NO: 2134
  Synthetic Polynucloetide

SEQ ID NO: 7398 - DNA, 2859 bp, Artificial Sequence; identical to SEQ ID NO: 2299
  Synthetic Polynucloetide

SEQ ID NO: 7399 - DNA, 2349 bp, Artificial Sequence; identical to SEQ ID NO: 2959
  Synthetic Polynucloetide

SEQ ID NO: 7400 - DNA, 2292 bp, Artificial Sequence; identical to SEQ ID NO: 3289
  Synthetic Polynucloetide

SEQ ID NO: 7401 - DNA, 2694 bp, Artificial Sequence; identical to SEQ ID NO: 2629
  Synthetic Polynucloetide

SEQ ID NO: 7402 - DNA, 3270 bp, Artificial Sequence; identical to SEQ ID NO: 2794
  Synthetic Polynucloetide

SEQ ID NO: 7403 - DNA, 2760 bp, Artificial Sequence; identical to SEQ ID NO: 3124
  Synthetic Polynucloetide

SEQ ID NO: 7404 - DNA, 2703 bp, Artificial Sequence; identical to SEQ ID NO: 3454
  Synthetic Polynucloetide

SEQ ID NO: 7405 - DNA, 2274 bp, Artificial Sequence; identical to SEQ ID NO: 1332
  Synthetic Polynucloetide

SEQ ID NO: 7406 - DNA, 2277 bp, Artificial Sequence; identical to SEQ ID NO: 6261
  Synthetic Polynucloetide

SEQ ID NO: 7407 - DNA, 2658 bp, Artificial Sequence; identical to SEQ ID NO: 6399
  Synthetic Polynucloetide

SEQ ID NO: 7408 - DNA, 2685 bp, Artificial Sequence
  Synthetic Polynucloetide
atggccttaccagtgaccgccttgctcctgccgctggccttgctgctccacgccgccaggccggaagtgcaggttttggagtctggcggaggactggttcagcctggcggatctctgagactgtcttgtgccgccagcggcttcaccttcagcaactttgccatgagctgggtccgacaggcccctggcaaaggacttgaatgggtgtccacaatcagcggcagcgccggcacaacagattacgccgattctgtgaagggcagattcaccatcagccgggacaacagcaagaaaaccctgtacctccagatgaacagcctgcgcgtggaagataccgccgtgtactactgtgccgatggcagaggccccttcttcgattatcgcggccagggcacactggtcaccgtttcttctggtaccggcggaggcggatctggcggcggaggtagcggtggcggaggatctgaattcgacatccagatgacacagagccctagcagcctgtctgccagcgtgggagacagagtgaccatcacatgcaaggccagcgaccacatcaacaactggctggcctggtatcagcagaagcctggacaggcccctaagctgctgatctacggcgctaccacactggaaacaggcgtgcccagcagattttctggcagcggctctggcaccgactacaccctgacaatatccagcctccagcctgaggacttcgccacctactactgtcagcagagctggaacaccccttggacattcggccagggcaccaagctggaaatcaagagactcgaggacctgaagaacgtgttcccacctgaggtggccgtgttcgagcctagcgaggccgagatcagccacacccagaaagccaccctcgtgtgcctggctaccggcttctaccccgaccatgtggaactgtcttggtgggtcaacggcaaagaggtgcacagcggcgtgtgtaccgacccccagccactgaaagaacagcccgccctgaacgacagccggtactgcctgagcagcagactgagagtgtccgccaccttctggcagaacccccggaaccacttcagatgccaggtgcagttctacggcctgagcgagaacgacgagtggacccaggacagagccaagcccgtgacccagatcgtgtctgccgaagcctggggcagagccgattgcggctttaccagcgagagctaccagcagggcgtgctgagcgccaccatcctgtacgagatcctgctgggcaaggccaccctgtacgccgtgctggtgtctgccctggtgctgatggctatggtcaagcggaaggacagccggggaagggccaagcgatctggatctggagcaacaaacttctcactactcaaacaagcaggtgacgtggaggagaatcccgggcctactagtatggactggatttggcgcatccttttccttgtcggcgctgctaccggcgcccattccgggcccgaagtgcagctggttgaatctggcggaggactggttcaggctggcggatctctgagactgtcttgtgccgccagcggcagaacctttagcatgggctggtttagacaggcccctggcaaagagagagagttcgtcgccgccatcacatacagcggcggcagcccttactacgcctcttctgtcagaggccggttcaccatcagccgggacaacgccaagaacaccgtgtacctccagatgaacagcctgaagccagaggacaccgccgtgtactactgtgccgccaatccaacctacggcagcgactggaatgccgagaattggggccagggcacccaagtgacagtgtctagtggatccggcggcggaggatctggcggaggcggatctgggggcggaggctctttcgaacaagttcagcttcaacagcctggcgctgagctggtcaaacctggcgcttctgtgaagatgagctgcaaagccagcggctacgccttcagcagctactggatcaactggatgaagcagaaacccggccagggactcgaatggatcggccaaatctatcccggcgacggcgacaccaactacaacggcaagttcaagggcagagccacactgaccgccgatacctctagcagcacagcctacatgcagctgagcagcctgaccagcgaagatagcgccgtgtacttctgtgcccggtccatcacaacagtcgtgggctgcgctatggactattggggccagggaacaagcgtgaccgtgtctagtacgcgtatccagaaccctgatcctgccgtgtaccagctgcgggatagcaagagcagcgacaagagcgtgtgtctgttcaccgacttcgacagccagaccaacgtgtcccagagcaaggactccgacgtgtacatcaccgataagtgcgtgctggacatgcggagcatggacttcaagagcaactccgccgtggcctggtccaacaagtccgatttcgcctgcgccaacgccttcaacaacagcattatccccgaggacacattcttcccaagccccgagagcagctgcgacgtgaagctggtggaaaagagcttcgagacagacaccaacctgaacttccagaacctgagcgtgatcggcttcagaatcctgctgctgaaagtggccggctttaacctgctgatgaccctgcggctgtggtccagc

SEQ ID NO: 7409 - DNA, 2184 bp, Artificial Sequence
  Synthetic Polynucloetide
atggccttaccagtgaccgccttgctcctgccgctggccttgctgctccacgccgccaggccgagctacgtgctgacacagcctccatccgtgtctgtggctccaggacagaccgccagaatcacatgcggcggcaacaacatcggcagcaagagcgtgcactggtatcagcagccacctggacaggctccagtggtggtggtgtacgacgacagcgatagacctagcggcatccccgagagattcagcggcagcaattccggcaataccgccacactgaccatcagcagagtggaagctggcgacgaggccgtgtactactgccaagtgtgggacagcagcagcgatcacgtggtgtttggcggcggaacaaagctgacagtgcttggcggaggcggaagtggaggcggaggatctggcggcggaggctctcaactccagctgcaagagtctggccctggcctggtcaagcctagcgaaacactgagcctgacctgtaccgtgtctggcggctctatcagctccagcagctatttctggggctggatcagacaacctcctggcaaaggactggaatggatcggctccatctactacagcggcatcacctactacaaccccagcctgaagtccagagtgaccatctccgtggacaccagcaagaaccagttctccctgaagctgagcagcgtgacagccgccgataccgccgtgtattattgtgccagacatgacggcgctgtggccggcctgtttgattattggggacagggcaccctggtcaccgtgtcatctgctacgcgtgagcagaaactgatctcggaagaggatctggcgaagcccaccacgacgccagcgccgcgaccaccaacaccggcgcccaccatcgcgtcgcagcccctgtccctgcgcccagaggcgtgccggccagcggcggggggcgcagtgcacacgagggggctggacttcgcctgtgacatctacatctgggcgcccttggccgggacttgtggggtccttctcctgtcactggttatcaccctttactgcaaacggggcagaaagaaactcctgtatatattcaaacaaccatttatgagaccagtacaaactactcaagaggaagatggctgtagctgccgatttccagaagaagaagaaggaggatgtgaactgagagtgaagttcagcaggagcgcagacgcccccgcgtaccagcagggccagaaccagctctataacgagctgaatctaggacgaagagaggagtacgatgttttggacaagagacgtggccgggaccctgagatggggggaaagccgagaaggaagaaccctcaggaaggcctgtacaatgaactgcagaaagataagatggcggaggcctacagtgagattgggatgaaaggcgagcgccggaggggcaaggggcacgatggcctttaccagggtctcagtacagccaccaaggacacctacgacgcccttcacatgcaggccctgccccctcgctctagtggctccggcgagggcagaggaagtctactaacctgcggagatgtggaagaaaatcctggcccacatatgaccgagtacaagcccacggtgcgcctcgccacccgcgacgacgtccccagggccgtacgcaccctcgccgccgcgttcgccgactaccccgccacgcgccacaccgtcgatccggaccgccacatcgagcgggtcaccgagctgcaagaactcttcctcacgcgcgtcgggctcgacatcggcaaggtgtgggtcgcggacgacggcgccgcggtggcggtctggaccacgccggagagcgtcgaagcgggggcggtgttcgccgagatcggcccgcgcatggccgagttgagcggttcccggctggccgcgcagcaacagatggaaggcctcctggcgccgcaccggcccaaggagcccgcgtggttcctggccaccgtcggcgtctcgcccgaccaccagggcaagggtctgggcagcgccgtcgtgctccccggagtggaggcggccgagcgcgccggggtgcccgccttcctggagacctccgcgccccgcaacctccccttctacgagcggctcggcttcaccgtcaccgccgacgtcgaggtgcccgaaggaccgcgcacctggtgcatgacccgcaagcccggtgcctga

SEQ ID NO: 7410 - DNA, 2166 bp, Artificial Sequence
  Synthetic Polynucloetide
atggccttaccagtgaccgccttgctcctgccgctggccttgctgctccacgccgccaggccgagctacgtgctgacacagcctccatccgtgtctgtggctccaggacagaccgccagaatcacatgcggcggcaacaacatcggcagcaagagcgtgcactggtatcagcagccacctggacaggctccagtggtggtggtgtacgacgacagcgatagacctagcggcatccccgagagattcagcggcagcaattccggcaataccgccacactgaccatcagcagagtggaagctggcgacgaggccgtgtactactgccaagtgtgggacagcagcagcgatcacgtggtgtttggcggcggaacaaagctgacagtgcttggcggaggcggaagtggaggcggaggatctggcggcggaggctctcaactccagctgcaagagtctggccctggcctggtcaagcctagcgaaacactgagcctgacctgtaccgtgtctggcggctctatcagctccagcagctatttctggggctggatcagacaacctcctggcaaaggactggaatggatcggctccatctactacagcggcatcacctactacaaccccagcctgaagtccagagtgaccatctccgtggacaccagcaagaaccagttctccctgaagctgagcagcgtgacagccgccgataccgccgtgtattattgtgccagacatgacggcgctgtggccggcctgtttgattattggggacagggcaccctggtcaccgtgtcatctgctacgcgtgagcagaaactgatctcggaagaggatctgaaaattgaagttatgtatcctcctccttacctagacaatgagaagagcaatggaaccattatccatgtgaaagggaaacacctttgtccaagtcccctatttcccggaccttctaagcccttttgggtgctggtggtggttgggggagtcctggcttgctatagcttgctagtaacagtggcctttattattttctgggtgaggagtaagaggagcaggctcctgcacagtgactacatgaacatgactccacgccgccccggacccacccgcaagcattaccagccctatgccccaccacgcgacttcgcagcctatcgctccagagtgaagttcagcaggagcgcagacgcccccgcgtaccagcagggccagaaccagctctataacgagctcaatctaggacgaagagaggagtacgatgttttggacaagagacgtggccgggaccctgagatggggggaaagccgagaaggaagaaccctcaggaaggcctgtacaatgaactgcagaaagataagatggcggaggcctacagtgagattgggatgaaaggcgagcgccggaggggcaaggggcacgatggcctttaccagggtctcagtacagccaccaaggacacctacgacgcccttcacatgcaggccctgccccctcgctctagtggctccggcgagggcagaggaagtctactaacctgcggagatgtggaagaaaatcctggcccacatatgaccgagtacaagcccacggtgcgcctcgccacccgcgacgacgtccccagggccgtacgcaccctcgccgccgcgttcgccgactaccccgccacgcgccacaccgtcgatccggaccgccacatcgagcgggtcaccgagctgcaagaactcttcctcacgcgcgtcgggctcgacatcggcaaggtgtgggtcgcggacgacggcgccgcggtggcggtctggaccacgccggagagcgtcgaagcgggggcggtgttcgccgagatcggcccgcgcatggccgagttgagcggttcccggctggccgcgcagcaacagatggaaggcctcctggcgccgcaccggcccaaggagcccgcgtggttcctggccaccgtcggcgtctcgcccgaccaccagggcaagggtctgggcagcgccgtcgtgctccccggagtggaggcggccgagcgcgccggggtgcccgccttcctggagacctccgcgccccgcaacctccccttctacgagcggctcggcttcaccgtcaccgccgacgtcgaggtgcccgaaggaccgcgcacctggtgcatgacccgcaagcccggtgcctga

SEQ ID NO: 7411 - DNA, 1494 bp, Artificial Sequence
  Synthetic Polynucloetide
atggccttaccagtgaccgccttgctcctgccgctggccttgctgctccacgccgccaggccgagctacgtgctgacacagcctccatccgtgtctgtggctccaggacagaccgccagaatcacatgcggcggcaacaacatcggcagcaagagcgtgcactggtatcagcagccacctggacaggctccagtggtggtggtgtacgacgacagcgatagacctagcggcatccccgagagattcagcggcagcaattccggcaataccgccacactgaccatcagcagagtggaagctggcgacgaggccgtgtactactgccaagtgtgggacagcagcagcgatcacgtggtgtttggcggcggaacaaagctgacagtgcttggcggaggcggaagtggaggcggaggatctggcggcggaggctctcaactccagctgcaagagtctggccctggcctggtcaagcctagcgaaacactgagcctgacctgtaccgtgtctggcggctctatcagctccagcagctatttctggggctggatcagacaacctcctggcaaaggactggaatggatcggctccatctactacagcggcatcacctactacaaccccagcctgaagtccagagtgaccatctccgtggacaccagcaagaaccagttctccctgaagctgagcagcgtgacagccgccgataccgccgtgtattattgtgccagacatgacggcgctgtggccggcctgtttgattattggggacagggcaccctggtcaccgtgtcatctgctacgcgtgagcagaaactgatctcggaagaggatctgaaaattgaagttatgtatcctcctccttacctagacaatgagaagagcaatggaaccattatccatgtgaaagggaaacacctttgtccaagtcccctatttcccggaccttctaagcccttttgggtgctggtggtggttgggggagtcctggcttgctatagcttgctagtaacagtggcctttattattttctgggtgaggagtaagaggagcaggctcctgcacagtgactacatgaacatgactccacgccgccccggacccacccgcaagcattaccagccctatgccccaccacgcgacttcgcagcctatcgctccagagtgaagttcagcaggagcgcagacgcccccgcgtaccagcagggccagaaccagctctataacgagctcaatctaggacgaagagaggagtacgatgttttggacaagagacgtggccgggaccctgagatggggggaaagccgagaaggaagaaccctcaggaaggcctgtacaatgaactgcagaaagataagatggcggaggcctacagtgagattgggatgaaaggcgagcgccggaggggcaaggggcacgatggcctttaccagggtctcagtacagccaccaaggacacctacgacgcccttcacatgcaggccctgccccctcgc

SEQ ID NO: 7412 - DNA, 1515 bp, Artificial Sequence
  Synthetic Polynucloetide
atggccttaccagtgaccgccttgctcctgccgctggccttgctgctccacgccgccaggccgagctacgtgctgacacagcctccatccgtgtctgtggctccaggacagaccgccagaatcacatgcggcggcaacaacatcggcagcaagagcgtgcactggtatcagcagccacctggacaggctccagtggtggtggtgtacgacgacagcgatagacctagcggcatccccgagagattcagcggcagcaattccggcaataccgccacactgaccatcagcagagtggaagctggcgacgaggccgtgtactactgccaagtgtgggacagcagcagcgatcacgtggtgtttggcggcggaacaaagctgacagtgcttggcggaggcggaagtggaggcggaggatctggcggcggaggctctcaactccagctgcaagagtctggccctggcctggtcaagcctagcgaaacactgagcctgacctgtaccgtgtctggcggctctatcagctccagcagctatttctggggctggatcagacaacctcctggcaaaggactggaatggatcggctccatctactacagcggcatcacctactacaaccccagcctgaagtccagagtgaccatctccgtggacaccagcaagaaccagttctccctgaagctgagcagcgtgacagccgccgataccgccgtgtattattgtgccagacatgacggcgctgtggccggcctgtttgattattggggacagggcaccctggtcaccgtgtcatctgctacgcgtgagcagaaactgatctcggaagaggatctggcgaagcccaccacgacgccagcgccgcgaccaccaacaccggcgcccaccatcgcgtcgcagcccctgtccctgcgcccagaggcgtgccggccagcggcggggggcgcagtgcacacgagggggctggacttcgcctgtgacatctacatctgggcgcccttggccgggacttgtggggtccttctcctgtcactggttatcaccctttactgcaaacggggcagaaagaaactcctgtatatattcaaacaaccatttatgagaccagtacaaactactcaagaggaagatggctgtagctgccgatttccagaagaagaagaaggaggatgtgaactgagagtgaagttcagcaggagcgcagacgcccccgcgtaccagcagggccagaaccagctctataacgagctgaatctaggacgaagagaggagtacgatgttttggacaagagacgtggccgggaccctgagatggggggaaagccgagaaggaagaaccctcaggaaggcctgtacaatgaactgcagaaagataagatggcggaggcctacagtgagattgggatgaaaggcgagcgccggaggggcaaggggcacgatggcctttaccagggtctcagtacagccaccaaggacacctacgacgcccttcacatgcaggccctgccccctcgctga

SEQ ID NO: 7413 - DNA, 1515 bp, Artificial Sequence
  Synthetic Polynucloetide
atggccttaccagtgaccgccttgctcctgccgctggccttgctgctccacgccgccaggccgcaactccagctgcaagagtctggccctggcctggtcaagcctagcgaaacactgagcctgacctgtaccgtgtctggcggctctatcagctccagcagctatttctggggctggatcagacaacctcctggcaaaggactggaatggatcggctccatctactacagcggcatcacctactacaaccccagcctgaagtccagagtgaccatctccgtggacaccagcaagaaccagttctccctgaagctgagcagcgtgacagccgccgataccgccgtgtattattgtgccagacatgacggcgctgtggccggcctgtttgattattggggacagggcaccctggtcaccgtgtcatctgctggcggaggcggaagtggaggcggaggatctggcggcggaggctctagctacgtgctgacacagcctccatccgtgtctgtggctccaggacagaccgccagaatcacatgcggcggcaacaacatcggcagcaagagcgtgcactggtatcagcagccacctggacaggctccagtggtggtggtgtacgacgacagcgatagacctagcggcatccccgagagattcagcggcagcaattccggcaataccgccacactgaccatcagcagagtggaagctggcgacgaggccgtgtactactgccaagtgtgggacagcagcagcgatcacgtggtgtttggcggcggaacaaagctgacagtgcttacgcgtgagcagaaactgatctcggaagaggatctggcgaagcccaccacgacgccagcgccgcgaccaccaacaccggcgcccaccatcgcgtcgcagcccctgtccctgcgcccagaggcgtgccggccagcggcggggggcgcagtgcacacgagggggctggacttcgcctgtgacatctacatctgggcgcccttggccgggacttgtggggtccttctcctgtcactggttatcaccctttactgcaaacggggcagaaagaaactcctgtatatattcaaacaaccatttatgagaccagtacaaactactcaagaggaagatggctgtagctgccgatttccagaagaagaagaaggaggatgtgaactgagagtgaagttcagcaggagcgcagacgcccccgcgtaccagcagggccagaaccagctctataacgagctgaatctaggacgaagagaggagtacgatgttttggacaagagacgtggccgggaccctgagatggggggaaagccgagaaggaagaaccctcaggaaggcctgtacaatgaactgcagaaagataagatggcggaggcctacagtgagattgggatgaaaggcgagcgccggaggggcaaggggcacgatggcctttaccagggtctcagtacagccaccaaggacacctacgacgcccttcacatgcaggccctgccccctcgctga

SEQ ID NO: 7414 - DNA, 2754 bp, Artificial Sequence
  Synthetic Polynucloetide
atggccttaccagtgaccgccttgctcctgccgctggccttgctgctccacgccgccaggccgagctacgtgctgacacagcctccatccgtgtctgtggctccaggacagaccgccagaatcacatgcggcggcaacaacatcggcagcaagagcgtgcactggtatcagcagccacctggacaggctccagtggtggtggtgtacgacgacagcgatagacctagcggcatccccgagagattcagcggcagcaattccggcaataccgccacactgaccatcagcagagtggaagctggcgacgaggccgtgtactactgccaagtgtgggacagcagcagcgatcacgtggtgtttggcggcggaacaaagctgacagtgcttggcggaggcggaagtggaggcggaggatctggcggcggaggctctcaactccagctgcaagagtctggccctggcctggtcaagcctagcgaaacactgagcctgacctgtaccgtgtctggcggctctatcagctccagcagctatttctggggctggatcagacaacctcctggcaaaggactggaatggatcggctccatctactacagcggcatcacctactacaaccccagcctgaagtccagagtgaccatctccgtggacaccagcaagaaccagttctccctgaagctgagcagcgtgacagccgccgataccgccgtgtattattgtgccagacatgacggcgctgtggccggcctgtttgattattggggacagggcaccctggtcaccgtgtcatctgctacgcgtgagcagaaactgatctcggaagaggatctggcgaagcccaccacgacgccagcgccgcgaccaccaacaccggcgcccaccatcgcgtcgcagcccctgtccctgcgcccagaggcgtgccggccagcggcggggggcgcagtgcacacgagggggctggacttcgcctgtgacatctacatctgggcgcccttggccgggacttgtggggtccttctcctgtcactggttatcaccctttactgcgggcgcgccagagtgaagttcagcaggagcgcagacgcccccgcgtaccagcagggccagaaccagctctataacgagctgaatctaggacgaagagaggagtacgatgttttggacaagagacgtggccgggaccctgagatggggggaaagccgagaaggaagaaccctcaggaaggcctgtacaatgaactgcagaaagataagatggcggaggcctacagtgagattgggatgaaaggcgagcgccggaggggcaaggggcacgatggcctttaccagggtctcagtacagccaccaaggacacctacgacgcccttcacatgcaggccctgccccctcgctctagaggatctggagcaacaaacttctcactactcaaacaagcaggtgacgtggaggagaatcccgggcctgggatccacatggccacttacgaggttctctgtgaggtggcgcggaaactgggcacggatgacagggaagtggtattgttcctcctaaacgtgttcatacctcaacccacactggcccaattaattggagctcttagagctttaaaggaggagggcaggttaacgtttcccctgttagcggaatgtctgtttcgtgcaggtcgcagagacctcttgcgcgacctgcttcacttagacccgcgttttttagagcgccacctagcgggcacaatgagttatttcagcccttatcagctcactgttctccacgtagacggggagctgtgtgcgagggatattaggtctttgatatttttaagcaaggacactatagggtctcgcagcacaccacagacattcttacactgggtgtactgtatggaaaacttagacctactgggtcccactgacgtggatgccctaatgtcaatgcttagatctttgtcaagagtagacctacagcgccaagtgcaaaccctaatgggccttcacctttccggcccatcacactcccaacactatcgccatacaccactcgagaccgatttctacgactacaaggacgacgatgacaagactagtggctccggcgagggcagaggaagtctactaacctgcggagatgtggaagaaaatcctggcccacatatgaccgagtacaagcccacggtgcgcctcgccacccgcgacgacgtccccagggccgtacgcaccctcgccgccgcgttcgccgactaccccgccacgcgccacaccgtcgatccggaccgccacatcgagcgggtcaccgagctgcaagaactcttcctcacgcgcgtcgggctcgacatcggcaaggtgtgggtcgcggacgacggcgccgcggtggcggtctggaccacgccggagagcgtcgaagcgggggcggtgttcgccgagatcggcccgcgcatggccgagttgagcggttcccggctggccgcgcagcaacagatggaaggcctcctggcgccgcaccggcccaaggagcccgcgtggttcctggccaccgtcggcgtctcgcccgaccaccagggcaagggtctgggcagcgccgtcgtgctccccggagtggaggcggccgagcgcgccggggtgcccgccttcctggagacctccgcgccccgcaacctccccttctacgagcggctcggcttcaccgtcaccgccgacgtcgaggtgcccgaaggaccgcgcacctggtgcatgacccgcaagcccggtgcctga

SEQ ID NO: 7415 - DNA, 2574 bp, Artificial Sequence
  Synthetic Polynucloetide
atggccttaccagtgaccgccttgctcctgccgctggccttgctgctccacgccgccaggccgagctacgtgctgacacagcctccatccgtgtctgtggctccaggacagaccgccagaatcacatgcggcggcaacaacatcggcagcaagagcgtgcactggtatcagcagccacctggacaggctccagtggtggtggtgtacgacgacagcgatagacctagcggcatccccgagagattcagcggcagcaattccggcaataccgccacactgaccatcagcagagtggaagctggcgacgaggccgtgtactactgccaagtgtgggacagcagcagcgatcacgtggtgtttggcggcggaacaaagctgacagtgcttctcgagatccagaaccctgatcctgccgtgtaccagctgcgggatagcaagagcagcgacaagagcgtgtgtctgttcaccgacttcgacagccagaccaacgtgtcccagagcaaggactccgacgtgtacatcaccgataagtgcgtgctggacatgcggagcatggacttcaagagcaactccgccgtggcctggtccaacaagtccgatttcgcctgcgccaacgccttcaacaacagcattatccccgaggacacattcttcccaagcagcgacgtgccctgcgacgtgaagctggtggaaaagagcttcgagacagacaccaacctgaacttccagaacctgagcgtgatcggcttcagaatcctgctgctgaaagtggccggctttaacctgctgatgaccctgcggctgtggtccagccgcgccaagagaagcggatctggcgtgaagcagaccctgaatttcgacctgctgaagctggctggcgacgtggaatccaacccaggccctactagtatggactggatttggcgcatccttttccttgtcggcgctgctaccggcgcgcattccttcgaacaactccagctgcaagagtctggccctggcctggtcaagcctagcgaaacactgagcctgacctgtaccgtgtctggcggctctatcagctccagcagctatttctggggctggatcagacaacctcctggcaaaggactggaatggatcggctccatctactacagcggcatcacctactacaaccccagcctgaagtccagagtgaccatctccgtggacaccagcaagaaccagttctccctgaagctgagcagcgtgacagccgccgataccgccgtgtattattgtgccagacatgacggcgctgtggccggcctgtttgattattggggacagggcaccctggtcaccgtgtcatctgctacgcgtgaggacctgaagaacgtgttcccacctgaggtggccgtgttcgagcctagcaaggccgagatcgcccacacccagaaagccaccctcgtgtgcctggctaccggcttctaccccgaccatgtggaactgtcttggtgggtcaacggcaaagaggtgcacagcggcgtgtgtaccgacccccagccactgaaagaacagcccgccctgaacgacagccggtactgcctgagcagcagactgagagtgtccgccaccttctggcagaacccccggaaccacttcagatgccaggtgcagttctacggcctgagcgagaacgacgagtggacccaggacagagccaagcccgtgacccagatcgtgtctgccgaagcctggggcagagccgattgcggcatcaccagcgccagctaccaccagggcgtgctgagcgccaccatcctgtacgagatcctgctgggcaaggccaccctgtacgccgtgctggtgtctgccctggtgctgatggctatggtcaagcggaaggacagccggggaagggccaagcgatctggatctggagcaacaaacttctcactactcaaacaagcaggtgacgtggaggagaatcccgggccttctagaggccatatgaccgagtacaagcccacggtgcgcctcgccacccgcgacgacgtccccagggccgtacgcaccctcgccgccgcgttcgccgactaccccgccacgcgccacaccgtcgatccggaccgccacatcgagcgggtcaccgagctgcaagaactcttcctcacgcgcgtcgggctcgacatcggcaaggtgtgggtcgcggacgacggcgccgcggtggcggtctggaccacgccggagagcgtcgaagcgggggcggtgttcgccgagatcggcccgcgcatggccgagttgagcggttcccggctggccgcgcagcaacagatggaaggcctcctggcgccgcaccggcccaaggagcccgcgtggttcctggccaccgtcggcgtctcgcccgaccaccagggcaagggtctgggcagcgccgtcgtgctccccggagtggaggcggccgagcgcgccggggtgcccgccttcctggagacctccgcgccccgcaacctccccttctacgagcggctcggcttcaccgtcaccgccgacgtcgaggtgcccgaaggaccgcgcacctggtgcatgacccgcaagcccggtgcctga

SEQ ID NO: 7416 - DNA, 2571 bp, Artificial Sequence
  Synthetic Polynucloetide
atggccttaccagtgaccgccttgctcctgccgctggccttgctgctccacgccgccaggccgagctacgtgctgacacagcctccatccgtgtctgtggctccaggacagaccgccagaatcacatgcggcggcaacaacatcggcagcaagagcgtgcactggtatcagcagccacctggacaggctccagtggtggtggtgtacgacgacagcgatagacctagcggcatccccgagagattcagcggcagcaattccggcaataccgccacactgaccatcagcagagtggaagctggcgacgaggccgtgtactactgccaagtgtgggacagcagcagcgatcacgtggtgtttggcggcggaacaaagctgacagtgcttctcgaggacctgaagaacgtgttcccacctgaggtggccgtgttcgagcctagcaaggccgagatcgcccacacccagaaagccaccctcgtgtgcctggctaccggcttctaccccgaccatgtggaactgtcttggtgggtcaacggcaaagaggtgcacagcggcgtgtgtaccgacccccagccactgaaagaacagcccgccctgaacgacagccggtactgcctgagcagcagactgagagtgtccgccaccttctggcagaacccccggaaccacttcagatgccaggtgcagttctacggcctgagcgagaacgacgagtggacccaggacagagccaagcccgtgacccagatcgtgtctgccgaagcctggggcagagccgattgcggcatcaccagcgccagctaccaccagggcgtgctgagcgccaccatcctgtacgagatcctgctgggcaaggccaccctgtacgccgtgctggtgtctgccctggtgctgatggctatggtcaagcggaaggacagccggggaagggccaagcgatctggatctggagcaacaaacttctcactactcaaacaagcaggtgacgtggaggagaatcccgggcctactagtatggactggatttggcgcatccttttccttgtcggcgctgctaccggcgcgcattccttcgaacaactccagctgcaagagtctggccctggcctggtcaagcctagcgaaacactgagcctgacctgtaccgtgtctggcggctctatcagctccagcagctatttctggggctggatcagacaacctcctggcaaaggactggaatggatcggctccatctactacagcggcatcacctactacaaccccagcctgaagtccagagtgaccatctccgtggacaccagcaagaaccagttctccctgaagctgagcagcgtgacagccgccgataccgccgtgtattattgtgccagacatgacggcgctgtggccggcctgtttgattattggggacagggcaccctggtcaccgtgtcatctgctacgcgtatccagaaccctgatcctgccgtgtaccagctgcgggatagcaagagcagcgacaagagcgtgtgtctgttcaccgacttcgacagccagaccaacgtgtcccagagcaaggactccgacgtgtacatcaccgataagtgcgtgctggacatgcggagcatggacttcaagagcaactccgccgtggcctggtccaacaagtccgatttcgcctgcgccaacgccttcaacaacagcattatccccgaggacacattcttcccaagcagcgacgtgccctgcgacgtgaagctggtggaaaagagcttcgagacagacaccaacctgaacttccagaacctgagcgtgatcggcttcagaatcctgctgctgaaagtggccggctttaacctgctgatgaccctgcggctgtggtccagccgcgccaagagaagcggatctggcgtgaagcagaccctgaatttcgacctgctgaagctggctggcgacgtggaatccaacccaggcccttctagaggccatatgaccgagtacaagcccacggtgcgcctcgccacccgcgacgacgtccccagggccgtacgcaccctcgccgccgcgttcgccgactaccccgccacgcgccacaccgtcgatccggaccgccacatcgagcgggtcaccgagctgcaagaactcttcctcacgcgcgtcgggctcgacatcggcaaggtgtgggtcgcggacgacggcgccgcggtggcggtctggaccacgccggagagcgtcgaagcgggggcggtgttcgccgagatcggcccgcgcatggccgagttgagcggttcccggctggccgcgcagcaacagatggaaggcctcctggcgccgcaccggcccaaggagcccgcgtggttcctggccaccgtcggcgtctcgcccgaccaccagggcaagggtctgggcagcgccgtcgtgctccccggagtggaggcggccgagcgcgccggggtgcccgccttcctggagacctccgcgccccgcaacctccccttctacgagcggctcggcttcaccgtcaccgccgacgtcgaggtgcccgaaggaccgcgcacctggtgcatgacccgcaagcccggtgcctga

SEQ ID NO: 7417 - DNA, 1869 bp, Artificial Sequence
  Synthetic Polynucloetide
atggccttaccagtgaccgccttgctcctgccgctggccttgctgctccacgccgccaggccgagctacgtgctgacacagcctccatccgtgtctgtggctccaggacagaccgccagaatcacatgcggcggcaacaacatcggcagcaagagcgtgcactggtatcagcagccacctggacaggctccagtggtggtggtgtacgacgacagcgatagacctagcggcatccccgagagattcagcggcagcaattccggcaataccgccacactgaccatcagcagagtggaagctggcgacgaggccgtgtactactgccaagtgtgggacagcagcagcgatcacgtggtgtttggcggcggaacaaagctgacagtgcttctcgaggacctgaagaacgtgttcccacctgaggtggccgtgttcgagcctagcgaggccgagatcagccacacccagaaagccaccctcgtgtgcctggctaccggcttctaccccgaccatgtggaactgtcttggtgggtcaacggcaaagaggtgcacagcggcgtgtgtaccgacccccagccactgaaagaacagcccgccctgaacgacagccggtactgcctgagcagcagactgagagtgtccgccaccttctggcagaacccccggaaccacttcagatgccaggtgcagttctacggcctgagcgagaacgacgagtggacccaggacagagccaagcccgtgacccagatcgtgtctgccgaagcctggggcagagccgattgcggctttaccagcgagagctaccagcagggcgtgctgagcgccaccatcctgtacgagatcctgctgggcaaggccaccctgtacgccgtgctggtgtctgccctggtgctgatggctatggtcaagcggaaggacagccggggaagggccaagcgatctggatctggagcaacaaacttctcactactcaaacaagcaggtgacgtggaggagaatcccgggcctactagtatggactggatttggcgcatccttttccttgtcggcgctgctaccggcgcgcattccttcgaacaactccagctgcaagagtctggccctggcctggtcaagcctagcgaaacactgagcctgacctgtaccgtgtctggcggctctatcagctccagcagctatttctggggctggatcagacaacctcctggcaaaggactggaatggatcggctccatctactacagcggcatcacctactacaaccccagcctgaagtccagagtgaccatctccgtggacaccagcaagaaccagttctccctgaagctgagcagcgtgacagccgccgataccgccgtgtattattgtgccagacatgacggcgctgtggccggcctgtttgattattggggacagggcaccctggtcaccgtgtcatctgctacgcgtatccagaaccctgatcctgccgtgtaccagctgcgggatagcaagagcagcgacaagagcgtgtgtctgttcaccgacttcgacagccagaccaacgtgtcccagagcaaggactccgacgtgtacatcaccgataagtgcgtgctggacatgcggagcatggacttcaagagcaactccgccgtggcctggtccaacaagtccgatttcgcctgcgccaacgccttcaacaacagcattatccccgaggacacattcttcccaagccccgagagcagctgcgacgtgaagctggtggaaaagagcttcgagacagacaccaacctgaacttccagaacctgagcgtgatcggcttcagaatcctgctgctgaaagtggccggctttaacctgctgatgaccctgcggctgtggtccagc

SEQ ID NO: 7418 - DNA, 2544 bp, Artificial Sequence
  Synthetic Polynucloetide
atggccttaccagtgaccgccttgctcctgccgctggccttgctgctccacgccgccaggccgagctacgtgctgacacagcctccatccgtgtctgtggctccaggacagaccgccagaatcacatgcggcggcaacaacatcggcagcaagagcgtgcactggtatcagcagccacctggacaggctccagtggtggtggtgtacgacgacagcgatagacctagcggcatccccgagagattcagcggcagcaattccggcaataccgccacactgaccatcagcagagtggaagctggcgacgaggccgtgtactactgccaagtgtgggacagcagcagcgatcacgtggtgtttggcggcggaacaaagctgacagtgcttctcgaggacctgaagaacgtgttcccacctgaggtggccgtgttcgagcctagcgaggccgagatcagccacacccagaaagccaccctcgtgtgcctggctaccggcttctaccccgaccatgtggaactgtcttggtgggtcaacggcaaagaggtgcacagcggcgtgtgtaccgacccccagccactgaaagaacagcccgccctgaacgacagccggtactgcctgagcagcagactgagagtgtccgccaccttctggcagaacccccggaaccacttcagatgccaggtgcagttctacggcctgagcgagaacgacgagtggacccaggacagagccaagcccgtgacccagatcgtgtctgccgaagcctggggcagagccgattgcggctttaccagcgagagctaccagcagggcgtgctgagcgccaccatcctgtacgagatcctgctgggcaaggccaccctgtacgccgtgctggtgtctgccctggtgctgatggctatggtcaagcggaaggacagccggggaagggccaagcgatctggatctggagcaacaaacttctcactactcaaacaagcaggtgacgtggaggagaatcccgggcctactagtatggactggatttggcgcatccttttccttgtcggcgctgctaccggcgcgcattccttcgaacaactccagctgcaagagtctggccctggcctggtcaagcctagcgaaacactgagcctgacctgtaccgtgtctggcggctctatcagctccagcagctatttctggggctggatcagacaacctcctggcaaaggactggaatggatcggctccatctactacagcggcatcacctactacaaccccagcctgaagtccagagtgaccatctccgtggacaccagcaagaaccagttctccctgaagctgagcagcgtgacagccgccgataccgccgtgtattattgtgccagacatgacggcgctgtggccggcctgtttgattattggggacagggcaccctggtcaccgtgtcatctgctacgcgtatccagaaccctgatcctgccgtgtaccagctgcgggatagcaagagcagcgacaagagcgtgtgtctgttcaccgacttcgacagccagaccaacgtgtcccagagcaaggactccgacgtgtacatcaccgataagtgcgtgctggacatgcggagcatggacttcaagagcaactccgccgtggcctggtccaacaagtccgatttcgcctgcgccaacgccttcaacaacagcattatccccgaggacacattcttcccaagccccgagagcagctgcgacgtgaagctggtggaaaagagcttcgagacagacaccaacctgaacttccagaacctgagcgtgatcggcttcagaatcctgctgctgaaagtggccggctttaacctgctgatgaccctgcggctgtggtccagccgcgccaagagaagcggatctggcgtgaagcagaccctgaatttcgacctgctgaagctggctggcgacgtggaatccaacccaggcccttctagaggcgggatccacaccatggctacctacgaggtgctgtgcgaggtggcaagaaagctgggcaccgacgacagagaagtggtgctgttcctgctgaacgtgttcatccctcagcctacactggcccagctgatcggtgcactgagagccctgaaagaggaaggccggctgacctttcctctgctggccgaatgcctgttcagagccggaagaagggatctgctgcgggacctgctgcatctggaccccagatttctggaaagacacctggccggcaccatgagctacttcagcccttaccagctgaccgtgctgcacgttgacggcgaactgtgcgccagagatattcggagcctgatcttcctgagcaaggacaccatcggcagccggtctacccctcagacatttctgcactgggtgtactgcatggaaaacctggacctgctcggccccacagatgtggatgccctgatgtccatgctgagaagcctgagcagagtggacctccagagacaggtgcagacactgatgggactgcacctgagcggacctagccacagccagcactacagacacacccct

SEQ ID NO: 7419 - DNA, 1881 bp, Artificial Sequence
  Synthetic Polynucloetide
atggccttaccagtgaccgccttgctcctgccgctggccttgctgctccacgccgccaggccgagctacgtgctgacacagcctccatccgtgtctgtggctccaggacagaccgccagaatcacatgcggcggcaacaacatcggcagcaagagcgtgcactggtatcagcagccacctggacaggctccagtggtggtggtgtacgacgacagcgatagacctagcggcatccccgagagattcagcggcagcaattccggcaataccgccacactgaccatcagcagagtggaagctggcgacgaggccgtgtactactgccaagtgtgggacagcagcagcgatcacgtggtgtttggcggcggaacaaagctgacagtgcttctcgagatccagaaccctgatcctgccgtgtaccagctgcgggatagcaagagcagcgacaagagcgtgtgtctgttcaccgacttcgacagccagaccaacgtgtcccagagcaaggactccgacgtgtacatcaccgataagtgcgtgctggacatgcggagcatggacttcaagagcaactccgccgtggcctggtccaacaagtccgatttcgcctgcgccaacgccttcaacaacagcattatccccgaggacacattcttcccaagccccgagagcagctgcgacgtgaagctggtggaaaagagcttcgagacagacaccaacctgaacttccagaacctgagcgtgatcggcttcagaatcctgctgctgaaagtggccggctttaacctgctgatgaccctgcggctgtggtccagccgcgccaagagaagcggatctggcgtgaagcagaccctgaatttcgacctgctgaagctggctggcgacgtggaatccaacccaggccctactagtatggactggatttggcgcatccttttccttgtcggcgctgctaccggcgcgcattccttcgaacaactccagctgcaagagtctggccctggcctggtcaagcctagcgaaacactgagcctgacctgtaccgtgtctggcggctctatcagctccagcagctatttctggggctggatcagacaacctcctggcaaaggactggaatggatcggctccatctactacagcggcatcacctactacaaccccagcctgaagtccagagtgaccatctccgtggacaccagcaagaaccagttctccctgaagctgagcagcgtgacagccgccgataccgccgtgtattattgtgccagacatgacggcgctgtggccggcctgtttgattattggggacagggcaccctggtcaccgtgtcatctgctacgcgtgaggacctgaagaacgtgttcccacctgaggtggccgtgttcgagcctagcgaggccgagatcagccacacccagaaagccaccctcgtgtgcctggctaccggcttctaccccgaccatgtggaactgtcttggtgggtcaacggcaaagaggtgcacagcggcgtgtgtaccgacccccagccactgaaagaacagcccgccctgaacgacagccggtactgcctgagcagcagactgagagtgtccgccaccttctggcagaacccccggaaccacttcagatgccaggtgcagttctacggcctgagcgagaacgacgagtggacccaggacagagccaagcccgtgacccagatcgtgtctgccgaagcctggggcagagccgattgcggctttaccagcgagagctaccagcagggcgtgctgagcgccaccatcctgtacgagatcctgctgggcaaggccaccctgtacgccgtgctggtgtctgccctggtgctgatggctatggtcaagcggaaggacagccgggga

SEQ ID NO: 7420 - DNA, 2547 bp, Artificial Sequence
  Synthetic Polynucloetide
atggccttaccagtgaccgccttgctcctgccgctggccttgctgctccacgccgccaggccgagctacgtgctgacacagcctccatccgtgtctgtggctccaggacagaccgccagaatcacatgcggcggcaacaacatcggcagcaagagcgtgcactggtatcagcagccacctggacaggctccagtggtggtggtgtacgacgacagcgatagacctagcggcatccccgagagattcagcggcagcaattccggcaataccgccacactgaccatcagcagagtggaagctggcgacgaggccgtgtactactgccaagtgtgggacagcagcagcgatcacgtggtgtttggcggcggaacaaagctgacagtgcttctcgagatccagaaccctgatcctgccgtgtaccagctgcgggatagcaagagcagcgacaagagcgtgtgtctgttcaccgacttcgacagccagaccaacgtgtcccagagcaaggactccgacgtgtacatcaccgataagtgcgtgctggacatgcggagcatggacttcaagagcaactccgccgtggcctggtccaacaagtccgatttcgcctgcgccaacgccttcaacaacagcattatccccgaggacacattcttcccaagccccgagagcagctgcgacgtgaagctggtggaaaagagcttcgagacagacaccaacctgaacttccagaacctgagcgtgatcggcttcagaatcctgctgctgaaagtggccggctttaacctgctgatgaccctgcggctgtggtccagccgcgccaagagaagcggatctggcgtgaagcagaccctgaatttcgacctgctgaagctggctggcgacgtggaatccaacccaggccctactagtatggactggatttggcgcatccttttccttgtcggcgctgctaccggcgcgcattccttcgaacaactccagctgcaagagtctggccctggcctggtcaagcctagcgaaacactgagcctgacctgtaccgtgtctggcggctctatcagctccagcagctatttctggggctggatcagacaacctcctggcaaaggactggaatggatcggctccatctactacagcggcatcacctactacaaccccagcctgaagtccagagtgaccatctccgtggacaccagcaagaaccagttctccctgaagctgagcagcgtgacagccgccgataccgccgtgtattattgtgccagacatgacggcgctgtggccggcctgtttgattattggggacagggcaccctggtcaccgtgtcatctgctacgcgtgaggacctgaagaacgtgttcccacctgaggtggccgtgttcgagcctagcgaggccgagatcagccacacccagaaagccaccctcgtgtgcctggctaccggcttctaccccgaccatgtggaactgtcttggtgggtcaacggcaaagaggtgcacagcggcgtgtgtaccgacccccagccactgaaagaacagcccgccctgaacgacagccggtactgcctgagcagcagactgagagtgtccgccaccttctggcagaacccccggaaccacttcagatgccaggtgcagttctacggcctgagcgagaacgacgagtggacccaggacagagccaagcccgtgacccagatcgtgtctgccgaagcctggggcagagccgattgcggctttaccagcgagagctaccagcagggcgtgctgagcgccaccatcctgtacgagatcctgctgggcaaggccaccctgtacgccgtgctggtgtctgccctggtgctgatggctatggtcaagcggaaggacagccggggaagggccaagcgatctggatctggagcaacaaacttctcactactcaaacaagcaggtgacgtggaggagaatcccgggccttctagaggcgggatccacaccatggctacctacgaggtgctgtgcgaggtggcaagaaagctgggcaccgacgacagagaagtggtgctgttcctgctgaacgtgttcatccctcagcctacactggcccagctgatcggtgcactgagagccctgaaagaggaaggccggctgacctttcctctgctggccgaatgcctgttcagagccggaagaagggatctgctgcgggacctgctgcatctggaccccagatttctggaaagacacctggccggcaccatgagctacttcagcccttaccagctgaccgtgctgcacgttgacggcgaactgtgcgccagagatattcggagcctgatcttcctgagcaaggacaccatcggcagccggtctacccctcagacatttctgcactgggtgtactgcatggaaaacctggacctgctcggccccacagatgtggatgccctgatgtccatgctgagaagcctgagcagagtggacctccagagacaggtgcagacactgatgggactgcacctgagcggacctagccacagccagcactacagacacacccct

SEQ ID NO: 7421 - DNA, 2706 bp, Artificial Sequence
  Synthetic Polynucloetide
atggccttaccagtgaccgccttgctcctgccgctggccttgctgctccacgccgccaggccgctcgaggggaaaccaattcccaaccctcttctgggactggattcaaccggcagcggcgaggacctgaagaacgtgttcccacctgaggtggccgtgttcgagcctagcaaggccgagatcgcccacacccagaaagccaccctcgtgtgcctggctaccggcttctaccccgaccatgtggaactgtcttggtgggtcaacggcaaagaggtgcacagcggcgtgtgtaccgacccccagccactgaaagaacagcccgccctgaacgacagccggtactgcctgagcagcagactgagagtgtccgccaccttctggcagaacccccggaaccacttcagatgccaggtgcagttctacggcctgagcgagaacgacgagtggacccaggacagagccaagcccgtgacccagatcgtgtctgccgaagcctggggcagagccgattgcggcatcaccagcgccagctaccaccagggcgtgctgagcgccaccatcctgtacgagatcctgctgggcaaggccaccctgtacgccgtgctggtgtctgccctggtgctgatggctatggtcaagcggaaggacagccggggaagggccaagcgatctggatctggagcaacaaacttctcactactcaaacaagcaggtgacgtggaggagaatcccgggcctactagcatggccttaccagtgaccgccttgctcctgccgctggccttgctgctccacgccgccaggccgagctacgtgctgacacagcctccatccgtgtctgtggctccaggacagaccgccagaatcacatgcggcggcaacaacatcggcagcaagagcgtgcactggtatcagcagccacctggacaggctccagtggtggtggtgtacgacgacagcgatagacctagcggcatccccgagagattcagcggcagcaattccggcaataccgccacactgaccatcagcagagtggaagctggcgacgaggccgtgtactactgccaagtgtgggacagcagcagcgatcacgtggtgtttggcggcggaacaaagctgacagtgcttggcggaggcggaagtggaggcggaggatctggcggcggaggctctcaactccagctgcaagagtctggccctggcctggtcaagcctagcgaaacactgagcctgacctgtaccgtgtctggcggctctatcagctccagcagctatttctggggctggatcagacaacctcctggcaaaggactggaatggatcggctccatctactacagcggcatcacctactacaaccccagcctgaagtccagagtgaccatctccgtggacaccagcaagaaccagttctccctgaagctgagcagcgtgacagccgccgataccgccgtgtattattgtgccagacatgacggcgctgtggccggcctgtttgattattggggacagggcaccctggtcaccgtgtcatctgctacgcgtgagcagaaactgatctcggaagaggatgggagcggcatccagaaccctgatcctgccgtgtaccagctgcgggatagcaagagcagcgacaagagcgtgtgtctgttcaccgacttcgacagccagaccaacgtgtcccagagcaaggactccgacgtgtacatcaccgataagtgcgtgctggacatgcggagcatggacttcaagagcaactccgccgtggcctggtccaacaagtccgatttcgcctgcgccaacgccttcaacaacagcattatccccgaggacacattcttcccaagcagcgacgtgccctgcgacgtgaagctggtggaaaagagcttcgagacagacaccaacctgaacttccagaacctgagcgtgatcggcttcagaatcctgctgctgaaagtggccggctttaacctgctgatgaccctgcggctgtggtccagccgcgccaagagaagcggatctggcgtgaagcagaccctgaatttcgacctgctgaagctggctggcgacgtggaatccaacccaggcccttctagaggccatatgaccgagtacaagcccacggtgcgcctcgccacccgcgacgacgtccccagggccgtacgcaccctcgccgccgcgttcgccgactaccccgccacgcgccacaccgtcgatccggaccgccacatcgagcgggtcaccgagctgcaagaactcttcctcacgcgcgtcgggctcgacatcggcaaggtgtgggtcgcggacgacggcgccgcggtggcggtctggaccacgccggagagcgtcgaagcgggggcggtgttcgccgagatcggcccgcgcatggccgagttgagcggttcccggctggccgcgcagcaacagatggaaggcctcctggcgccgcaccggcccaaggagcccgcgtggttcctggccaccgtcggcgtctcgcccgaccaccagggcaagggtctgggcagcgccgtcgtgctccccggagtggaggcggccgagcgcgccggggtgcccgccttcctggagacctccgcgccccgcaacctccccttctacgagcggctcggcttcaccgtcaccgccgacgtcgaggtgcccgaaggaccgcgcacctggtgcatgacccgcaagcccggtgcctga

SEQ ID NO: 7422 - DNA, 2709 bp, Artificial Sequence
  Synthetic Polynucloetide
atggccttaccagtgaccgccttgctcctgccgctggccttgctgctccacgccgccaggccgctcgagcagaaactgatctcggaagaggatctgggctccggcgatcgccctgatcctgccgtgtaccagctgcgggatagcaagagcagcgacaagagcgtgtgtctgttcaccgacttcgacagccagaccaacgtgtcccagagcaaggactccgacgtgtacatcaccgataagtgcgtgctggacatgcggagcatggacttcaagagcaactccgccgtggcctggtccaacaagtccgatttcgcctgcgccaacgccttcaacaacagcattatccccgaggacacattcttcccaagccccgagagcagctgcgacgtgaagctggtggaaaagagcttcgagacagacaccaacctgaacttccagaacctgagcgtgatcggcttcagaatcctgctgctgaaagtggccggctttaacctgctgatgaccctgcggctgtggtccagctctagtcgcgccaagagaagcggatctggcgtgaagcagaccctgaatttcgacctgctgaagctggctggcgacgtggaatccaacccaggccccactagcatggccttaccagtgaccgccttgctcctgccgctggccttgctgctccacgccgccaggccgagctacgtgctgacacagcctccatccgtgtctgtggctccaggacagaccgccagaatcacatgcggcggcaacaacatcggcagcaagagcgtgcactggtatcagcagccacctggacaggctccagtggtggtggtgtacgacgacagcgatagacctagcggcatccccgagagattcagcggcagcaattccggcaataccgccacactgaccatcagcagagtggaagctggcgacgaggccgtgtactactgccaagtgtgggacagcagcagcgatcacgtggtgtttggcggcggaacaaagctgacagtgcttggcggaggcggaagtggaggcggaggatctggcggcggaggctctcaactccagctgcaagagtctggccctggcctggtcaagcctagcgaaacactgagcctgacctgtaccgtgtctggcggctctatcagctccagcagctatttctggggctggatcagacaacctcctggcaaaggactggaatggatcggctccatctactacagcggcatcacctactacaaccccagcctgaagtccagagtgaccatctccgtggacaccagcaagaaccagttctccctgaagctgagcagcgtgacagccgccgataccgccgtgtattattgtgccagacatgacggcgctgtggccggcctgtttgattattggggacagggcaccctggtcaccgtgtcatctgctacgcgtgggaaaccaattcccaaccctcttctgggactggattcaaccggcagcggcgaggacctgaagaacgtgttcccacctgaggtggccgtgttcgagcctagcgaggccgagatcagccacacccagaaagccaccctcgtgtgcctggctaccggcttctaccccgaccatgtggaactgtcttggtgggtcaacggcaaagaggtgcacagcggcgtgtgtaccgacccccagccactgaaagaacagcccgccctgaacgacagccggtactgcctgagcagcagactgagagtgtccgccaccttctggcagaacccccggaaccacttcagatgccaggtgcagttctacggcctgagcgagaacgacgagtggacccaggacagagccaagcccgtgacccagatcgtgtctgccgaagcctggggcagagccgattgcggctttaccagcgagagctaccagcagggcgtgctgagcgccaccatcctgtacgagatcctgctgggcaaggccaccctgtacgccgtgctggtgtctgccctggtgctgatggctatggtcaagcggaaggacagccggggaagggccaagcgatctggatctggagcaacaaacttctcactactcaaacaagcaggtgacgtggaggagaatcccgggccttctagaggccatatgaccgagtacaagcccacggtgcgcctcgccacccgcgacgacgtccccagggccgtacgcaccctcgccgccgcgttcgccgactaccccgccacgcgccacaccgtcgatccggaccgccacatcgagcgggtcaccgagctgcaagaactcttcctcacgcgcgtcgggctcgacatcggcaaggtgtgggtcgcggacgacggcgccgcggtggcggtctggaccacgccggagagcgtcgaagcgggggcggtgttcgccgagatcggcccgcgcatggccgagttgagcggttcccggctggccgcgcagcaacagatggaaggcctcctggcgccgcaccggcccaaggagcccgcgtggttcctggccaccgtcggcgtctcgcccgaccaccagggcaagggtctgggcagcgccgtcgtgctccccggagtggaggcggccgagcgcgccggggtgcccgccttcctggagacctccgcgccccgcaacctccccttctacgagcggctcggcttcaccgtcaccgccgacgtcgaggtgcccgaaggaccgcgcacctggtgcatgacccgcaagcccggtgcctga

SEQ ID NO: 7423 - DNA, 2571 bp, Artificial Sequence
  Synthetic Polynucloetide
atggccttaccagtgaccgccttgctcctgccgctggccttgctgctccacgccgccaggccgagctacgtgctgacacagcctccatccgtgtctgtggctccaggacagaccgccagaatcacatgcggcggcaacaacatcggcagcaagagcgtgcactggtatcagcagccacctggacaggctccagtggtggtggtgtacgacgacagcgatagacctagcggcatccccgagagattcagcggcagcaattccggcaataccgccacactgaccatcagcagagtggaagctggcgacgaggccgtgtactactgccaagtgtgggacagcagcagcgatcacgtggtgtttggcggcggaacaaagctgacagtgcttctcgaggacctgaagaacgtgttcccacctgaggtggccgtgttcgagcctagcgaggccgagatcagccacacccagaaagccaccctcgtgtgcctggctaccggcttctaccccgaccatgtggaactgtcttggtgggtcaacggcaaagaggtgcacagcggcgtgtctaccgacccccagccactgaaagaacagcccgccctgaacgacagccggtactgcctgagcagcagactgagagtgtccgccaccttctggcagaacccccggaaccacttcagatgccaggtgcagttctacggcctgagcgagaacgacgagtggacccaggacagagccaagcccgtgacccagatcgtgtctgccgaagcctggggcagagccgattgcggctttaccagcgagagctaccagcagggcgtgctgagcgccaccatcctgtacgagatcctgctgggcaaggccaccctgtacgccgtgctggtgtctgccctggtgctgatggctatggtcaagcggaaggacagccggggaagggccaagcgatctggatctggagcaacaaacttctcactactcaaacaagcaggtgacgtggaggagaatcccgggcctactagtatggactggatttggcgcatccttttccttgtcggcgctgctaccggcgcgcattccttcgaacaactccagctgcaagagtctggccctggcctggtcaagcctagcgaaacactgagcctgacctgtaccgtgtctggcggctctatcagctccagcagctatttctggggctggatcagacaacctcctggcaaaggactggaatggatcggctccatctactacagcggcatcacctactacaaccccagcctgaagtccagagtgaccatctccgtggacaccagcaagaaccagttctccctgaagctgagcagcgtgacagccgccgataccgccgtgtattattgtgccagacatgacggcgctgtggccggcctgtttgattattggggacagggcaccctggtcaccgtgtcatctgctacgcgtatccagaaccctgatcctgccgtgtaccagctgcgggatagcaagagcagcgacaagagcgtgtgtctgttcaccgacttcgacagccagaccaacgtgtcccagagcaaggactccgacgtgtacatcaccgataagaccgtgctggacatgcggagcatggacttcaagagcaactccgccgtggcctggtccaacaagtccgatttcgcctgcgccaacgccttcaacaacagcattatccccgaggacacattcttcccaagccccgagagcagctgcgacgtgaagctggtggaaaagagcttcgagacagacaccaacctgaacttccagaacctgagcgtgatcggcttcagaatcctgctgctgaaagtggccggctttaacctgctgatgaccctgcggctgtggtccagccgcgccaagagaagcggatctggcgtgaagcagaccctgaatttcgacctgctgaagctggctggcgacgtggaatccaacccaggcccttctagaggccatatgaccgagtacaagcccacggtgcgcctcgccacccgcgacgacgtccccagggccgtacgcaccctcgccgccgcgttcgccgactaccccgccacgcgccacaccgtcgatccggaccgccacatcgagcgggtcaccgagctgcaagaactcttcctcacgcgcgtcgggctcgacatcggcaaggtgtgggtcgcggacgacggcgccgcggtggcggtctggaccacgccggagagcgtcgaagcgggggcggtgttcgccgagatcggcccgcgcatggccgagttgagcggttcccggctggccgcgcagcaacagatggaaggcctcctggcgccgcaccggcccaaggagcccgcgtggttcctggccaccgtcggcgtctcgcccgaccaccagggcaagggtctgggcagcgccgtcgtgctccccggagtggaggcggccgagcgcgccggggtgcccgccttcctggagacctccgcgccccgcaacctccccttctacgagcggctcggcttcaccgtcaccgccgacgtcgaggtgcccgaaggaccgcgcacctggtgcatgacccgcaagcccggtgcctga

SEQ ID NO: 7424 - DNA, 2817 bp, Artificial Sequence
  Synthetic Polynucloetide
atggccttaccagtgaccgccttgctcctgccgctggccttgctgctccacgccgccaggccgagctacgtgctgacacagcctccatccgtgtctgtggctccaggacagaccgccagaatcacatgcggcggcaacaacatcggcagcaagagcgtgcactggtatcagcagccacctggacaggctccagtggtggtggtgtacgacgacagcgatagacctagcggcatccccgagagattcagcggcagcaattccggcaataccgccacactgaccatcagcagagtggaagctggcgacgaggccgtgtactactgccaagtgtgggacagcagcagcgatcacgtggtgtttggcggcggaacaaagctgacagtgcttctcgaggacctgaagaacgtgttcccacctgaggtggccgtgttcgagcctagcgaggccgagatcagccacacccagaaagccaccctcgtgtgcctggctaccggcttctaccccgaccatgtggaactgtcttggtgggtcaacggcaaagaggtgcacagcggcgtgtctaccgacccccagccactgaaagaacagcccgccctgaacgacagccggtactgcctgagcagcagactgagagtgtccgccaccttctggcagaacccccggaaccacttcagatgccaggtgcagttctacggcctgagcgagaacgacgagtggacccaggacagagccaagcccgtgacccagatcgtgtctgccgaagcctggggcagagccgattgcggctttaccagcgagagctaccagcagggcgtgctgagcgccaccatcctgtacgagatcctgctgggcaaggccaccctgtacgccgtgctggtgtctgccctggtgctgatggctatggtcaagcggaaggacagccggggaagggccaagcgatctggatctggagcaacaaacttctcactactcaaacaagcaggtgacgtggaggagaatcccgggcctactagtatggactggatttggcgcatccttttccttgtcggcgctgctaccggcgcgcattccttcgaacaactccagctgcaagagtctggccctggcctggtcaagcctagcgaaacactgagcctgacctgtaccgtgtctggcggctctatcagctccagcagctatttctggggctggatcagacaacctcctggcaaaggactggaatggatcggctccatctactacagcggcatcacctactacaaccccagcctgaagtccagagtgaccatctccgtggacaccagcaagaaccagttctccctgaagctgagcagcgtgacagccgccgataccgccgtgtattattgtgccagacatgacggcgctgtggccggcctgtttgattattggggacagggcaccctggtcaccgtgtcatctgctacgcgtgagcagaaactgatctcggaagaggatgggagcggcaccccattcccttctctggcccctcccatcatgctgctggtggacggcaagcagcagatggtggtcgtgtgcctggtgctggatgtggccccacctggactggacagccccatctggtttagcgccggcaatggctctgccctggacgcctttacctacggcccaagccctgccaccgatggcacctggacaaatctggcccacctgagcctgcccagcgaggaactggcttcttgggagcctctcgtgtgccacacaggacctggcgctgagggacacagcagatccacccagcctatgcacctgtctggcgaggccagcaccgccagaacctgtcctcaggaacctctgagaggcacccctggcggagcactgtggctgggagtgctgagactgctgctgttcaagctgctgctgtttgacctgctgctgacctgctcctgtctgtgcgatcctgccggccctctgccttctcctgccaccaccacaagactgagagccctgggcagccacagactgcaccctgccacagagacaggcggcagagaggccacaagcagccctagaccccagcccagagacagaagatggggcgataccccccctggcagaaagcctggatctccagtccgcgccaagagaagcggatctggcgtgaagcagaccctgaatttcgacctgctgaagctggctggcgacgtggaatccaacccaggcccttctagaggccatatgaccgagtacaagcccacggtgcgcctcgccacccgcgacgacgtccccagggccgtacgcaccctcgccgccgcgttcgccgactaccccgccacgcgccacaccgtcgatccggaccgccacatcgagcgggtcaccgagctgcaagaactcttcctcacgcgcgtcgggctcgacatcggcaaggtgtgggtcgcggacgacggcgccgcggtggcggtctggaccacgccggagagcgtcgaagcgggggcggtgttcgccgagatcggcccgcgcatggccgagttgagcggttcccggctggccgcgcagcaacagatggaaggcctcctggcgccgcaccggcccaaggagcccgcgtggttcctggccaccgtcggcgtctcgcccgaccaccagggcaagggtctgggcagcgccgtcgtgctccccggagtggaggcggccgagcgcgccggggtgcccgccttcctggagacctccgcgccccgcaacctccccttctacgagcggctcggcttcaccgtcaccgccgacgtcgaggtgcccgaaggaccgcgcacctggtgcatgacccgcaagcccggtgcctga

SEQ ID NO: 7425 - DNA, 2871 bp, Artificial Sequence
  Synthetic Polynucloetide
atggccttaccagtgaccgccttgctcctgccgctggccttgctgctccacgccgccaggccgctcgaggacctgaagaacgtgttcccacctgaggtggccgtgttcgagcctagcgaggccgagatcagccacacccagaaagccaccctcgtgtgcctggctaccggcttctaccccgaccatgtggaactgtcttggtgggtcaacggcaaagaggtgcacagcggcgtgtctaccgacccccagccactgaaagaacagcccgccctgaacgacagccggtactgcctgagcagcagactgagagtgtccgccaccttctggcagaacccccggaaccacttcagatgccaggtgcagttctacggcctgagcgagaacgacgagtggacccaggacagagccaagcccgtgacccagatcgtgtctgccgaagcctggggcagagccgattgcggctttaccagcgagagctaccagcagggcgtgctgagcgccaccatcctgtacgagatcctgctgggcaaggccaccctgtacgccgtgctggtgtctgccctggtgctgatggctatggtcaagcggaaggacagccggggaagggccaagcgatctggatctggagcaacaaacttctcactactcaaacaagcaggtgacgtggaggagaatcccgggcctactagcatggccttaccagtgaccgccttgctcctgccgctggccttgctgctccacgccgccaggccgagctacgtgctgacacagcctccatccgtgtctgtggctccaggacagaccgccagaatcacatgcggcggcaacaacatcggcagcaagagcgtgcactggtatcagcagccacctggacaggctccagtggtggtggtgtacgacgacagcgatagacctagcggcatccccgagagattcagcggcagcaattccggcaataccgccacactgaccatcagcagagtggaagctggcgacgaggccgtgtactactgccaagtgtgggacagcagcagcgatcacgtggtgtttggcggcggaacaaagctgacagtgcttggcggaggcggaagtggaggcggaggatctggcggcggaggctctcaactccagctgcaagagtctggccctggcctggtcaagcctagcgaaacactgagcctgacctgtaccgtgtctggcggctctatcagctccagcagctatttctggggctggatcagacaacctcctggcaaaggactggaatggatcggctccatctactacagcggcatcacctactacaaccccagcctgaagtccagagtgaccatctccgtggacaccagcaagaaccagttctccctgaagctgagcagcgtgacagccgccgataccgccgtgtattattgtgccagacatgacggcgctgtggccggcctgtttgattattggggacagggcaccctggtcaccgtgtcatctgctacgcgtgagcagaaactgatctcggaagaggatctggggagcggcaccccattcccttctctggcccctcccatcatgctgctggtggacggcaagcagcagatggtggtcgtgtgcctggtgctggatgtggccccacctggactggacagccccatctggtttagcgccggcaatggctctgccctggacgcctttacctacggcccaagccctgccaccgatggcacctggacaaatctggcccacctgagcctgcccagcgaggaactggcttcttgggagcctctcgtgtgccacacaggacctggcgctgagggacacagcagatccacccagcctatgcacctgtctggcgaggccagcaccgccagaacctgtcctcaggaacctctgagaggcacccctggcggagcactgtggctgggagtgctgagactgctgctgttcaagctgctgctgtttgacctgctgctgacctgctcctgtctgtgcgatcctgccggccctctgccttctcctgccaccaccacaagactgagagccctgggcagccacagactgcaccctgccacagagacaggcggcagagaggccacaagcagccctagaccccagcccagagacagaagatggggcgataccccccctggcagaaagcctggatctccagtccgcgccaagagaagcggatctggcgtgaagcagaccctgaatttcgacctgctgaagctggctggcgacgtggaatccaacccaggcccttctagatctagaggccatatgaccgagtacaagcccacggtgcgcctcgccacccgcgacgacgtccccagggccgtacgcaccctcgccgccgcgttcgccgactaccccgccacgcgccacaccgtcgatccggaccgccacatcgagcgggtcaccgagctgcaagaactcttcctcacgcgcgtcgggctcgacatcggcaaggtgtgggtcgcggacgacggcgccgcggtggcggtctggaccacgccggagagcgtcgaagcgggggcggtgttcgccgagatcggcccgcgcatggccgagttgagcggttcccggctggccgcgcagcaacagatggaaggcctcctggcgccgcaccggcccaaggagcccgcgtggttcctggccaccgtcggcgtctcgcccgaccaccagggcaagggtctgggcagcgccgtcgtgctccccggagtggaggcggccgagcgcgccggggtgcccgccttcctggagacctccgcgccccgcaacctccccttctacgagcggctcggcttcaccgtcaccgccgacgtcgaggtgcccgaaggaccgcgcacctggtgcatgacccgcaagcccggtgcctga

SEQ ID NO: 7426 - DNA, 2682 bp, Artificial Sequence
  Synthetic Polynucloetide
atggccttaccagtgaccgccttgctcctgccgctggccttgctgctccacgccgccaggccgagctacgtgctgacacagcctccatccgtgtctgtggctccaggacagaccgccagaatcacatgcggcggcaacaacatcggcagcaagagcgtgcactggtatcagcagccacctggacaggctccagtggtggtggtgtacgacgacagcgatagacctagcggcatccccgagagattcagcggcagcaattccggcaataccgccacactgaccatcagcagagtggaagctggcgacgaggccgtgtactactgccaagtgtgggacagcagcagcgatcacgtggtgtttggcggcggaacaaagctgacagtgcttctcgaggggaaaccaattcccaaccctcttctgggactggattcaaccggcagcggcgacaagcagctggacgccgacgtgtcccccaagcctaccatcttcctgccctctatcgccgagacaaagctccagaaggccggcacctacctgtgcctgctggaaaagttcttcccagatgtgattaagatccactggcaggaaaagaagtccaacaccatcctgggcagccaggaaggcaacaccatgaagaccaacgacacctacatgaagttcagctggctgaccgtgcccgagaagtccctggacaaagaacacagatgcatcgtgcggcacgaaaacaacaagaacggcgtggaccaggaaatcatcttcccacccatcaagaccgatgtgattacaatggaccccaaggacaactgctccaaggacgccaacgataccctgctgctccagctgaccaacaccagcgcctactacatgtacttgttgctgctgctgaagtccgtggtgtacttcgccatcatcacatgctgcctgctgcggagaaccgccttctgctgcaacggcgagaagtctagggccaagcgatctggatctggagcaacaaacttctcactactcaaacaagcaggtgacgtggaggagaatcccgggcctactagtatggactggatttggcgcatccttttccttgtcggcgctgctaccggcgcgcattccttcgaacaactccagctgcaagagtctggccctggcctggtcaagcctagcgaaacactgagcctgacctgtaccgtgtctggcggctctatcagctccagcagctatttctggggctggatcagacaacctcctggcaaaggactggaatggatcggctccatctactacagcggcatcacctactacaaccccagcctgaagtccagagtgaccatctccgtggacaccagcaagaaccagttctccctgaagctgagcagcgtgacagccgccgataccgccgtgtattattgtgccagacatgacggcgctgtggccggcctgtttgattattggggacagggcaccctggtcaccgtgtcatctgctacgcgtgagcagaaactgatctcggaagaggatgggagcggcagccagcctcacaccaagcccagcgtgttcgtgatgaagaacggcaccaacgtggcctgcctcgtgaaagagttctaccccaaggacatcaggatcaacctggtgtccagcaagaagatcaccgagttcgaccccgccatcgtgatctcccccagcggcaagtacaacgccgtgaagctggggaagtacgaggacagcaacagcgtgacctgctccgtgcagcacgacaacaagaccgtgcacagcaccgactttgaagtgaaaaccgactccaccgaccacgtgaagcccaaagagacagagaacaccaagcagcccagcaagagctgccacaagcccaaggccatcgtgcacaccgagaaagtgaacatgatgagcctgaccgtgctgggcctgcggatgctgttcgccaaaaccgtggccgtgaacttcctgctgaccgccaagctgttcttcctccgcgccaagagaagcggatctggcgtgaagcagaccctgaatttcgacctgctgaagctggctggcgacgtggaatccaacccaggcccttctagaggccatatgaccgagtacaagcccacggtgcgcctcgccacccgcgacgacgtccccagggccgtacgcaccctcgccgccgcgttcgccgactaccccgccacgcgccacaccgtcgatccggaccgccacatcgagcgggtcaccgagctgcaagaactcttcctcacgcgcgtcgggctcgacatcggcaaggtgtgggtcgcggacgacggcgccgcggtggcggtctggaccacgccggagagcgtcgaagcgggggcggtgttcgccgagatcggcccgcgcatggccgagttgagcggttcccggctggccgcgcagcaacagatggaaggcctcctggcgccgcaccggcccaaggagcccgcgtggttcctggccaccgtcggcgtctcgcccgaccaccagggcaagggtctgggcagcgccgtcgtgctccccggagtggaggcggccgagcgcgccggggtgcccgccttcctggagacctccgcgccccgcaacctccccttctacgagcggctcggcttcaccgtcaccgccgacgtcgaggtgcccgaaggaccgcgcacctggtgcatgacccgcaagcccggtgcctga

SEQ ID NO: 7427 - DNA, 1893 bp, Artificial Sequence
  Synthetic Polynucloetide
atggccttaccagtgaccgccttgctcctgccgctggccttgctgctccacgccgccaggccgagctacgtgctgacacagcctccatccgtgtctgtggctccaggacagaccgccagaatcacatgcggcggcaacaacatcggcagcaagagcgtgcactggtatcagcagccacctggacaggctccagtggtggtggtgtacgacgacagcgatagacctagcggcatccccgagagattcagcggcagcaattccggcaataccgccacactgaccatcagcagagtggaagctggcgacgaggccgtgtactactgccaagtgtgggacagcagcagcgatcacgtggtgtttggcggcggaacaaagctgacagtgcttctcgagagccagcctcacaccaagcccagcgtgttcgtgatgaagaacggcaccaacgtggcctgcctcgtgaaagagttctaccccaaggacatcaggatcaacctggtgtccagcaagaagatcaccgagttcgaccccgccatcgtgatctcccccagcggcaagtacaacgccgtgaagctggggaagtacgaggacagcaacagcgtgacctgctccgtgcagcacgacaacaagaccgtgcacagcaccgactttgaagtgaaaaccgactccaccgaccacgtgaagcccaaagagacagagaacaccaagcagcccagcaagagctgccacaagcccaaggccatcgtgcacaccgagaaagtgaacatgatgagcctgaccgtgctgggcctgcggatgctgttcgccaaaaccgtggccgtgaacttcctgctgaccgccaagctgttcttcctcagggccaagcgatctggatctggagcaacaaacttctcactactcaaacaagcaggtgacgtggaggagaatcccgggcctactagtatggactggatttggcgcatccttttccttgtcggcgctgctaccggcgcgcattccttcgaacaactccagctgcaagagtctggccctggcctggtcaagcctagcgaaacactgagcctgacctgtaccgtgtctggcggctctatcagctccagcagctatttctggggctggatcagacaacctcctggcaaaggactggaatggatcggctccatctactacagcggcatcacctactacaaccccagcctgaagtccagagtgaccatctccgtggacaccagcaagaaccagttctccctgaagctgagcagcgtgacagccgccgataccgccgtgtattattgtgccagacatgacggcgctgtggccggcctgtttgattattggggacagggcaccctggtcaccgtgtcatctgctacgcgtgacaagcagctggacgccgacgtgtcccccaagcctaccatcttcctgccctctatcgccgagacaaagctccagaaggccggcacctacctgtgcctgctggaaaagttcttcccagatgtgattaagatccactggcaggaaaagaagtccaacaccatcctgggcagccaggaaggcaacaccatgaagaccaacgacacctacatgaagttcagctggctgaccgtgcccgagaagtccctggacaaagaacacagatgcatcgtgcggcacgaaaacaacaagaacggcgtggaccaggaaatcatcttcccacccatcaagaccgatgtgattacaatggaccccaaggacaactgctccaaggacgccaacgataccctgctgctccagctgaccaacaccagcgcctactacatgtacttgttgctgctgctgaagtccgtggtgtacttcgccatcatcacatgctgcctgctgcggagaaccgccttctgctgcaacggcgagaagtct

SEQ ID NO: 7428 - DNA, 2727 bp, Artificial Sequence
  Synthetic Polynucloetide
atggccttaccagtgaccgccttgctcctgccgctggccttgctgctccacgccgccaggccgctcgaggggaaaccaattcccaaccctcttctgggactggattcaaccggcagcggcgacaagcagctggacgccgacgtgtcccccaagcctaccatcttcctgccctctatcgccgagacaaagctccagaaggccggcacctacctgtgcctgctggaaaagttcttcccagatgtgattaagatccactggcaggaaaagaagtccaacaccatcctgggcagccaggaaggcaacaccatgaagaccaacgacacctacatgaagttcagctggctgaccgtgcccgagaagtccctggacaaagaacacagatgcatcgtgcggcacgaaaacaacaagaacggcgtggaccaggaaatcatcttcccacccatcaagaccgatgtgattacaatggaccccaaggacaactgctccaaggacgccaacgataccctgctgctccagctgaccaacaccagcgcctactacatgtacttgttgctgctgctgaagtccgtggtgtacttcgccatcatcacatgctgcctgctgcggagaaccgccttctgctgcaacggcgagaagtctagggccaagcgatctggatctggagcaacaaacttctcactactcaaacaagcaggtgacgtggaggagaatcccgggcctactagcatggccttaccagtgaccgccttgctcctgccgctggccttgctgctccacgccgccaggccgagctacgtgctgacacagcctccatccgtgtctgtggctccaggacagaccgccagaatcacatgcggcggcaacaacatcggcagcaagagcgtgcactggtatcagcagccacctggacaggctccagtggtggtggtgtacgacgacagcgatagacctagcggcatccccgagagattcagcggcagcaattccggcaataccgccacactgaccatcagcagagtggaagctggcgacgaggccgtgtactactgccaagtgtgggacagcagcagcgatcacgtggtgtttggcggcggaacaaagctgacagtgcttggcggaggcggaagtggaggcggaggatctggcggcggaggctctcaactccagctgcaagagtctggccctggcctggtcaagcctagcgaaacactgagcctgacctgtaccgtgtctggcggctctatcagctccagcagctatttctggggctggatcagacaacctcctggcaaaggactggaatggatcggctccatctactacagcggcatcacctactacaaccccagcctgaagtccagagtgaccatctccgtggacaccagcaagaaccagttctccctgaagctgagcagcgtgacagccgccgataccgccgtgtattattgtgccagacatgacggcgctgtggccggcctgtttgattattggggacagggcaccctggtcaccgtgtcatctgctacgcgtgagcagaaactgatctcggaagaggatgggagcggcagccagcctcacaccaagcccagcgtgttcgtgatgaagaacggcaccaacgtggcctgcctcgtgaaagagttctaccccaaggacatcaggatcaacctggtgtccagcaagaagatcaccgagttcgaccccgccatcgtgatctcccccagcggcaagtacaacgccgtgaagctggggaagtacgaggacagcaacagcgtgacctgctccgtgcagcacgacaacaagaccgtgcacagcaccgactttgaagtgaaaaccgactccaccgaccacgtgaagcccaaagagacagagaacaccaagcagcccagcaagagctgccacaagcccaaggccatcgtgcacaccgagaaagtgaacatgatgagcctgaccgtgctgggcctgcggatgctgttcgccaaaaccgtggccgtgaacttcctgctgaccgccaagctgttcttcctccgcgccaagagaagcggatctggcgtgaagcagaccctgaatttcgacctgctgaagctggctggcgacgtggaatccaacccaggcccttctagaggccatatgaccgagtacaagcccacggtgcgcctcgccacccgcgacgacgtccccagggccgtacgcaccctcgccgccgcgttcgccgactaccccgccacgcgccacaccgtcgatccggaccgccacatcgagcgggtcaccgagctgcaagaactcttcctcacgcgcgtcgggctcgacatcggcaaggtgtgggtcgcggacgacggcgccgcggtggcggtctggaccacgccggagagcgtcgaagcgggggcggtgttcgccgagatcggcccgcgcatggccgagttgagcggttcccggctggccgcgcagcaacagatggaaggcctcctggcgccgcaccggcccaaggagcccgcgtggttcctggccaccgtcggcgtctcgcccgaccaccagggcaagggtctgggcagcgccgtcgtgctccccggagtggaggcggccgagcgcgccggggtgcccgccttcctggagacctccgcgccccgcaacctccccttctacgagcggctcggcttcaccgtcaccgccgacgtcgaggtgcccgaaggaccgcgcacctggtgcatgacccgcaagcccggtgcctga

SEQ ID NO: 7429 - DNA, 3102 bp, Artificial Sequence
  Synthetic Polynucloetide
atggccttaccagtgaccgccttgctcctgccgctggccttgctgctccacgccgccaggccgagctacgtgctgacacagcctccatccgtgtctgtggctccaggacagaccgccagaatcacatgcggcggcaacaacatcggcagcaagagcgtgcactggtatcagcagccacctggacaggctccagtggtggtggtgtacgacgacagcgatagacctagcggcatccccgagagattcagcggcagcaattccggcaataccgccacactgaccatcagcagagtggaagctggcgacgaggccgtgtactactgccaagtgtgggacagcagcagcgatcacgtggtgtttggcggcggaacaaagctgacagtgcttggacagcctaaggccaatcctaccgtgacactgttccctccaagcagcgaagaactccaggccaacaaggccacacttgtgtgcctgatctccgacttctaccctggggctgtgacagtggcttggaaggccgatggatctcctgtgaaagccggcgtggaaaccaccaagccatccaagcagagcaacaacaaatacgccgccagctcctacctgagcctgacacctgagcagtggaagtcccacagatcctacagctgccaagtgacccacgaaggcagcaccgtggaaaagacagtggcccctacagagtgcagcggatcccagagcttcggcctgctggaccccaagctgtgctacctgctggatggcatcctgttcatctacggcgtgatcctgaccgccctgttcctgagagtgaagttcagcagaagcgccgacgcccctgcctaccagcagggacagaaccaactgtacaacgagctgaacctgggcagacgggaagagtacgacgtgctggacaagcggagaggcagggaccctgagatgggcggaaagccccagcggagaaagaacccccaggaaggactgtataacgaactccagaaagacaagatggccgaagcctacagcgagatcggcatgaagggcgagcggagaagaggcaagggccacgatggcctgtaccagggcctgagcaccgccaccaaggacacctatgacgccctgcacatgcaggccctgcctccaagaagggccaagcgatctggatctggagcaacaaacttctcactactcaaacaagcaggtgacgtggaggagaatcccgggcctactagtatggactggatttggcgcatccttttccttgtcggcgctgctaccggcgcgcattccttcgaacaactccagctgcaagagtctggccctggcctggtcaagcctagcgaaacactgagcctgacctgtaccgtgtctggcggctctatcagctccagcagctatttctggggctggatcagacaacctcctggcaaaggactggaatggatcggctccatctactacagcggcatcacctactacaaccccagcctgaagtccagagtgaccatctccgtggacaccagcaagaaccagttctccctgaagctgagcagcgtgacagccgccgataccgccgtgtattattgtgccagacatgacggcgctgtggccggcctgtttgattattggggacagggcaccctggtcaccgtgtcatctgctgcctctacaaagggaccctccgtgtttcctctggctcccagcagcaagtctacaagcggaggaacagccgctctgggctgcctggtcaaggattactttcccgagcctgtgaccgtgtcctggaatagcggagcactgacaagcggcgtgcacacctttccagccgtgctgcaaagcagcggcctgtactctctgagcagcgtggtcacagtgcctagctctagcctgggcacccagacctacatctgcaatgtgaaccacaagcctagcaacaccaaggtggacaagagagtggaacccaagagctgtggtacccagagttttgggttgttggaccctaaattgtgctatctgttggacggaatcctgttcatttacggagtgatcctgaccgcattgttcctgcgggttaagttttccagatccgcagacgcacccgcttaccaacaagggcagaaccaactctacaatgaacttaatttggggcggagggaagagtacgacgttctggacaaaaggaggggacgagatcccgagatgggcggaaagcctcagcgaaggaagaatccgcaagaggggctttataacgaactccagaaagataaaatggcagaagcctatagtgagattgggatgaagggagaaaggaggaggggtaaaggtcacgatgggttgtaccaaggattgagcacagccactaaagatacctatgatgcgctccacatgcaggccctgccgccaagacgcgccaagagaagcggatctggcgtgaagcagaccctgaatttcgacctgctgaagctggctggcgacgtggaatccaacccaggcccttctagaggccatatgaccgagtacaagcccacggtgcgcctcgccacccgcgacgacgtccccagggccgtacgcaccctcgccgccgcgttcgccgactaccccgccacgcgccacaccgtcgatccggaccgccacatcgagcgggtcaccgagctgcaagaactcttcctcacgcgcgtcgggctcgacatcggcaaggtgtgggtcgcggacgacggcgccgcggtggcggtctggaccacgccggagagcgtcgaagcgggggcggtgttcgccgagatcggcccgcgcatggccgagttgagcggttcccggctggccgcgcagcaacagatggaaggcctcctggcgccgcaccggcccaaggagcccgcgtggttcctggccaccgtcggcgtctcgcccgaccaccagggcaagggtctgggcagcgccgtcgtgctccccggagtggaggcggccgagcgcgccggggtgcccgccttcctggagacctccgcgccccgcaacctccccttctacgagcggctcggcttcaccgtcaccgccgacgtcgaggtgcccgaaggaccgcgcacctggtgcatgacccgcaagcccggtgcctga

SEQ ID NO: 7430 - DNA, 2457 bp, Artificial Sequence
  Synthetic Polynucloetide
atggccttaccagtgaccgccttgctcctgccgctggccttgctgctccacgccgccaggccgagctacgtgctgacacagcctccatccgtgtctgtggctccaggacagaccgccagaatcacatgcggcggcaacaacatcggcagcaagagcgtgcactggtatcagcagccacctggacaggctccagtggtggtggtgtacgacgacagcgatagacctagcggcatccccgagagattcagcggcagcaattccggcaataccgccacactgaccatcagcagagtggaagctggcgacgaggccgtgtactactgccaagtgtgggacagcagcagcgatcacgtggtgtttggcggcggaacaaagctgacagtgcttctcgaggacctgaagaacgtgttcccacctgaggtggccgtgttcgagcctagcgaggccgagatcagccacacccagaaagccaccctcgtgtgcctggctaccggcttctaccccgaccatgtggaactgtcttggtgggtcaacggcaaagaggtgcacagcggcgtgtctaccgacccccagccactgaaagaacagcccgccctgaacgacagccggtactgcctgagcagcagactgagagtgtccgccaccttctggcagaacccccggaaccacttcagatgccaggtgcagttctacggcctgagcgagaacgacgagtggacccaggacagagccaagcccgtgacccagatcgtgtctgccgaagcctggggcagagccgattgcggatcccagagcttcggcctgctggaccccaagctgtgctacctgctggatggcatcctgttcatctacggcgtgatcctgaccgccctgttcctgagagtgaagttcagcagaagcgccgacgcccctgcctaccagcagggacagaaccaactgtacaacgagctgaacctgggcagacgggaagagtacgacgtgctggacaagcggagaggcagggaccctgagatgggcggaaagccccagcggagaaagaacccccaggaaggactgtataacgaactccagaaagacaagatggccgaagcctacagcgagatcggcatgaagggcgagcggagaagaggcaagggccacgatggcctgtaccagggcctgagcaccgccaccaaggacacctatgacgccctgcacatgcaggccctgcctccaagaagggccaagcgatctggatctggagcaacaaacttctcactactcaaacaagcaggtgacgtggaggagaatcccgggcctactagtatggactggatttggcgcatccttttccttgtcggcgctgctaccggcgcgcattccttcgaacaactccagctgcaagagtctggccctggcctggtcaagcctagcgaaacactgagcctgacctgtaccgtgtctggcggctctatcagctccagcagctatttctggggctggatcagacaacctcctggcaaaggactggaatggatcggctccatctactacagcggcatcacctactacaaccccagcctgaagtccagagtgaccatctccgtggacaccagcaagaaccagttctccctgaagctgagcagcgtgacagccgccgataccgccgtgtattattgtgccagacatgacggcgctgtggccggcctgtttgattattggggacagggcaccctggtcaccgtgtcatctgctacgcgtatccagaaccctgatcctgccgtgtaccagctgcgggatagcaagagcagcgacaagagcgtgtgtctgttcaccgacttcgacagccagaccaacgtgtcccagagcaaggactccgacgtgtacatcaccgataagaccgtgctggacatgcggagcatggacttcaagagcaactccgccgtggcctggtccaacaagtccgatttcgcctgcgccaacgccttcaacaacagcattatccccgaggacacattcttcccaagccccgagagcagctgcggtacccagagttttgggttgttggaccctaaattgtgctatctgttggacggaatcctgttcatttacggagtgatcctgaccgcattgttcctgcgggttaagttttccagatccgcagacgcacccgcttaccaacaagggcagaaccaactctacaatgaacttaatttggggcggagggaagagtacgacgttctggacaaaaggaggggacgagatcccgagatgggcggaaagcctcagcgaaggaagaatccgcaagaggggctttataacgaactccagaaagataaaatggcagaagcctatagtgagattgggatgaagggagaaaggaggaggggtaaaggtcacgatgggttgtaccaaggattgagcacagccactaaagatacctatgatgcgctccacatgcaggccctgccgccaaga

SEQ ID NO: 7431 - DNA, 2457 bp, Artificial Sequence
  Synthetic Polynucloetide
atggccttaccagtgaccgccttgctcctgccgctggccttgctgctccacgccgccaggccgagctacgtgctgacacagcctccatccgtgtctgtggctccaggacagaccgccagaatcacatgcggcggcaacaacatcggcagcaagagcgtgcactggtatcagcagccacctggacaggctccagtggtggtggtgtacgacgacagcgatagacctagcggcatccccgagagattcagcggcagcaattccggcaataccgccacactgaccatcagcagagtggaagctggcgacgaggccgtgtactactgccaagtgtgggacagcagcagcgatcacgtggtgtttggcggcggaacaaagctgacagtgcttctcgaggacctgaagaacgtgttcccacctgaggtggccgtgttcgagcctagcaaggccgagatcgcccacacccagaaagccaccctcgtgtgcctggctaccggcttctaccccgaccatgtggaactgtcttggtgggtcaacggcaaagaggtgcacagcggcgtgtgtaccgacccccagccactgaaagaacagcccgccctgaacgacagccggtactgcctgagcagcagactgagagtgtccgccaccttctggcagaacccccggaaccacttcagatgccaggtgcagttctacggcctgagcgagaacgacgagtggacccaggacagagccaagcccgtgacccagatcgtgtctgccgaagcctggggcagagccgattgcggatcccagagcttcggcctgctggaccccaagctgtgctacctgctggatggcatcctgttcatctacggcgtgatcctgaccgccctgttcctgagagtgaagttcagcagaagcgccgacgcccctgcctaccagcagggacagaaccaactgtacaacgagctgaacctgggcagacgggaagagtacgacgtgctggacaagcggagaggcagggaccctgagatgggcggaaagccccagcggagaaagaacccccaggaaggactgtataacgaactccagaaagacaagatggccgaagcctacagcgagatcggcatgaagggcgagcggagaagaggcaagggccacgatggcctgtaccagggcctgagcaccgccaccaaggacacctatgacgccctgcacatgcaggccctgcctccaagaagggccaagcgatctggatctggagcaacaaacttctcactactcaaacaagcaggtgacgtggaggagaatcccgggcctactagtatggactggatttggcgcatccttttccttgtcggcgctgctaccggcgcgcattccttcgaacaactccagctgcaagagtctggccctggcctggtcaagcctagcgaaacactgagcctgacctgtaccgtgtctggcggctctatcagctccagcagctatttctggggctggatcagacaacctcctggcaaaggactggaatggatcggctccatctactacagcggcatcacctactacaaccccagcctgaagtccagagtgaccatctccgtggacaccagcaagaaccagttctccctgaagctgagcagcgtgacagccgccgataccgccgtgtattattgtgccagacatgacggcgctgtggccggcctgtttgattattggggacagggcaccctggtcaccgtgtcatctgctacgcgtatccagaaccctgatcctgccgtgtaccagctgcgggatagcaagagcagcgacaagagcgtgtgtctgttcaccgacttcgacagccagaccaacgtgtcccagagcaaggactccgacgtgtacatcaccgataagtgcgtgctggacatgcggagcatggacttcaagagcaactccgccgtggcctggtccaacaagtccgatttcgcctgcgccaacgccttcaacaacagcattatccccgaggacacattcttcccaagcagcgacgtgccctgcggtacccagagttttgggttgttggaccctaaattgtgctatctgttggacggaatcctgttcatttacggagtgatcctgaccgcattgttcctgcgggttaagttttccagatccgcagacgcacccgcttaccaacaagggcagaaccaactctacaatgaacttaatttggggcggagggaagagtacgacgttctggacaaaaggaggggacgagatcccgagatgggcggaaagcctcagcgaaggaagaatccgcaagaggggctttataacgaactccagaaagataaaatggcagaagcctatagtgagattgggatgaagggagaaaggaggaggggtaaaggtcacgatgggttgtaccaaggattgagcacagccactaaagatacctatgatgcgctccacatgcaggccctgccgccaaga

SEQ ID NO: 7432 - DNA, 2670 bp, Artificial Sequence
  Synthetic Polynucloetide
atggccttaccagtgaccgccttgctcctgccgctggccttgctgctccacgccgccaggccgagctacgtgctgacacagcctccatccgtgtctgtggctccaggacagaccgccagaatcacatgcggcggcaacaacatcggcagcaagagcgtgcactggtatcagcagccacctggacaggctccagtggtggtggtgtacgacgacagcgatagacctagcggcatccccgagagattcagcggcagcaattccggcaataccgccacactgaccatcagcagagtggaagctggcgacgaggccgtgtactactgccaagtgtgggacagcagcagcgatcacgtggtgtttggcggcggaacaaagctgacagtgcttctcgaggggaaaccaattcccaaccctcttctgggactggattcaaccggcagcggcgaggacctgaagaacgtgttcccacctgaggtggccgtgttcgagcctagcgaggccgagatcagccacacccagaaagccaccctcgtgtgcctggctaccggcttctaccccgaccatgtggaactgtcttggtgggtcaacggcaaagaggtgcacagcggcgtgtctaccgacccccagccactgaaagaacagcccgccctgaacgacagccggtactgcctgagcagcagactgagagtgtccgccaccttctggcagaacccccggaaccacttcagatgccaggtgcagttctacggcctgagcgagaacgacgagtggacccaggacagagccaagcccgtgacccagatcgtgtctgccgaagcctggggcagagccgattgcggatcccagagcttcggcctgctggaccccaagctgtgctacctgctggatggcatcctgttcatctacggcgtgatcctgaccgccctgttcctgagagtgaagttcagcagaagcgccgacgcccctgcctaccagcagggacagaaccaactgtacaacgagctgaacctgggcagacgggaagagtacgacgtgctggacaagcggagaggcagggaccctgagatgggcggaaagccccagcggagaaagaacccccaggaaggactgtataacgaactccagaaagacaagatggccgaagcctacagcgagatcggcatgaagggcgagcggagaagaggcaagggccacgatggcctgtaccagggcctgagcaccgccaccaaggacacctatgacgccctgcacatgcaggccctgcctccaagaagggccaagcgatctggatctggagcaacaaacttctcactactcaaacaagcaggtgacgtggaggagaatcccgggcctactagtatggactggatttggcgcatccttttccttgtcggcgctgctaccggcgcgcattccttcgaacaactccagctgcaagagtctggccctggcctggtcaagcctagcgaaacactgagcctgacctgtaccgtgtctggcggctctatcagctccagcagctatttctggggctggatcagacaacctcctggcaaaggactggaatggatcggctccatctactacagcggcatcacctactacaaccccagcctgaagtccagagtgaccatctccgtggacaccagcaagaaccagttctccctgaagctgagcagcgtgacagccgccgataccgccgtgtattattgtgccagacatgacggcgctgtggccggcctgtttgattattggggacagggcaccctggtcaccgtgtcatctgctacgcgtgagcagaaactgatctcggaagaggatgggagcggcatccagaaccctgatcctgccgtgtaccagctgcgggatagcaagagcagcgacaagagcgtgtgtctgttcaccgacttcgacagccagaccaacgtgtcccagagcaaggactccgacgtgtacatcaccgataagaccgtgctggacatgcggagcatggacttcaagagcaactccgccgtggcctggtccaacaagtccgatttcgcctgcgccaacgccttcaacaacagcattatccccgaggacacattcttcccaagccccgagagcagctgcggtacccagagttttgggttgttggaccctaaattgtgctatctgttggacggaatcctgttcatttacggagtgatcctgaccgcattgttcctgaggagcaagcggtcacggctgctccacagcgattacatgaatatgacaccacgaagaccgggtcctactcgcaaacactaccaaccctacgcacctccccgcgactttgcagcgtaccgatctcgggttaagttttccagatccgcagacgcacccgcttaccaacaagggcagaaccaactctacaatgaacttaatttggggcggagggaagagtacgacgttctggacaaaaggaggggacgagatcccgagatgggcggaaagcctcagcgaaggaagaatccgcaagaggggctttataacgaactccagaaagataaaatggcagaagcctatagtgagattgggatgaagggagaaaggaggaggggtaaaggtcacgatgggttgtaccaaggattgagcacagccactaaagatacctatgatgcgctccacatgcaggccctgccgccaaga

SEQ ID NO: 7433 - DNA, 2793 bp, Artificial Sequence
  Synthetic Polynucloetide
atggccttaccagtgaccgccttgctcctgccgctggccttgctgctccacgccgccaggccgagctacgtgctgacacagcctccatccgtgtctgtggctccaggacagaccgccagaatcacatgcggcggcaacaacatcggcagcaagagcgtgcactggtatcagcagccacctggacaggctccagtggtggtggtgtacgacgacagcgatagacctagcggcatccccgagagattcagcggcagcaattccggcaataccgccacactgaccatcagcagagtggaagctggcgacgaggccgtgtactactgccaagtgtgggacagcagcagcgatcacgtggtgtttggcggcggaacaaagctgacagtgcttctcgaggggaaaccaattcccaaccctcttctgggactggattcaaccggcagcggcgaggacctgaagaacgtgttcccacctgaggtggccgtgttcgagcctagcgaggccgagatcagccacacccagaaagccaccctcgtgtgcctggctaccggcttctaccccgaccatgtggaactgtcttggtgggtcaacggcaaagaggtgcacagcggcgtgtctaccgacccccagccactgaaagaacagcccgccctgaacgacagccggtactgcctgagcagcagactgagagtgtccgccaccttctggcagaacccccggaaccacttcagatgccaggtgcagttctacggcctgagcgagaacgacgagtggacccaggacagagccaagcccgtgacccagatcgtgtctgccgaagcctggggcagagccgattgcggatcccagagcttcggcctgctggaccccaagctgtgctacctgctggatggcatcctgttcatctacggcgtgatcctgaccgccctgttcctgaggagtaagaggagcaggctcctgcacagtgactacatgaacatgactccacgccgccccggacccacccgcaagcattaccagccctatgccccaccacgcgacttcgcagcctatcgctccagagtgaagttcagcagaagcgccgacgcccctgcctaccagcagggacagaaccaactgtacaacgagctgaacctgggcagacgggaagagtacgacgtgctggacaagcggagaggcagggaccctgagatgggcggaaagccccagcggagaaagaacccccaggaaggactgtataacgaactccagaaagacaagatggccgaagcctacagcgagatcggcatgaagggcgagcggagaagaggcaagggccacgatggcctgtaccagggcctgagcaccgccaccaaggacacctatgacgccctgcacatgcaggccctgcctccaagaagggccaagcgatctggatctggagcaacaaacttctcactactcaaacaagcaggtgacgtggaggagaatcccgggcctactagtatggactggatttggcgcatccttttccttgtcggcgctgctaccggcgcgcattccttcgaacaactccagctgcaagagtctggccctggcctggtcaagcctagcgaaacactgagcctgacctgtaccgtgtctggcggctctatcagctccagcagctatttctggggctggatcagacaacctcctggcaaaggactggaatggatcggctccatctactacagcggcatcacctactacaaccccagcctgaagtccagagtgaccatctccgtggacaccagcaagaaccagttctccctgaagctgagcagcgtgacagccgccgataccgccgtgtattattgtgccagacatgacggcgctgtggccggcctgtttgattattggggacagggcaccctggtcaccgtgtcatctgctacgcgtgagcagaaactgatctcggaagaggatgggagcggcatccagaaccctgatcctgccgtgtaccagctgcgggatagcaagagcagcgacaagagcgtgtgtctgttcaccgacttcgacagccagaccaacgtgtcccagagcaaggactccgacgtgtacatcaccgataagaccgtgctggacatgcggagcatggacttcaagagcaactccgccgtggcctggtccaacaagtccgatttcgcctgcgccaacgccttcaacaacagcattatccccgaggacacattcttcccaagccccgagagcagctgcggtacccagagttttgggttgttggaccctaaattgtgctatctgttggacggaatcctgttcatttacggagtgatcctgaccgcattgttcctgaggagcaagcggtcacggctgctccacagcgattacatgaatatgacaccacgaagaccgggtcctactcgcaaacactaccaaccctacgcacctccccgcgactttgcagcgtaccgatctcgggttaagttttccagatccgcagacgcacccgcttaccaacaagggcagaaccaactctacaatgaacttaatttggggcggagggaagagtacgacgttctggacaaaaggaggggacgagatcccgagatgggcggaaagcctcagcgaaggaagaatccgcaagaggggctttataacgaactccagaaagataaaatggcagaagcctatagtgagattgggatgaagggagaaaggaggaggggtaaaggtcacgatgggttgtaccaaggattgagcacagccactaaagatacctatgatgcgctccacatgcaggccctgccgccaaga

SEQ ID NO: 7434 - DNA, 2676 bp, Artificial Sequence
  Synthetic Polynucloetide
atggccttaccagtgaccgccttgctcctgccgctggccttgctgctccacgccgccaggccgagctacgtgctgacacagcctccatccgtgtctgtggctccaggacagaccgccagaatcacatgcggcggcaacaacatcggcagcaagagcgtgcactggtatcagcagccacctggacaggctccagtggtggtggtgtacgacgacagcgatagacctagcggcatccccgagagattcagcggcagcaattccggcaataccgccacactgaccatcagcagagtggaagctggcgacgaggccgtgtactactgccaagtgtgggacagcagcagcgatcacgtggtgtttggcggcggaacaaagctgacagtgcttctcgaggggaaaccaattcccaaccctcttctgggactggattcaaccggcagcggcgaggacctgaagaacgtgttcccacctgaggtggccgtgttcgagcctagcgaggccgagatcagccacacccagaaagccaccctcgtgtgcctggctaccggcttctaccccgaccatgtggaactgtcttggtgggtcaacggcaaagaggtgcacagcggcgtgtctaccgacccccagccactgaaagaacagcccgccctgaacgacagccggtactgcctgagcagcagactgagagtgtccgccaccttctggcagaacccccggaaccacttcagatgccaggtgcagttctacggcctgagcgagaacgacgagtggacccaggacagagccaagcccgtgacccagatcgtgtctgccgaagcctggggcagagccgattgcggatcccagagcttcggcctgctggaccccaagctgtgctacctgctggatggcatcctgttcatctacggcgtgatcctgaccgccctgttcctgagagtgaagttcagcagaagcgccgacgcccctgcctaccagcagggacagaaccaactgtacaacgagctgaacctgggcagacgggaagagtacgacgtgctggacaagcggagaggcagggaccctgagatgggcggaaagccccagcggagaaagaacccccaggaaggactgtataacgaactccagaaagacaagatggccgaagcctacagcgagatcggcatgaagggcgagcggagaagaggcaagggccacgatggcctgtaccagggcctgagcaccgccaccaaggacacctatgacgccctgcacatgcaggccctgcctccaagaagggccaagcgatctggatctggagcaacaaacttctcactactcaaacaagcaggtgacgtggaggagaatcccgggcctactagtatggactggatttggcgcatccttttccttgtcggcgctgctaccggcgcgcattccttcgaacaactccagctgcaagagtctggccctggcctggtcaagcctagcgaaacactgagcctgacctgtaccgtgtctggcggctctatcagctccagcagctatttctggggctggatcagacaacctcctggcaaaggactggaatggatcggctccatctactacagcggcatcacctactacaaccccagcctgaagtccagagtgaccatctccgtggacaccagcaagaaccagttctccctgaagctgagcagcgtgacagccgccgataccgccgtgtattattgtgccagacatgacggcgctgtggccggcctgtttgattattggggacagggcaccctggtcaccgtgtcatctgctacgcgtgagcagaaactgatctcggaagaggatctggggagcggcatccagaaccctgatcctgccgtgtaccagctgcgggatagcaagagcagcgacaagagcgtgtgtctgttcaccgacttcgacagccagaccaacgtgtcccagagcaaggactccgacgtgtacatcaccgataagaccgtgctggacatgcggagcatggacttcaagagcaactccgccgtggcctggtccaacaagtccgatttcgcctgcgccaacgccttcaacaacagcattatccccgaggacacattcttcccaagccccgagagcagctgcggtacccagagttttgggttgttggaccctaaattgtgctatctgttggacggaatcctgttcatttacggagtgatcctgaccgcattgttcctgaagagaggccggaagaagctgctgtacatcttcaagcagcctttcatgcggcccgtgcagaccacccaggaagaggacggctgctcctgccggttccccgaggaagaagaaggcggctgcgagctgcgggttaagttttccagatccgcagacgcacccgcttaccaacaagggcagaaccaactctacaatgaacttaatttggggcggagggaagagtacgacgttctggacaaaaggaggggacgagatcccgagatgggcggaaagcctcagcgaaggaagaatccgcaagaggggctttataacgaactccagaaagataaaatggcagaagcctatagtgagattgggatgaagggagaaaggaggaggggtaaaggtcacgatgggttgtaccaaggattgagcacagccactaaagatacctatgatgcgctccacatgcaggccctgccgccaaga

SEQ ID NO: 7435 - DNA, 2802 bp, Artificial Sequence
  Synthetic Polynucloetide
atggccttaccagtgaccgccttgctcctgccgctggccttgctgctccacgccgccaggccgagctacgtgctgacacagcctccatccgtgtctgtggctccaggacagaccgccagaatcacatgcggcggcaacaacatcggcagcaagagcgtgcactggtatcagcagccacctggacaggctccagtggtggtggtgtacgacgacagcgatagacctagcggcatccccgagagattcagcggcagcaattccggcaataccgccacactgaccatcagcagagtggaagctggcgacgaggccgtgtactactgccaagtgtgggacagcagcagcgatcacgtggtgtttggcggcggaacaaagctgacagtgcttctcgaggggaaaccaattcccaaccctcttctgggactggattcaaccggcagcggcgaggacctgaagaacgtgttcccacctgaggtggccgtgttcgagcctagcgaggccgagatcagccacacccagaaagccaccctcgtgtgcctggctaccggcttctaccccgaccatgtggaactgtcttggtgggtcaacggcaaagaggtgcacagcggcgtgtctaccgacccccagccactgaaagaacagcccgccctgaacgacagccggtactgcctgagcagcagactgagagtgtccgccaccttctggcagaacccccggaaccacttcagatgccaggtgcagttctacggcctgagcgagaacgacgagtggacccaggacagagccaagcccgtgacccagatcgtgtctgccgaagcctggggcagagccgattgcggatcccagagcttcggcctgctggaccccaagctgtgctacctgctggatggcatcctgttcatctacggcgtgatcctgaccgccctgttcctgaaacggggcagaaagaaactcctgtatatattcaaacaaccatttatgagaccagtacaaactactcaagaggaagatggctgtagctgccgatttccagaagaagaagaaggaggatgtgaactgagagtgaagttcagcagaagcgccgacgcccctgcctaccagcagggacagaaccaactgtacaacgagctgaacctgggcagacgggaagagtacgacgtgctggacaagcggagaggcagggaccctgagatgggcggaaagccccagcggagaaagaacccccaggaaggactgtataacgaactccagaaagacaagatggccgaagcctacagcgagatcggcatgaagggcgagcggagaagaggcaagggccacgatggcctgtaccagggcctgagcaccgccaccaaggacacctatgacgccctgcacatgcaggccctgcctccaagaagggccaagcgatctggatctggagcaacaaacttctcactactcaaacaagcaggtgacgtggaggagaatcccgggcctactagtatggactggatttggcgcatccttttccttgtcggcgctgctaccggcgcgcattccttcgaacaactccagctgcaagagtctggccctggcctggtcaagcctagcgaaacactgagcctgacctgtaccgtgtctggcggctctatcagctccagcagctatttctggggctggatcagacaacctcctggcaaaggactggaatggatcggctccatctactacagcggcatcacctactacaaccccagcctgaagtccagagtgaccatctccgtggacaccagcaagaaccagttctccctgaagctgagcagcgtgacagccgccgataccgccgtgtattattgtgccagacatgacggcgctgtggccggcctgtttgattattggggacagggcaccctggtcaccgtgtcatctgctacgcgtgagcagaaactgatctcggaagaggatctggggagcggcatccagaaccctgatcctgccgtgtaccagctgcgggatagcaagagcagcgacaagagcgtgtgtctgttcaccgacttcgacagccagaccaacgtgtcccagagcaaggactccgacgtgtacatcaccgataagaccgtgctggacatgcggagcatggacttcaagagcaactccgccgtggcctggtccaacaagtccgatttcgcctgcgccaacgccttcaacaacagcattatccccgaggacacattcttcccaagccccgagagcagctgcggtacccagagttttgggttgttggaccctaaattgtgctatctgttggacggaatcctgttcatttacggagtgatcctgaccgcattgttcctgaagagaggccggaagaagctgctgtacatcttcaagcagcctttcatgcggcccgtgcagaccacccaggaagaggacggctgctcctgccggttccccgaggaagaagaaggcggctgcgagctgcgggttaagttttccagatccgcagacgcacccgcttaccaacaagggcagaaccaactctacaatgaacttaatttggggcggagggaagagtacgacgttctggacaaaaggaggggacgagatcccgagatgggcggaaagcctcagcgaaggaagaatccgcaagaggggctttataacgaactccagaaagataaaatggcagaagcctatagtgagattgggatgaagggagaaaggaggaggggtaaaggtcacgatgggttgtaccaaggattgagcacagccactaaagatacctatgatgcgctccacatgcaggccctgccgccaaga

SEQ ID NO: 7436 - DNA, 2475 bp, Artificial Sequence
  Synthetic Polynucloetide
atggccttaccagtgaccgccttgctcctgccgctggccttgctgctccacgccgccaggccgagctacgtgctgacacagcctccatccgtgtctgtggctccaggacagaccgccagaatcacatgcggcggcaacaacatcggcagcaagagcgtgcactggtatcagcagccacctggacaggctccagtggtggtggtgtacgacgacagcgatagacctagcggcatccccgagagattcagcggcagcaattccggcaataccgccacactgaccatcagcagagtggaagctggcgacgaggccgtgtactactgccaagtgtgggacagcagcagcgatcacgtggtgtttggcggcggaacaaagctgacagtgcttctcgagcagagcttcggcctgctggaccccaagctgtgctacctgctggatggcatcctgttcatctacggcgtgatcctgaccgccctgttcctgagagtgaagttcagcagaagcgccgacgcccctgcctaccagcagggacagaaccaactgtacaacgagctgaacctgggcagacgggaagagtacgacgtgctggacaagcggagaggcagggaccctgagatgggcggaaagccccagcggagaaagaacccccaggaaggactgtataacgaactccagaaagacaagatggccgaagcctacagcgagatcggcatgaagggcgagcggagaagaggcaagggccacgatggcctgtaccagggcctgagcaccgccaccaaggacacctatgacgccctgcacatgcaggccctgcctccaagaagggccaagcgatctggatctggagcaacaaacttctcactactcaaacaagcaggtgacgtggaggagaatcccgggcctactagtatggactggatttggcgcatccttttccttgtcggcgctgctaccggcgcgcattccttcgaacaactccagctgcaagagtctggccctggcctggtcaagcctagcgaaacactgagcctgacctgtaccgtgtctggcggctctatcagctccagcagctatttctggggctggatcagacaacctcctggcaaaggactggaatggatcggctccatctactacagcggcatcacctactacaaccccagcctgaagtccagagtgaccatctccgtggacaccagcaagaaccagttctccctgaagctgagcagcgtgacagccgccgataccgccgtgtattattgtgccagacatgacggcgctgtggccggcctgtttgattattggggacagggcaccctggtcaccgtgtcatctgctacgcgtcagagttttgggttgttggaccctaaattgtgctatctgttggacggaatcctgttcatttacggagtgatcctgaccgcattgttcctgcgggttaagttttccagatccgcagacgcacccgcttaccaacaagggcagaaccaactctacaatgaacttaatttggggcggagggaagagtacgacgttctggacaaaaggaggggacgagatcccgagatgggcggaaagcctcagcgaaggaagaatccgcaagaggggctttataacgaactccagaaagataaaatggcagaagcctatagtgagattgggatgaagggagaaaggaggaggggtaaaggtcacgatgggttgtaccaaggattgagcacagccactaaagatacctatgatgcgctccacatgcaggccctgccgccaagacgcgccaagagaagcggatctggcgtgaagcagaccctgaatttcgacctgctgaagctggctggcgacgtggaatccaacccaggcccttctagaggccatatgaccgagtacaagcccacggtgcgcctcgccacccgcgacgacgtccccagggccgtacgcaccctcgccgccgcgttcgccgactaccccgccacgcgccacaccgtcgatccggaccgccacatcgagcgggtcaccgagctgcaagaactcttcctcacgcgcgtcgggctcgacatcggcaaggtgtgggtcgcggacgacggcgccgcggtggcggtctggaccacgccggagagcgtcgaagcgggggcggtgttcgccgagatcggcccgcgcatggccgagttgagcggttcccggctggccgcgcagcaacagatggaaggcctcctggcgccgcaccggcccaaggagcccgcgtggttcctggccaccgtcggcgtctcgcccgaccaccagggcaagggtctgggcagcgccgtcgtgctccccggagtggaggcggccgagcgcgccggggtgcccgccttcctggagacctccgcgccccgcaacctccccttctacgagcggctcggcttcaccgtcaccgccgacgtcgaggtgcccgaaggaccgcgcacctggtgcatgacccgcaagcccggtgcctga

SEQ ID NO: 7437 - DNA, 1947 bp, Artificial Sequence
  Synthetic Polynucloetide
atggccttaccagtgaccgccttgctcctgccgctggccttgctgctccacgccgccaggccgagctacgtgctgacacagcctccatccgtgtctgtggctccaggacagaccgccagaatcacatgcggcggcaacaacatcggcagcaagagcgtgcactggtatcagcagccacctggacaggctccagtggtggtggtgtacgacgacagcgatagacctagcggcatccccgagagattcagcggcagcaattccggcaataccgccacactgaccatcagcagagtggaagctggcgacgaggccgtgtactactgccaagtgtgggacagcagcagcgatcacgtggtgtttggcggcggaacaaagctgacagtgcttctcgagggacagcctaaggccaatcctaccgtgacactgttccctccaagcagcgaagaactccaggccaacaaggccacacttgtgtgcctgatctccgacttctaccctggggctgtgacagtggcttggaaggccgatggatctcctgtgaaagccggcgtggaaaccaccaagccatccaagcagagcaacaacaaatacgccgccagctcctacctgagcctgacacctgagcagtggaagtcccacagatcctacagctgccaagtgacccacgaaggcagcaccgtggaaaagacagtggcccctacagagtgcagccccatcaagaccgatgtgattacaatggaccccaaggacaactgctccaaggacgccaacgataccctgctgctccagctgaccaacaccagcgcctactacatgtacttgttgctgctgctgaagtccgtggtgtacttcgccatcatcacatgctgcctgctgcggagaaccgccttctgctgcaacggcgagaagtctagggccaagcgatctggatctggagcaacaaacttctcactactcaaacaagcaggtgacgtggaggagaatcccgggcctactagtatggactggatttggcgcatccttttccttgtcggcgctgctaccggcgcgcattccttcgaacaactccagctgcaagagtctggccctggcctggtcaagcctagcgaaacactgagcctgacctgtaccgtgtctggcggctctatcagctccagcagctatttctggggctggatcagacaacctcctggcaaaggactggaatggatcggctccatctactacagcggcatcacctactacaaccccagcctgaagtccagagtgaccatctccgtggacaccagcaagaaccagttctccctgaagctgagcagcgtgacagccgccgataccgccgtgtattattgtgccagacatgacggcgctgtggccggcctgtttgattattggggacagggcaccctggtcaccgtgtcatctgctacgcgtgcctctacaaagggaccctccgtgtttcctctggctcccagcagcaagtctacaagcggaggaacagccgctctgggctgcctggtcaaggattactttcccgagcctgtgaccgtgtcctggaatagcggagcactgacaagcggcgtgcacacctttccagccgtgctgcaaagcagcggcctgtactctctgagcagcgtggtcacagtgcctagctctagcctgggcacccagacctacatctgcaatgtgaaccacaagcctagcaacaccaaggtggacaagagagtggaacccaagagctgtgaagtgaaaaccgactccaccgaccacgtgaagcccaaagagacagagaacaccaagcagcccagcaagagctgccacaagcccaaggccatcgtgcacaccgagaaagtgaacatgatgagcctgaccgtgctgggcctgcggatgctgttcgccaaaaccgtggccgtgaacttcctgctgaccgccaagctgttcttcctc

SEQ ID NO: 7438 - DNA, 1881 bp, Artificial Sequence
  Synthetic Polynucloetide
atggccttaccagtgaccgccttgctcctgccgctggccttgctgctccacgccgccaggccgagctacgtgctgacacagcctccatccgtgtctgtggctccaggacagaccgccagaatcacatgcggcggcaacaacatcggcagcaagagcgtgcactggtatcagcagccacctggacaggctccagtggtggtggtgtacgacgacagcgatagacctagcggcatccccgagagattcagcggcagcaattccggcaataccgccacactgaccatcagcagagtggaagctggcgacgaggccgtgtactactgccaagtgtgggacagcagcagcgatcacgtggtgtttggcggcggaacaaagctgacagtgcttctcgagggacagcctaaggccaatcctaccgtgacactgttccctccaagcagcgaagaactccaggccaacaaggccacacttgtgtgcctgatctccgacttctaccctggggctgtgacagtggcttggaaggccgatggatctcctgtgaaagccggcgtggaaaccaccaagccatccaagcagagcaacaacaaatacgccgccagctcctacctgagcctgacacctgagcagtggaagtcccacagatcctacagctgccaagtgacccacgaaggcagcaccgtggaaaagacagtggcccctacagagtgcagcggcagagccgattgcggcatcaccagcgccagctaccaccagggcgtgctgagcgccaccatcctgtacgagatcctgctgggcaaggccaccctgtacgccgtgctggtgtctgccctggtgctgatggctatggtcaagcggaaggacagccggggaagggccaagcgatctggatctggagcaacaaacttctcactactcaaacaagcaggtgacgtggaggagaatcccgggcctactagtatggactggatttggcgcatccttttccttgtcggcgctgctaccggcgcgcattccttcgaacaactccagctgcaagagtctggccctggcctggtcaagcctagcgaaacactgagcctgacctgtaccgtgtctggcggctctatcagctccagcagctatttctggggctggatcagacaacctcctggcaaaggactggaatggatcggctccatctactacagcggcatcacctactacaaccccagcctgaagtccagagtgaccatctccgtggacaccagcaagaaccagttctccctgaagctgagcagcgtgacagccgccgataccgccgtgtattattgtgccagacatgacggcgctgtggccggcctgtttgattattggggacagggcaccctggtcaccgtgtcatctgctacgcgtgcctctacaaagggaccctccgtgtttcctctggctcccagcagcaagtctacaagcggaggaacagccgctctgggctgcctggtcaaggattactttcccgagcctgtgaccgtgtcctggaatagcggagcactgacaagcggcgtgcacacctttccagccgtgctgcaaagcagcggcctgtactctctgagcagcgtggtcacagtgcctagctctagcctgggcacccagacctacatctgcaatgtgaaccacaagcctagcaacaccaaggtggacaagagagtggaacccaagagctgtatccccgaggacacattcttcccaagcagcgacgtgccctgcgacgtgaagctggtggaaaagagcttcgagacagacaccaacctgaacttccagaacctgagcgtgatcggcttcagaatcctgctgctgaaagtggccggctttaacctgctgatgaccctgcggctgtggtccagc

SEQ ID NO: 7439 - DNA, 1881 bp, Artificial Sequence
  Synthetic Polynucloetide
atggccttaccagtgaccgccttgctcctgccgctggccttgctgctccacgccgccaggccgagctacgtgctgacacagcctccatccgtgtctgtggctccaggacagaccgccagaatcacatgcggcggcaacaacatcggcagcaagagcgtgcactggtatcagcagccacctggacaggctccagtggtggtggtgtacgacgacagcgatagacctagcggcatccccgagagattcagcggcagcaattccggcaataccgccacactgaccatcagcagagtggaagctggcgacgaggccgtgtactactgccaagtgtgggacagcagcagcgatcacgtggtgtttggcggcggaacaaagctgacagtgcttctcgagggacagcctaaggccaatcctaccgtgacactgttccctccaagcagcgaagaactccaggccaacaaggccacacttgtgtgcctgatctccgacttctaccctggggctgtgacagtggcttggaaggccgatggatctcctgtgaaagccggcgtggaaaccaccaagccatccaagcagagcaacaacaaatacgccgccagctcctacctgagcctgacacctgagcagtggaagtcccacagatcctacagctgccaagtgacccacgaaggcagcaccgtggaaaagacagtggcccctacagagtgcagcggcagagccgattgcggctttaccagcgagagctaccagcagggcgtgctgagcgccaccatcctgtacgagatcctgctgggcaaggccaccctgtacgccgtgctggtgtctgccctggtgctgatggctatggtcaagcggaaggacagccggggaagggccaagcgatctggatctggagcaacaaacttctcactactcaaacaagcaggtgacgtggaggagaatcccgggcctactagtatggactggatttggcgcatccttttccttgtcggcgctgctaccggcgcgcattccttcgaacaactccagctgcaagagtctggccctggcctggtcaagcctagcgaaacactgagcctgacctgtaccgtgtctggcggctctatcagctccagcagctatttctggggctggatcagacaacctcctggcaaaggactggaatggatcggctccatctactacagcggcatcacctactacaaccccagcctgaagtccagagtgaccatctccgtggacaccagcaagaaccagttctccctgaagctgagcagcgtgacagccgccgataccgccgtgtattattgtgccagacatgacggcgctgtggccggcctgtttgattattggggacagggcaccctggtcaccgtgtcatctgctacgcgtgcctctacaaagggaccctccgtgtttcctctggctcccagcagcaagtctacaagcggaggaacagccgctctgggctgcctggtcaaggattactttcccgagcctgtgaccgtgtcctggaatagcggagcactgacaagcggcgtgcacacctttccagccgtgctgcaaagcagcggcctgtactctctgagcagcgtggtcacagtgcctagctctagcctgggcacccagacctacatctgcaatgtgaaccacaagcctagcaacaccaaggtggacaagagagtggaacccaagagctgtatccccgaggacacattcttcccaagccccgagagcagctgcgacgtgaagctggtggaaaagagcttcgagacagacaccaacctgaacttccagaacctgagcgtgatcggcttcagaatcctgctgctgaaagtggccggctttaacctgctgatgaccctgcggctgtggtccagc

SEQ ID NO: 7440 - DNA, 1359 bp, Artificial Sequence
  Synthetic Polynucloetide
atggccttaccagtgaccgccttgctcctgccgctggccttgctgctccacgccgccaggccgagctacgtgctgacacagcctccatccgtgtctgtggctccaggacagaccgccagaatcacatgcggcggcaacaacatcggcagcaagagcgtgcactggtatcagcagccacctggacaggctccagtggtggtggtgtacgacgacagcgatagacctagcggcatccccgagagattcagcggcagcaattccggcaataccgccacactgaccatcagcagagtggaagctggcgacgaggccgtgtactactgccaagtgtgggacagcagcagcgatcacgtggtgtttggcggcggaacaaagctgacagtgcttggcggaggcggaagtggaggcggaggatctggcggcggaggctctcaactccagctgcaagagtctggccctggcctggtcaagcctagcgaaacactgagcctgacctgtaccgtgtctggcggctctatcagctccagcagctatttctggggctggatcagacaacctcctggcaaaggactggaatggatcggctccatctactacagcggcatcacctactacaaccccagcctgaagtccagagtgaccatctccgtggacaccagcaagaaccagttctccctgaagctgagcagcgtgacagccgccgataccgccgtgtattattgtgccagacatgacggcgctgtggccggcctgtttgattattggggacagggcaccctggtcaccgtgtcatctgctacgcgtgacggtaacgaggagatgggaggaatcactcaaaccccttacaaagtctcaatttcaggaacaactgttatccttacatgtccccagtatcctggcagcgagatcctttggcagcataacgacaagaatatagggggagatgaagacgataagaatatcggatctgacgaggatcacttgagcctgaaagagttctccgagcttgaacaaagcggatattatgtgtgctatccgcgcgggtcaaagccggaagacgctaacttttacctttatctccgagccagagtgtgcgaaaattgcatggaaatggacgttatgtccgttgctacaatagttatcgtagatatatgcatcacgggtggactgcttctgctggtttattattggtccaagaatagaaaggccaaagctaaacccgtgaccagaggcgctggcgcaggcggaaggcaaaggggacaaaacaaagaacggccaccaccagtgccaaatccagattatgagcctattcggaaaggacagagggacctgtactctggcctgaatcagagaagaatc

SEQ ID NO: 7441 - DNA, 1254 bp, Artificial Sequence
  Synthetic Polynucloetide
atggccttaccagtgaccgccttgctcctgccgctggccttgctgctccacgccgccaggccgagctacgtgctgacacagcctccatccgtgtctgtggctccaggacagaccgccagaatcacatgcggcggcaacaacatcggcagcaagagcgtgcactggtatcagcagccacctggacaggctccagtggtggtggtgtacgacgacagcgatagacctagcggcatccccgagagattcagcggcagcaattccggcaataccgccacactgaccatcagcagagtggaagctggcgacgaggccgtgtactactgccaagtgtgggacagcagcagcgatcacgtggtgtttggcggcggaacaaagctgacagtgcttggcggaggcggaagtggaggcggaggatctggcggcggaggctctcaactccagctgcaagagtctggccctggcctggtcaagcctagcgaaacactgagcctgacctgtaccgtgtctggcggctctatcagctccagcagctatttctggggctggatcagacaacctcctggcaaaggactggaatggatcggctccatctactacagcggcatcacctactacaaccccagcctgaagtccagagtgaccatctccgtggacaccagcaagaaccagttctccctgaagctgagcagcgtgacagccgccgataccgccgtgtattattgtgccagacatgacggcgctgtggccggcctgtttgattattggggacagggcaccctggtcaccgtgtcatctgctacgcgtttcaagatccccatcgaggaactggaagatcgggtgttcgtgaactgcaacacctctatcacctgggtggaaggcaccgtgggaacactgctgagcgacatcaccagactggacctcggcaagcggattctggaccctcggggcatctacagatgcaacggcaccgacatctacaaggacaaagaaagcaccgtgcaggtccactacagaatgtgccagtcctgcgtggaactggaccctgctacagtggccggcatcatcgtgaccgatgtgatcgctactctgctgctggctctgggagtgttctgcttcgccggacacgaaacaggcagactgtctggcgctgccgatacacaggccctgctgagaaacgaccaagtgtatcagcccctgcgcgacagagatgatgcccagtattctcacctcggcggcaactgggctagaaacaag

SEQ ID NO: 7442 - DNA, 1284 bp, Artificial Sequence
  Synthetic Polynucloetide
atggccttaccagtgaccgccttgctcctgccgctggccttgctgctccacgccgccaggccgagctacgtgctgacacagcctccatccgtgtctgtggctccaggacagaccgccagaatcacatgcggcggcaacaacatcggcagcaagagcgtgcactggtatcagcagccacctggacaggctccagtggtggtggtgtacgacgacagcgatagacctagcggcatccccgagagattcagcggcagcaattccggcaataccgccacactgaccatcagcagagtggaagctggcgacgaggccgtgtactactgccaagtgtgggacagcagcagcgatcacgtggtgtttggcggcggaacaaagctgacagtgcttggcggaggcggaagtggaggcggaggatctggcggcggaggctctcaactccagctgcaagagtctggccctggcctggtcaagcctagcgaaacactgagcctgacctgtaccgtgtctggcggctctatcagctccagcagctatttctggggctggatcagacaacctcctggcaaaggactggaatggatcggctccatctactacagcggcatcacctactacaaccccagcctgaagtccagagtgaccatctccgtggacaccagcaagaaccagttctccctgaagctgagcagcgtgacagccgccgataccgccgtgtattattgtgccagacatgacggcgctgtggccggcctgtttgattattggggacagggcaccctggtcaccgtgtcatctgctacgcgtcagagcatcaagggcaaccacctggtcaaggtgtacgactaccaagaggacggcagcgtgctgctgacatgtgatgccgaggccaagaacatcacctggtttaaggacggcaagatgatcggcttcctgaccgaggacaagaagaagtggaacctgggcagcaacgctaaggaccccagaggcatgtatcagtgcaagggcagccagaacaagagcaagcccctccaggtgtactaccggatgtgccagaactgcatcgagctgaacgccgctaccatcagcggctttctgttcgccgagatcgtgtccatcttcgtgctggccgtgggcgtgtactttatcgctggacaggatggcgtgcggcagagcagagcttccgataagcaaaccctgctgcctaacgaccagctgtaccagcctctgaaggacagagaggacgaccagtacagccacctccagggcaatcagctgagaagaaac

SEQ ID NO: 7443 - DNA, 1233 bp, Artificial Sequence
  Synthetic Polynucloetide
atggccttaccagtgaccgccttgctcctgccgctggccttgctgctccacgccgccaggccgagctacgtgctgacacagcctccatccgtgtctgtggctccaggacagaccgccagaatcacatgcggcggcaacaacatcggcagcaagagcgtgcactggtatcagcagccacctggacaggctccagtggtggtggtgtacgacgacagcgatagacctagcggcatccccgagagattcagcggcagcaattccggcaataccgccacactgaccatcagcagagtggaagctggcgacgaggccgtgtactactgccaagtgtgggacagcagcagcgatcacgtggtgtttggcggcggaacaaagctgacagtgcttggcggaggcggaagtggaggcggaggatctggcggcggaggctctcaactccagctgcaagagtctggccctggcctggtcaagcctagcgaaacactgagcctgacctgtaccgtgtctggcggctctatcagctccagcagctatttctggggctggatcagacaacctcctggcaaaggactggaatggatcggctccatctactacagcggcatcacctactacaaccccagcctgaagtccagagtgaccatctccgtggacaccagcaagaaccagttctccctgaagctgagcagcgtgacagccgccgataccgccgtgtattattgtgccagacatgacggcgctgtggccggcctgtttgattattggggacagggcaccctggtcaccgtgtcatctgctacgcgtcagagttttgggttgttggaccctaaattgtgctatctgttggacggaatcctgttcatttacggagtgatcctgaccgcattgttcctgcgggttaagttttccagatccgcagacgcacccgcttaccaacaagggcagaaccaactctacaatgaacttaatttggggcggagggaagagtacgacgttctggacaaaaggaggggacgagatcccgagatgggcggaaagcctcagcgaaggaagaatccgcaagaggggctttataacgaactccagaaagataaaatggcagaagcctatagtgagattgggatgaagggagaaaggaggaggggtaaaggtcacgatgggttgtaccaaggattgagcacagccactaaagatacctatgatgcgctccacatgcaggccctgccgccaaga

SEQ ID NO: 7444 - DNA, 1359 bp, Artificial Sequence
  Synthetic Polynucloetide
atggccttaccagtgaccgccttgctcctgccgctggccttgctgctccacgccgccaggccgcaactccagctgcaagagtctggccctggcctggtcaagcctagcgaaacactgagcctgacctgtaccgtgtctggcggctctatcagctccagcagctatttctggggctggatcagacaacctcctggcaaaggactggaatggatcggctccatctactacagcggcatcacctactacaaccccagcctgaagtccagagtgaccatctccgtggacaccagcaagaaccagttctccctgaagctgagcagcgtgacagccgccgataccgccgtgtattattgtgccagacatgacggcgctgtggccggcctgtttgattattggggacagggcaccctggtcaccgtgtcatctgctggcggaggcggaagtggaggcggaggatctggcggcggaggctctagctacgtgctgacacagcctccatccgtgtctgtggctccaggacagaccgccagaatcacatgcggcggcaacaacatcggcagcaagagcgtgcactggtatcagcagccacctggacaggctccagtggtggtggtgtacgacgacagcgatagacctagcggcatccccgagagattcagcggcagcaattccggcaataccgccacactgaccatcagcagagtggaagctggcgacgaggccgtgtactactgccaagtgtgggacagcagcagcgatcacgtggtgtttggcggcggaacaaagctgacagtgcttacgcgtgacggtaacgaggagatgggaggaatcactcaaaccccttacaaagtctcaatttcaggaacaactgttatccttacatgtccccagtatcctggcagcgagatcctttggcagcataacgacaagaatatagggggagatgaagacgataagaatatcggatctgacgaggatcacttgagcctgaaagagttctccgagcttgaacaaagcggatattatgtgtgctatccgcgcgggtcaaagccggaagacgctaacttttacctttatctccgagccagagtgtgcgaaaattgcatggaaatggacgttatgtccgttgctacaatagttatcgtagatatatgcatcacgggtggactgcttctgctggtttattattggtccaagaatagaaaggccaaagctaaacccgtgaccagaggcgctggcgcaggcggaaggcaaaggggacaaaacaaagaacggccaccaccagtgccaaatccagattatgagcctattcggaaaggacagagggacctgtactctggcctgaatcagagaagaatc

SEQ ID NO: 7445 - DNA, 1254 bp, Artificial Sequence
  Synthetic Polynucloetide
atggccttaccagtgaccgccttgctcctgccgctggccttgctgctccacgccgccaggccgcaactccagctgcaagagtctggccctggcctggtcaagcctagcgaaacactgagcctgacctgtaccgtgtctggcggctctatcagctccagcagctatttctggggctggatcagacaacctcctggcaaaggactggaatggatcggctccatctactacagcggcatcacctactacaaccccagcctgaagtccagagtgaccatctccgtggacaccagcaagaaccagttctccctgaagctgagcagcgtgacagccgccgataccgccgtgtattattgtgccagacatgacggcgctgtggccggcctgtttgattattggggacagggcaccctggtcaccgtgtcatctgctggcggaggcggaagtggaggcggaggatctggcggcggaggctctagctacgtgctgacacagcctccatccgtgtctgtggctccaggacagaccgccagaatcacatgcggcggcaacaacatcggcagcaagagcgtgcactggtatcagcagccacctggacaggctccagtggtggtggtgtacgacgacagcgatagacctagcggcatccccgagagattcagcggcagcaattccggcaataccgccacactgaccatcagcagagtggaagctggcgacgaggccgtgtactactgccaagtgtgggacagcagcagcgatcacgtggtgtttggcggcggaacaaagctgacagtgcttacgcgtttcaagatccccatcgaggaactggaagatcgggtgttcgtgaactgcaacacctctatcacctgggtggaaggcaccgtgggaacactgctgagcgacatcaccagactggacctcggcaagcggattctggaccctcggggcatctacagatgcaacggcaccgacatctacaaggacaaagaaagcaccgtgcaggtccactacagaatgtgccagtcctgcgtggaactggaccctgctacagtggccggcatcatcgtgaccgatgtgatcgctactctgctgctggctctgggagtgttctgcttcgccggacacgaaacaggcagactgtctggcgctgccgatacacaggccctgctgagaaacgaccaagtgtatcagcccctgcgcgacagagatgatgcccagtattctcacctcggcggcaactgggctagaaacaag

SEQ ID NO: 7446 - DNA, 1284 bp, Artificial Sequence
  Synthetic Polynucloetide
atggccttaccagtgaccgccttgctcctgccgctggccttgctgctccacgccgccaggccgcaactccagctgcaagagtctggccctggcctggtcaagcctagcgaaacactgagcctgacctgtaccgtgtctggcggctctatcagctccagcagctatttctggggctggatcagacaacctcctggcaaaggactggaatggatcggctccatctactacagcggcatcacctactacaaccccagcctgaagtccagagtgaccatctccgtggacaccagcaagaaccagttctccctgaagctgagcagcgtgacagccgccgataccgccgtgtattattgtgccagacatgacggcgctgtggccggcctgtttgattattggggacagggcaccctggtcaccgtgtcatctgctggcggaggcggaagtggaggcggaggatctggcggcggaggctctagctacgtgctgacacagcctccatccgtgtctgtggctccaggacagaccgccagaatcacatgcggcggcaacaacatcggcagcaagagcgtgcactggtatcagcagccacctggacaggctccagtggtggtggtgtacgacgacagcgatagacctagcggcatccccgagagattcagcggcagcaattccggcaataccgccacactgaccatcagcagagtggaagctggcgacgaggccgtgtactactgccaagtgtgggacagcagcagcgatcacgtggtgtttggcggcggaacaaagctgacagtgcttacgcgtcagagcatcaagggcaaccacctggtcaaggtgtacgactaccaagaggacggcagcgtgctgctgacatgtgatgccgaggccaagaacatcacctggtttaaggacggcaagatgatcggcttcctgaccgaggacaagaagaagtggaacctgggcagcaacgctaaggaccccagaggcatgtatcagtgcaagggcagccagaacaagagcaagcccctccaggtgtactaccggatgtgccagaactgcatcgagctgaacgccgctaccatcagcggctttctgttcgccgagatcgtgtccatcttcgtgctggccgtgggcgtgtactttatcgctggacaggatggcgtgcggcagagcagagcttccgataagcaaaccctgctgcctaacgaccagctgtaccagcctctgaaggacagagaggacgaccagtacagccacctccagggcaatcagctgagaagaaac

SEQ ID NO: 7447 - DNA, 1233 bp, Artificial Sequence
  Synthetic Polynucloetide
atggccttaccagtgaccgccttgctcctgccgctggccttgctgctccacgccgccaggccgcaactccagctgcaagagtctggccctggcctggtcaagcctagcgaaacactgagcctgacctgtaccgtgtctggcggctctatcagctccagcagctatttctggggctggatcagacaacctcctggcaaaggactggaatggatcggctccatctactacagcggcatcacctactacaaccccagcctgaagtccagagtgaccatctccgtggacaccagcaagaaccagttctccctgaagctgagcagcgtgacagccgccgataccgccgtgtattattgtgccagacatgacggcgctgtggccggcctgtttgattattggggacagggcaccctggtcaccgtgtcatctgctggcggaggcggaagtggaggcggaggatctggcggcggaggctctagctacgtgctgacacagcctccatccgtgtctgtggctccaggacagaccgccagaatcacatgcggcggcaacaacatcggcagcaagagcgtgcactggtatcagcagccacctggacaggctccagtggtggtggtgtacgacgacagcgatagacctagcggcatccccgagagattcagcggcagcaattccggcaataccgccacactgaccatcagcagagtggaagctggcgacgaggccgtgtactactgccaagtgtgggacagcagcagcgatcacgtggtgtttggcggcggaacaaagctgacagtgcttacgcgtcagagttttgggttgttggaccctaaattgtgctatctgttggacggaatcctgttcatttacggagtgatcctgaccgcattgttcctgcgggttaagttttccagatccgcagacgcacccgcttaccaacaagggcagaaccaactctacaatgaacttaatttggggcggagggaagagtacgacgttctggacaaaaggaggggacgagatcccgagatgggcggaaagcctcagcgaaggaagaatccgcaagaggggctttataacgaactccagaaagataaaatggcagaagcctatagtgagattgggatgaagggagaaaggaggaggggtaaaggtcacgatgggttgtaccaaggattgagcacagccactaaagatacctatgatgcgctccacatgcaggccctgccgccaaga

SEQ ID NO: 7448 - DNA, 1935 bp, Artificial Sequence
  Synthetic Polynucloetide
atggccttaccagtgaccgccttgctcctgccgctggccttgctgctccacgccgccaggccgagctacgtgctgacacagcctccatccgtgtctgtggctccaggacagaccgccagaatcacatgcggcggcaacaacatcggcagcaagagcgtgcactggtatcagcagccacctggacaggctccagtggtggtggtgtacgacgacagcgatagacctagcggcatccccgagagattcagcggcagcaattccggcaataccgccacactgaccatcagcagagtggaagctggcgacgaggccgtgtactactgccaagtgtgggacagcagcagcgatcacgtggtgtttggcggcggaacaaagctgacagtgcttggcggaggcggaagtggaggcggaggatctggcggcggaggctctcaactccagctgcaagagtctggccctggcctggtcaagcctagcgaaacactgagcctgacctgtaccgtgtctggcggctctatcagctccagcagctatttctggggctggatcagacaacctcctggcaaaggactggaatggatcggctccatctactacagcggcatcacctactacaaccccagcctgaagtccagagtgaccatctccgtggacaccagcaagaaccagttctccctgaagctgagcagcgtgacagccgccgataccgccgtgtattattgtgccagacatgacggcgctgtggccggcctgtttgattattggggacagggcaccctggtcaccgtgtcatctgctacgcgtgggagcggcatccagaaccctgatcctgccgtgtaccagctgcgggatagcaagagcagcgacaagagcgtgtgtctgttcaccgacttcgacagccagaccaacgtgtcccagagcaaggactccgacgtgtacatcaccgataagaccgtgctggacatgcggagcatggacttcaagagcaactccgccgtggcctggtccaacaagtccgatttcgcctgcgccaacgccttcaacaacagcattatccccgaggacacattcttcccaagccccgagagcagctgcgacgtgaagctggtggaaaagagcttcgagacagacaccaacctgaacttccagaacctgagcgtgatcggcttcagaatcctgctgctgaaagtggccggctttaacctgctgatgaccctgcggctgtggtccagccgcgccaagagaagcggatctggcgtgaagcagaccctgaatttcgacctgctgaagctggctggcgacgtggaatccaacccaggcccttctagaggccatatgaccgagtacaagcccacggtgcgcctcgccacccgcgacgacgtccccagggccgtacgcaccctcgccgccgcgttcgccgactaccccgccacgcgccacaccgtcgatccggaccgccacatcgagcgggtcaccgagctgcaagaactcttcctcacgcgcgtcgggctcgacatcggcaaggtgtgggtcgcggacgacggcgccgcggtggcggtctggaccacgccggagagcgtcgaagcgggggcggtgttcgccgagatcggcccgcgcatggccgagttgagcggttcccggctggccgcgcagcaacagatggaaggcctcctggcgccgcaccggcccaaggagcccgcgtggttcctggccaccgtcggcgtctcgcccgaccaccagggcaagggtctgggcagcgccgtcgtgctccccggagtggaggcggccgagcgcgccggggtgcccgccttcctggagacctccgcgccccgcaacctccccttctacgagcggctcggcttcaccgtcaccgccgacgtcgaggtgcccgaaggaccgcgcacctggtgcatgacccgcaagcccggtgcctga

SEQ ID NO: 7449 - DNA, 2031 bp, Artificial Sequence
  Synthetic Polynucloetide
atggccttaccagtgaccgccttgctcctgccgctggccttgctgctccacgccgccaggccgagctacgtgctgacacagcctccatccgtgtctgtggctccaggacagaccgccagaatcacatgcggcggcaacaacatcggcagcaagagcgtgcactggtatcagcagccacctggacaggctccagtggtggtggtgtacgacgacagcgatagacctagcggcatccccgagagattcagcggcagcaattccggcaataccgccacactgaccatcagcagagtggaagctggcgacgaggccgtgtactactgccaagtgtgggacagcagcagcgatcacgtggtgtttggcggcggaacaaagctgacagtgcttggcggaggcggaagtggaggcggaggatctggcggcggaggctctcaactccagctgcaagagtctggccctggcctggtcaagcctagcgaaacactgagcctgacctgtaccgtgtctggcggctctatcagctccagcagctatttctggggctggatcagacaacctcctggcaaaggactggaatggatcggctccatctactacagcggcatcacctactacaaccccagcctgaagtccagagtgaccatctccgtggacaccagcaagaaccagttctccctgaagctgagcagcgtgacagccgccgataccgccgtgtattattgtgccagacatgacggcgctgtggccggcctgtttgattattggggacagggcaccctggtcaccgtgtcatctgctctcgaggacctgaagaacgtgttcccacctgaggtggccgtgttcgagcctagcgaggccgagatcagccacacccagaaagccaccctcgtgtgcctggctaccggcttctaccccgaccatgtggaactgtcttggtgggtcaacggcaaagaggtgcacagcggcgtgtctaccgacccccagccactgaaagaacagcccgccctgaacgacagccggtactgcctgagcagcagactgagagtgtccgccaccttctggcagaacccccggaaccacttcagatgccaggtgcagttctacggcctgagcgagaacgacgagtggacccaggacagagccaagcccgtgacccagatcgtgtctgccgaagcctggggcagagccgattgcggctttaccagcgagagctaccagcagggcgtgctgagcgccaccatcctgtacgagatcctgctgggcaaggccaccctgtacgccgtgctggtgtctgccctggtgctgatggctatggtcaagcggaaggacagccggggaagggccaagcgatctggatctggagcaacaaacttctcactactcaaacaagcaggtgacgtggaggagaatcccgggcctactagaggccatatgaccgagtacaagcccacggtgcgcctcgccacccgcgacgacgtccccagggccgtacgcaccctcgccgccgcgttcgccgactaccccgccacgcgccacaccgtcgatccggaccgccacatcgagcgggtcaccgagctgcaagaactcttcctcacgcgcgtcgggctcgacatcggcaaggtgtgggtcgcggacgacggcgccgcggtggcggtctggaccacgccggagagcgtcgaagcgggggcggtgttcgccgagatcggcccgcgcatggccgagttgagcggttcccggctggccgcgcagcaacagatggaaggcctcctggcgccgcaccggcccaaggagcccgcgtggttcctggccaccgtcggcgtctcgcccgaccaccagggcaagggtctgggcagcgccgtcgtgctccccggagtggaggcggccgagcgcgccggggtgcccgccttcctggagacctccgcgccccgcaacctccccttctacgagcggctcggcttcaccgtcaccgccgacgtcgaggtgcccgaaggaccgcgcacctggtgcatgacccgcaagcccggtgcctga

SEQ ID NO: 7450 - DNA, 2181 bp, Artificial Sequence
  Synthetic Polynucloetide
atggccttaccagtgaccgccttgctcctgccgctggccttgctgctccacgccgccaggccgagctacgtgctgacacagcctccatccgtgtctgtggctccaggacagaccgccagaatcacatgcggcggcaacaacatcggcagcaagagcgtgcactggtatcagcagccacctggacaggctccagtggtggtggtgtacgacgacagcgatagacctagcggcatccccgagagattcagcggcagcaattccggcaataccgccacactgaccatcagcagagtggaagctggcgacgaggccgtgtactactgccaagtgtgggacagcagcagcgatcacgtggtgtttggcggcggaacaaagctgacagtgcttggcggaggcggaagtggaggcggaggatctggcggcggaggctctcaactccagctgcaagagtctggccctggcctggtcaagcctagcgaaacactgagcctgacctgtaccgtgtctggcggctctatcagctccagcagctatttctggggctggatcagacaacctcctggcaaaggactggaatggatcggctccatctactacagcggcatcacctactacaaccccagcctgaagtccagagtgaccatctccgtggacaccagcaagaaccagttctccctgaagctgagcagcgtgacagccgccgataccgccgtgtattattgtgccagacatgacggcgctgtggccggcctgtttgattattggggacagggcaccctggtcaccgtgtcatctgctacgcgtgagcagaaactgatctcggaagaggatctggggagcggcaccccattcccttctctggcccctcccatcatgctgctggtggacggcaagcagcagatggtggtcgtgtgcctggtgctggatgtggccccacctggactggacagccccatctggtttagcgccggcaatggctctgccctggacgcctttacctacggcccaagccctgccaccgatggcacctggacaaatctggcccacctgagcctgcccagcgaggaactggcttcttgggagcctctcgtgtgccacacaggacctggcgctgagggacacagcagatccacccagcctatgcacctgtctggcgaggccagcaccgccagaacctgtcctcaggaacctctgagaggcacccctggcggagcactgtggctgggagtgctgagactgctgctgttcaagctgctgctgtttgacctgctgctgacctgctcctgtctgtgcgatcctgccggccctctgccttctcctgccaccaccacaagactgagagccctgggcagccacagactgcaccctgccacagagacaggcggcagagaggccacaagcagccctagaccccagcccagagacagaagatggggcgataccccccctggcagaaagcctggatctccagtccgcgccaagagaagcggatctggcgtgaagcagaccctgaatttcgacctgctgaagctggctggcgacgtggaatccaacccaggcccttctagatctagaggccatatgaccgagtacaagcccacggtgcgcctcgccacccgcgacgacgtccccagggccgtacgcaccctcgccgccgcgttcgccgactaccccgccacgcgccacaccgtcgatccggaccgccacatcgagcgggtcaccgagctgcaagaactcttcctcacgcgcgtcgggctcgacatcggcaaggtgtgggtcgcggacgacggcgccgcggtggcggtctggaccacgccggagagcgtcgaagcgggggcggtgttcgccgagatcggcccgcgcatggccgagttgagcggttcccggctggccgcgcagcaacagatggaaggcctcctggcgccgcaccggcccaaggagcccgcgtggttcctggccaccgtcggcgtctcgcccgaccaccagggcaagggtctgggcagcgccgtcgtgctccccggagtggaggcggccgagcgcgccggggtgcccgccttcctggagacctccgcgccccgcaacctccccttctacgagcggctcggcttcaccgtcaccgccgacgtcgaggtgcccgaaggaccgcgcacctggtgcatgacccgcaagcccggtgcctga

SEQ ID NO: 7451 - DNA, 1620 bp, Artificial Sequence
  Synthetic Polynucloetide
atggccttaccagtgaccgccttgctcctgccgctggccttgctgctccacgccgccaggccgagctacgtgctgacacagcctccatccgtgtctgtggctccaggacagaccgccagaatcacatgcggcggcaacaacatcggcagcaagagcgtgcactggtatcagcagccacctggacaggctccagtggtggtggtgtacgacgacagcgatagacctagcggcatccccgagagattcagcggcagcaattccggcaataccgccacactgaccatcagcagagtggaagctggcgacgaggccgtgtactactgccaagtgtgggacagcagcagcgatcacgtggtgtttggcggcggaacaaagctgacagtgcttctcgaggacctgaagaacgtgttcccacctgaggtggccgtgttcgagcctagcgaggccgagatcagccacacccagaaagccaccctcgtgtgcctggctaccggcttctaccccgaccatgtggaactgtcttggtgggtcaacggcaaagaggtgcacagcggcgtgtctaccgacccccagccactgaaagaacagcccgccctgaacgacagccggtactgcctgagcagcagactgagagtgtccgccaccttctggcagaacccccggaaccacttcagatgccaggtgcagttctacggcctgagcgagaacgacgagtggacccaggacagagccaagcccgtgacccagatcgtgtctgccgaagcctggggcagagccgattgcggctttaccagcgagagctaccagcagggcgtgctgagcgccaccatcctgtacgagatcctgctgggcaaggccaccctgtacgccgtgctggtgtctgccctggtgctgatggctatggtcaagcggaaggacagccggggaagggccaagcgatctggatctggagcaacaaacttctcactactcaaacaagcaggtgacgtggaggagaatcccgggcctactagaggccatatgaccgagtacaagcccacggtgcgcctcgccacccgcgacgacgtccccagggccgtacgcaccctcgccgccgcgttcgccgactaccccgccacgcgccacaccgtcgatccggaccgccacatcgagcgggtcaccgagctgcaagaactcttcctcacgcgcgtcgggctcgacatcggcaaggtgtgggtcgcggacgacggcgccgcggtggcggtctggaccacgccggagagcgtcgaagcgggggcggtgttcgccgagatcggcccgcgcatggccgagttgagcggttcccggctggccgcgcagcaacagatggaaggcctcctggcgccgcaccggcccaaggagcccgcgtggttcctggccaccgtcggcgtctcgcccgaccaccagggcaagggtctgggcagcgccgtcgtgctccccggagtggaggcggccgagcgcgccggggtgcccgccttcctggagacctccgcgccccgcaacctccccttctacgagcggctcggcttcaccgtcaccgccgacgtcgaggtgcccgaaggaccgcgcacctggtgcatgacccgcaagcccggtgcctga

SEQ ID NO: 7452 - DNA, 927 bp, Artificial Sequence
  Synthetic Polynucloetide
atggccttaccagtgaccgccttgctcctgccgctggccttgctgctccacgccgccaggccgagctacgtgctgacacagcctccatccgtgtctgtggctccaggacagaccgccagaatcacatgcggcggcaacaacatcggcagcaagagcgtgcactggtatcagcagccacctggacaggctccagtggtggtggtgtacgacgacagcgatagacctagcggcatccccgagagattcagcggcagcaattccggcaataccgccacactgaccatcagcagagtggaagctggcgacgaggccgtgtactactgccaagtgtgggacagcagcagcgatcacgtggtgtttggcggcggaacaaagctgacagtgcttctcgaggacctgaagaacgtgttcccacctgaggtggccgtgttcgagcctagcgaggccgagatcagccacacccagaaagccaccctcgtgtgcctggctaccggcttctaccccgaccatgtggaactgtcttggtgggtcaacggcaaagaggtgcacagcggcgtgtctaccgacccccagccactgaaagaacagcccgccctgaacgacagccggtactgcctgagcagcagactgagagtgtccgccaccttctggcagaacccccggaaccacttcagatgccaggtgcagttctacggcctgagcgagaacgacgagtggacccaggacagagccaagcccgtgacccagatcgtgtctgccgaagcctggggcagagccgattgcggctttaccagcgagagctaccagcagggcgtgctgagcgccaccatcctgtacgagatcctgctgggcaaggccaccctgtacgccgtgctggtgtctgccctggtgctgatggctatggtcaagcggaaggacagccgggga

SEQ ID NO: 7453 - DNA, 1356 bp, Artificial Sequence
  Synthetic Polynucloetide
atggactggatttggcgcatccttttccttgtcggcgctgctaccggcgcgcattccttcgaacaactccagctgcaagagtctggccctggcctggtcaagcctagcgaaacactgagcctgacctgtaccgtgtctggcggctctatcagctccagcagctatttctggggctggatcagacaacctcctggcaaaggactggaatggatcggctccatctactacagcggcatcacctactacaaccccagcctgaagtccagagtgaccatctccgtggacaccagcaagaaccagttctccctgaagctgagcagcgtgacagccgccgataccgccgtgtattattgtgccagacatgacggcgctgtggccggcctgtttgattattggggacagggcaccctggtcaccgtgtcatctgctacgcgtatccagaaccctgatcctgccgtgtaccagctgcgggatagcaagagcagcgacaagagcgtgtgtctgttcaccgacttcgacagccagaccaacgtgtcccagagcaaggactccgacgtgtacatcaccgataagaccgtgctggacatgcggagcatggacttcaagagcaactccgccgtggcctggtccaacaagtccgatttcgcctgcgccaacgccttcaacaacagcattatccccgaggacacattcttcccaagccccgagagcagctgcgacgtgaagctggtggaaaagagcttcgagacagacaccaacctgaacttccagaacctgagcgtgatcggcttcagaatcctgctgctgaaagtggccggctttaacctgctgatgaccctgcggctgtggtccagccgcgccaagagaagcggatctggcgtgaagcagaccctgaatttcgacctgctgaagctggctggcgacgtggaatccaacccaggcccttctagaggccatatggccaagcctttgtctcaagaagaatccaccctcattgaaagagcaacggctacaatcaacagcatccccatctctgaagactacagcgtcgccagcgcagctctctctagcgacggccgcatcttcactggtgtcaatgtatatcattttactgggggaccttgtgcagaactcgtggtgctgggcactgctgctgctgcggcagctggcaacctgacttgtatcgtcgcgatcggaaatgagaacaggggcatcttgagcccctgcggacggtgccgacaggtgcttctcgatctgcatcctgggatcaaagccatagtgaaggacagtgatggacagccgacggcagttgggattcgtgaattgctgccctctggttatgtgtgggagggctga

SEQ ID NO: 7454 - DNA, 855 bp, Artificial Sequence
  Synthetic Polynucloetide
atggactggatttggcgcatccttttccttgtcggcgctgctaccggcgcgcattccttcgaacaactccagctgcaagagtctggccctggcctggtcaagcctagcgaaacactgagcctgacctgtaccgtgtctggcggctctatcagctccagcagctatttctggggctggatcagacaacctcctggcaaaggactggaatggatcggctccatctactacagcggcatcacctactacaaccccagcctgaagtccagagtgaccatctccgtggacaccagcaagaaccagttctccctgaagctgagcagcgtgacagccgccgataccgccgtgtattattgtgccagacatgacggcgctgtggccggcctgtttgattattggggacagggcaccctggtcaccgtgtcatctgctacgcgtatccagaaccctgatcctgccgtgtaccagctgcgggatagcaagagcagcgacaagagcgtgtgtctgttcaccgacttcgacagccagaccaacgtgtcccagagcaaggactccgacgtgtacatcaccgataagaccgtgctggacatgcggagcatggacttcaagagcaactccgccgtggcctggtccaacaagtccgatttcgcctgcgccaacgccttcaacaacagcattatccccgaggacacattcttcccaagccccgagagcagctgcgacgtgaagctggtggaaaagagcttcgagacagacaccaacctgaacttccagaacctgagcgtgatcggcttcagaatcctgctgctgaaagtggccggctttaacctgctgatgaccctgcggctgtggtccagc

SEQ ID NO: 7455 - DNA, 1674 bp, Artificial Sequence
  Synthetic Polynucloetide
atggccttaccagtgaccgccttgctcctgccgctggccttgctgctccacgccgccaggccgagctacgtgctgacacagcctccatccgtgtctgtggctccaggacagaccgccagaatcacatgcggcggcaacaacatcggcagcaagagcgtgcactggtatcagcagccacctggacaggctccagtggtggtggtgtacgacgacagcgatagacctagcggcatccccgagagattcagcggcagcaattccggcaataccgccacactgaccatcagcagagtggaagctggcgacgaggccgtgtactactgccaagtgtgggacagcagcagcgatcacgtggtgtttggcggcggaacaaagctgacagtgcttctcgaggggaaaccaattcccaaccctcttctgggactggattcaaccggcagcggcgaggacctgaagaacgtgttcccacctgaggtggccgtgttcgagcctagcgaggccgagatcagccacacccagaaagccaccctcgtgtgcctggctaccggcttctaccccgaccatgtggaactgtcttggtgggtcaacggcaaagaggtgcacagcggcgtgtgtaccgacccccagccactgaaagaacagcccgccctgaacgacagccggtactgcctgagcagcagactgagagtgtccgccaccttctggcagaacccccggaaccacttcagatgccaggtgcagttctacggcctgagcgagaacgacgagtggacccaggacagagccaagcccgtgacccagatcgtgtctgccgaagcctggggcagagccgattgcggctttaccagcgagagctaccagcagggcgtgctgagcgccaccatcctgtacgagatcctgctgggcaaggccaccctgtacgccgtgctggtgtctgccctggtgctgatggctatggtcaagcggaaggacagccggggaagggccaagcgatctggatctggagcaacaaacttctcactactcaaacaagcaggtgacgtggaggagaatcccgggcctactagaggccatatgaccgagtacaagcccacggtgcgcctcgccacccgcgacgacgtccccagggccgtacgcaccctcgccgccgcgttcgccgactaccccgccacgcgccacaccgtcgatccggaccgccacatcgagcgggtcaccgagctgcaagaactcttcctcacgcgcgtcgggctcgacatcggcaaggtgtgggtcgcggacgacggcgccgcggtggcggtctggaccacgccggagagcgtcgaagcgggggcggtgttcgccgagatcggcccgcgcatggccgagttgagcggttcccggctggccgcgcagcaacagatggaaggcctcctggcgccgcaccggcccaaggagcccgcgtggttcctggccaccgtcggcgtctcgcccgaccaccagggcaagggtctgggcagcgccgtcgtgctccccggagtggaggcggccgagcgcgccggggtgcccgccttcctggagacctccgcgccccgcaacctccccttctacgagcggctcggcttcaccgtcaccgccgacgtcgaggtgcccgaaggaccgcgcacctggtgcatgacccgcaagcccggtgcctga

SEQ ID NO: 7456 - DNA, 984 bp, Artificial Sequence
  Synthetic Polynucloetide
atggccttaccagtgaccgccttgctcctgccgctggccttgctgctccacgccgccaggccgagctacgtgctgacacagcctccatccgtgtctgtggctccaggacagaccgccagaatcacatgcggcggcaacaacatcggcagcaagagcgtgcactggtatcagcagccacctggacaggctccagtggtggtggtgtacgacgacagcgatagacctagcggcatccccgagagattcagcggcagcaattccggcaataccgccacactgaccatcagcagagtggaagctggcgacgaggccgtgtactactgccaagtgtgggacagcagcagcgatcacgtggtgtttggcggcggaacaaagctgacagtgcttctcgaggggaaaccaattcccaaccctcttctgggactggattcaaccggcagcggcgaggacctgaagaacgtgttcccacctgaggtggccgtgttcgagcctagcgaggccgagatcagccacacccagaaagccaccctcgtgtgcctggctaccggcttctaccccgaccatgtggaactgtcttggtgggtcaacggcaaagaggtgcacagcggcgtgtgtaccgacccccagccactgaaagaacagcccgccctgaacgacagccggtactgcctgagcagcagactgagagtgtccgccaccttctggcagaacccccggaaccacttcagatgccaggtgcagttctacggcctgagcgagaacgacgagtggacccaggacagagccaagcccgtgacccagatcgtgtctgccgaagcctggggcagagccgattgcggctttaccagcgagagctaccagcagggcgtgctgagcgccaccatcctgtacgagatcctgctgggcaaggccaccctgtacgccgtgctggtgtctgccctggtgctgatggctatggtcaagcggaaggacagccggggatga

SEQ ID NO: 7457 - DNA, 1392 bp, Artificial Sequence
  Synthetic Polynucloetide
atggactggatttggcgcatccttttccttgtcggcgctgctaccggcgcgcattccttcgaacaactccagctgcaagagtctggccctggcctggtcaagcctagcgaaacactgagcctgacctgtaccgtgtctggcggctctatcagctccagcagctatttctggggctggatcagacaacctcctggcaaaggactggaatggatcggctccatctactacagcggcatcacctactacaaccccagcctgaagtccagagtgaccatctccgtggacaccagcaagaaccagttctccctgaagctgagcagcgtgacagccgccgataccgccgtgtattattgtgccagacatgacggcgctgtggccggcctgtttgattattggggacagggcaccctggtcaccgtgtcatctgctacgcgtgagcagaaactgatctcggaagaggatgggagcggcatccagaaccctgatcctgccgtgtaccagctgcgggatagcaagagcagcgacaagagcgtgtgtctgttcaccgacttcgacagccagaccaacgtgtcccagagcaaggactccgacgtgtacatcaccgataagtgcgtgctggacatgcggagcatggacttcaagagcaactccgccgtggcctggtccaacaagtccgatttcgcctgcgccaacgccttcaacaacagcattatccccgaggacacattcttcccaagccccgagagcagctgcgacgtgaagctggtggaaaagagcttcgagacagacaccaacctgaacttccagaacctgagcgtgatcggcttcagaatcctgctgctgaaagtggccggctttaacctgctgatgaccctgcggctgtggtccagccgcgccaagagaagcggatctggcgtgaagcagaccctgaatttcgacctgctgaagctggctggcgacgtggaatccaacccaggcccttctagaggccatatggccaagcctttgtctcaagaagaatccaccctcattgaaagagcaacggctacaatcaacagcatccccatctctgaagactacagcgtcgccagcgcagctctctctagcgacggccgcatcttcactggtgtcaatgtatatcattttactgggggaccttgtgcagaactcgtggtgctgggcactgctgctgctgcggcagctggcaacctgacttgtatcgtcgcgatcggaaatgagaacaggggcatcttgagcccctgcggacggtgccgacaggtgcttctcgatctgcatcctgggatcaaagccatagtgaaggacagtgatggacagccgacggcagttgggattcgtgaattgctgccctctggttatgtgtgggagggctga

SEQ ID NO: 7458 - DNA, 894 bp, Artificial Sequence
  Synthetic Polynucloetide
atggactggatttggcgcatccttttccttgtcggcgctgctaccggcgcgcattccttcgaacaactccagctgcaagagtctggccctggcctggtcaagcctagcgaaacactgagcctgacctgtaccgtgtctggcggctctatcagctccagcagctatttctggggctggatcagacaacctcctggcaaaggactggaatggatcggctccatctactacagcggcatcacctactacaaccccagcctgaagtccagagtgaccatctccgtggacaccagcaagaaccagttctccctgaagctgagcagcgtgacagccgccgataccgccgtgtattattgtgccagacatgacggcgctgtggccggcctgtttgattattggggacagggcaccctggtcaccgtgtcatctgctacgcgtgagcagaaactgatctcggaagaggatgggagcggcatccagaaccctgatcctgccgtgtaccagctgcgggatagcaagagcagcgacaagagcgtgtgtctgttcaccgacttcgacagccagaccaacgtgtcccagagcaaggactccgacgtgtacatcaccgataagtgcgtgctggacatgcggagcatggacttcaagagcaactccgccgtggcctggtccaacaagtccgatttcgcctgcgccaacgccttcaacaacagcattatccccgaggacacattcttcccaagccccgagagcagctgcgacgtgaagctggtggaaaagagcttcgagacagacaccaacctgaacttccagaacctgagcgtgatcggcttcagaatcctgctgctgaaagtggccggctttaacctgctgatgaccctgcggctgtggtccagctga

SEQ ID NO: 7459 - DNA, 1935 bp, Artificial Sequence
  Synthetic Polynucloetide
atggccttaccagtgaccgccttgctcctgccgctggccttgctgctccacgccgccaggccgagctacgtgctgacacagcctccatccgtgtctgtggctccaggacagaccgccagaatcacatgcggcggcaacaacatcggcagcaagagcgtgcactggtatcagcagccacctggacaggctccagtggtggtggtgtacgacgacagcgatagacctagcggcatccccgagagattcagcggcagcaattccggcaataccgccacactgaccatcagcagagtggaagctggcgacgaggccgtgtactactgccaagtgtgggacagcagcagcgatcacgtggtgtttggcggcggaacaaagctgacagtgcttggcggaggcggaagtggaggcggaggatctggcggcggaggctctcaactccagctgcaagagtctggccctggcctggtcaagcctagcgaaacactgagcctgacctgtaccgtgtctggcggctctatcagctccagcagctatttctggggctggatcagacaacctcctggcaaaggactggaatggatcggctccatctactacagcggcatcacctactacaaccccagcctgaagtccagagtgaccatctccgtggacaccagcaagaaccagttctccctgaagctgagcagcgtgacagccgccgataccgccgtgtattattgtgccagacatgacggcgctgtggccggcctgtttgattattggggacagggcaccctggtcaccgtgtcatctgctacgcgtgggagcggcatccagaaccctgatcctgccgtgtaccagctgcgggatagcaagagcagcgacaagagcgtgtgtctgttcaccgacttcgacagccagaccaacgtgtcccagagcaaggactccgacgtgtacatcaccgataagaccgtgctggacatgcggagcatggacttcaagagcaactccgccgtggcctggtccaacaagtccgatttcgcctgcgccaacgccttcaacaacagcattatccccgaggacacattcttcccaagcagcgacgtgccctgcgacgtgaagctggtggaaaagagcttcgagacagacaccaacctgaacttccagaacctgagcgtgatcggcttcagaatcctgctgctgaaagtggccggctttaacctgctgatgaccctgcggctgtggtccagccgcgccaagagaagcggatctggcgtgaagcagaccctgaatttcgacctgctgaagctggctggcgacgtggaatccaacccaggcccttctagaggccatatgaccgagtacaagcccacggtgcgcctcgccacccgcgacgacgtccccagggccgtacgcaccctcgccgccgcgttcgccgactaccccgccacgcgccacaccgtcgatccggaccgccacatcgagcgggtcaccgagctgcaagaactcttcctcacgcgcgtcgggctcgacatcggcaaggtgtgggtcgcggacgacggcgccgcggtggcggtctggaccacgccggagagcgtcgaagcgggggcggtgttcgccgagatcggcccgcgcatggccgagttgagcggttcccggctggccgcgcagcaacagatggaaggcctcctggcgccgcaccggcccaaggagcccgcgtggttcctggccaccgtcggcgtctcgcccgaccaccagggcaagggtctgggcagcgccgtcgtgctccccggagtggaggcggccgagcgcgccggggtgcccgccttcctggagacctccgcgccccgcaacctccccttctacgagcggctcggcttcaccgtcaccgccgacgtcgaggtgcccgaaggaccgcgcacctggtgcatgacccgcaagcccggtgcctga

SEQ ID NO: 7460 - DNA, 2031 bp, Artificial Sequence
  Synthetic Polynucloetide
atggccttaccagtgaccgccttgctcctgccgctggccttgctgctccacgccgccaggccgagctacgtgctgacacagcctccatccgtgtctgtggctccaggacagaccgccagaatcacatgcggcggcaacaacatcggcagcaagagcgtgcactggtatcagcagccacctggacaggctccagtggtggtggtgtacgacgacagcgatagacctagcggcatccccgagagattcagcggcagcaattccggcaataccgccacactgaccatcagcagagtggaagctggcgacgaggccgtgtactactgccaagtgtgggacagcagcagcgatcacgtggtgtttggcggcggaacaaagctgacagtgcttggcggaggcggaagtggaggcggaggatctggcggcggaggctctcaactccagctgcaagagtctggccctggcctggtcaagcctagcgaaacactgagcctgacctgtaccgtgtctggcggctctatcagctccagcagctatttctggggctggatcagacaacctcctggcaaaggactggaatggatcggctccatctactacagcggcatcacctactacaaccccagcctgaagtccagagtgaccatctccgtggacaccagcaagaaccagttctccctgaagctgagcagcgtgacagccgccgataccgccgtgtattattgtgccagacatgacggcgctgtggccggcctgtttgattattggggacagggcaccctggtcaccgtgtcatctgctctcgaggacctgaagaacgtgttcccacctgaggtggccgtgttcgagcctagcaaggccgagatcgcccacacccagaaagccaccctcgtgtgcctggctaccggcttctaccccgaccatgtggaactgtcttggtgggtcaacggcaaagaggtgcacagcggcgtgtctaccgacccccagccactgaaagaacagcccgccctgaacgacagccggtactgcctgagcagcagactgagagtgtccgccaccttctggcagaacccccggaaccacttcagatgccaggtgcagttctacggcctgagcgagaacgacgagtggacccaggacagagccaagcccgtgacccagatcgtgtctgccgaagcctggggcagagccgattgcggcatcaccagcgccagctaccaccagggcgtgctgagcgccaccatcctgtacgagatcctgctgggcaaggccaccctgtacgccgtgctggtgtctgccctggtgctgatggctatggtcaagcggaaggacagccggggaagggccaagcgatctggatctggagcaacaaacttctcactactcaaacaagcaggtgacgtggaggagaatcccgggcctactagaggccatatgaccgagtacaagcccacggtgcgcctcgccacccgcgacgacgtccccagggccgtacgcaccctcgccgccgcgttcgccgactaccccgccacgcgccacaccgtcgatccggaccgccacatcgagcgggtcaccgagctgcaagaactcttcctcacgcgcgtcgggctcgacatcggcaaggtgtgggtcgcggacgacggcgccgcggtggcggtctggaccacgccggagagcgtcgaagcgggggcggtgttcgccgagatcggcccgcgcatggccgagttgagcggttcccggctggccgcgcagcaacagatggaaggcctcctggcgccgcaccggcccaaggagcccgcgtggttcctggccaccgtcggcgtctcgcccgaccaccagggcaagggtctgggcagcgccgtcgtgctccccggagtggaggcggccgagcgcgccggggtgcccgccttcctggagacctccgcgccccgcaacctccccttctacgagcggctcggcttcaccgtcaccgccgacgtcgaggtgcccgaaggaccgcgcacctggtgcatgacccgcaagcccggtgcctga

SEQ ID NO: 7461 - DNA, 2100 bp, Artificial Sequence
  Synthetic Polynucloetide
atggccttaccagtgaccgccttgctcctgccgctggccttgctgctccacgccgccaggccgagctacgtgctgacacagcctccatccgtgtctgtggctccaggacagaccgccagaatcacatgcggcggcaacaacatcggcagcaagagcgtgcactggtatcagcagccacctggacaggctccagtggtggtggtgtacgacgacagcgatagacctagcggcatccccgagagattcagcggcagcaattccggcaataccgccacactgaccatcagcagagtggaagctggcgacgaggccgtgtactactgccaagtgtgggacagcagcagcgatcacgtggtgtttggcggcggaacaaagctgacagtgcttggcggaggcggaagtggaggcggaggatctggcggcggaggctctcaactccagctgcaagagtctggccctggcctggtcaagcctagcgaaacactgagcctgacctgtaccgtgtctggcggctctatcagctccagcagctatttctggggctggatcagacaacctcctggcaaaggactggaatggatcggctccatctactacagcggcatcacctactacaaccccagcctgaagtccagagtgaccatctccgtggacaccagcaagaaccagttctccctgaagctgagcagcgtgacagccgccgataccgccgtgtattattgtgccagacatgacggcgctgtggccggcctgtttgattattggggacagggcaccctggtcaccgtgtcatctgctacgcgtgggtctggaggcggaggcagcggcggaggcgggagcggcgacggtaacgaggagatgggaggaatcactcaaaccccttacaaagtctcaatttcaggaacaactgttatccttacatgtccccagtatcctggcagcgagatcctttggcagcataacgacaagaatatagggggagatgaagacgataagaatatcggatctgacgaggatcacttgagcctgaaagagttctccgagcttgaacaaagcggatattatgtgtgctatccgcgcgggtcaaagccggaagacgctaacttttacctttatctccgagccagagtgtgcgaaaattgcatggaaatggacgttatgtccgttgctacaatagttatcgtagatatatgcatcacgggtggactgcttctgctggtttattattggtccaagaatagaaaggccaaagctaaacccgtgaccagaggcgctggcgcaggcggaaggcaaaggggacaaaacaaagaacggccaccaccagtgccaaatccagattatgagcctattcggaaaggacagagggacctgtactctggcctgaatcagagaagaatccgcgccaagagaagcggatctggcgtgaagcagaccctgaatttcgacctgctgaagctggctggcgacgtggaatccaacccaggcccttctagaggccatatgaccgagtacaagcccacggtgcgcctcgccacccgcgacgacgtccccagggccgtacgcaccctcgccgccgcgttcgccgactaccccgccacgcgccacaccgtcgatccggaccgccacatcgagcgggtcaccgagctgcaagaactcttcctcacgcgcgtcgggctcgacatcggcaaggtgtgggtcgcggacgacggcgccgcggtggcggtctggaccacgccggagagcgtcgaagcgggggcggtgttcgccgagatcggcccgcgcatggccgagttgagcggttcccggctggccgcgcagcaacagatggaaggcctcctggcgccgcaccggcccaaggagcccgcgtggttcctggccaccgtcggcgtctcgcccgaccaccagggcaagggtctgggcagcgccgtcgtgctccccggagtggaggcggccgagcgcgccggggtgcccgccttcctggagacctccgcgccccgcaacctccccttctacgagcggctcggcttcaccgtcaccgccgacgtcgaggtgcccgaaggaccgcgcacctggtgcatgacccgcaagcccggtgcctga

SEQ ID NO: 7462 - DNA, 1995 bp, Artificial Sequence
  Synthetic Polynucloetide
atggccttaccagtgaccgccttgctcctgccgctggccttgctgctccacgccgccaggccgagctacgtgctgacacagcctccatccgtgtctgtggctccaggacagaccgccagaatcacatgcggcggcaacaacatcggcagcaagagcgtgcactggtatcagcagccacctggacaggctccagtggtggtggtgtacgacgacagcgatagacctagcggcatccccgagagattcagcggcagcaattccggcaataccgccacactgaccatcagcagagtggaagctggcgacgaggccgtgtactactgccaagtgtgggacagcagcagcgatcacgtggtgtttggcggcggaacaaagctgacagtgcttggcggaggcggaagtggaggcggaggatctggcggcggaggctctcaactccagctgcaagagtctggccctggcctggtcaagcctagcgaaacactgagcctgacctgtaccgtgtctggcggctctatcagctccagcagctatttctggggctggatcagacaacctcctggcaaaggactggaatggatcggctccatctactacagcggcatcacctactacaaccccagcctgaagtccagagtgaccatctccgtggacaccagcaagaaccagttctccctgaagctgagcagcgtgacagccgccgataccgccgtgtattattgtgccagacatgacggcgctgtggccggcctgtttgattattggggacagggcaccctggtcaccgtgtcatctgctacgcgtgggtctggaggcggaggcagcggcggaggcgggagcggcttcaagatccccatcgaggaactggaagatcgggtgttcgtgaactgcaacacctctatcacctgggtggaaggcaccgtgggaacactgctgagcgacatcaccagactggacctcggcaagcggattctggaccctcggggcatctacagatgcaacggcaccgacatctacaaggacaaagaaagcaccgtgcaggtccactacagaatgtgccagtcctgcgtggaactggaccctgctacagtggccggcatcatcgtgaccgatgtgatcgctactctgctgctggctctgggagtgttctgcttcgccggacacgaaacaggcagactgtctggcgctgccgatacacaggccctgctgagaaacgaccaagtgtatcagcccctgcgcgacagagatgatgcccagtattctcacctcggcggcaactgggctagaaacaagcgcgccaagagaagcggatctggcgtgaagcagaccctgaatttcgacctgctgaagctggctggcgacgtggaatccaacccaggcccttctagaggccatatgaccgagtacaagcccacggtgcgcctcgccacccgcgacgacgtccccagggccgtacgcaccctcgccgccgcgttcgccgactaccccgccacgcgccacaccgtcgatccggaccgccacatcgagcgggtcaccgagctgcaagaactcttcctcacgcgcgtcgggctcgacatcggcaaggtgtgggtcgcggacgacggcgccgcggtggcggtctggaccacgccggagagcgtcgaagcgggggcggtgttcgccgagatcggcccgcgcatggccgagttgagcggttcccggctggccgcgcagcaacagatggaaggcctcctggcgccgcaccggcccaaggagcccgcgtggttcctggccaccgtcggcgtctcgcccgaccaccagggcaagggtctgggcagcgccgtcgtgctccccggagtggaggcggccgagcgcgccggggtgcccgccttcctggagacctccgcgccccgcaacctccccttctacgagcggctcggcttcaccgtcaccgccgacgtcgaggtgcccgaaggaccgcgcacctggtgcatgacccgcaagcccggtgcctga

SEQ ID NO: 7463 - DNA, 2025 bp, Artificial Sequence
  Synthetic Polynucloetide
atggccttaccagtgaccgccttgctcctgccgctggccttgctgctccacgccgccaggccgagctacgtgctgacacagcctccatccgtgtctgtggctccaggacagaccgccagaatcacatgcggcggcaacaacatcggcagcaagagcgtgcactggtatcagcagccacctggacaggctccagtggtggtggtgtacgacgacagcgatagacctagcggcatccccgagagattcagcggcagcaattccggcaataccgccacactgaccatcagcagagtggaagctggcgacgaggccgtgtactactgccaagtgtgggacagcagcagcgatcacgtggtgtttggcggcggaacaaagctgacagtgcttggcggaggcggaagtggaggcggaggatctggcggcggaggctctcaactccagctgcaagagtctggccctggcctggtcaagcctagcgaaacactgagcctgacctgtaccgtgtctggcggctctatcagctccagcagctatttctggggctggatcagacaacctcctggcaaaggactggaatggatcggctccatctactacagcggcatcacctactacaaccccagcctgaagtccagagtgaccatctccgtggacaccagcaagaaccagttctccctgaagctgagcagcgtgacagccgccgataccgccgtgtattattgtgccagacatgacggcgctgtggccggcctgtttgattattggggacagggcaccctggtcaccgtgtcatctgctacgcgtgggtctggaggcggaggcagcggcggaggcgggagcggccagagcatcaagggcaaccacctggtcaaggtgtacgactaccaagaggacggcagcgtgctgctgacatgtgatgccgaggccaagaacatcacctggtttaaggacggcaagatgatcggcttcctgaccgaggacaagaagaagtggaacctgggcagcaacgctaaggaccccagaggcatgtatcagtgcaagggcagccagaacaagagcaagcccctccaggtgtactaccggatgtgccagaactgcatcgagctgaacgccgctaccatcagcggctttctgttcgccgagatcgtgtccatcttcgtgctggccgtgggcgtgtactttatcgctggacaggatggcgtgcggcagagcagagcttccgataagcaaaccctgctgcctaacgaccagctgtaccagcctctgaaggacagagaggacgaccagtacagccacctccagggcaatcagctgagaagaaaccgcgccaagagaagcggatctggcgtgaagcagaccctgaatttcgacctgctgaagctggctggcgacgtggaatccaacccaggcccttctagaggccatatgaccgagtacaagcccacggtgcgcctcgccacccgcgacgacgtccccagggccgtacgcaccctcgccgccgcgttcgccgactaccccgccacgcgccacaccgtcgatccggaccgccacatcgagcgggtcaccgagctgcaagaactcttcctcacgcgcgtcgggctcgacatcggcaaggtgtgggtcgcggacgacggcgccgcggtggcggtctggaccacgccggagagcgtcgaagcgggggcggtgttcgccgagatcggcccgcgcatggccgagttgagcggttcccggctggccgcgcagcaacagatggaaggcctcctggcgccgcaccggcccaaggagcccgcgtggttcctggccaccgtcggcgtctcgcccgaccaccagggcaagggtctgggcagcgccgtcgtgctccccggagtggaggcggccgagcgcgccggggtgcccgccttcctggagacctccgcgccccgcaacctccccttctacgagcggctcggcttcaccgtcaccgccgacgtcgaggtgcccgaaggaccgcgcacctggtgcatgacccgcaagcccggtgcctga

SEQ ID NO: 7464 - DNA, 1974 bp, Artificial Sequence
  Synthetic Polynucloetide
atggccttaccagtgaccgccttgctcctgccgctggccttgctgctccacgccgccaggccgagctacgtgctgacacagcctccatccgtgtctgtggctccaggacagaccgccagaatcacatgcggcggcaacaacatcggcagcaagagcgtgcactggtatcagcagccacctggacaggctccagtggtggtggtgtacgacgacagcgatagacctagcggcatccccgagagattcagcggcagcaattccggcaataccgccacactgaccatcagcagagtggaagctggcgacgaggccgtgtactactgccaagtgtgggacagcagcagcgatcacgtggtgtttggcggcggaacaaagctgacagtgcttggcggaggcggaagtggaggcggaggatctggcggcggaggctctcaactccagctgcaagagtctggccctggcctggtcaagcctagcgaaacactgagcctgacctgtaccgtgtctggcggctctatcagctccagcagctatttctggggctggatcagacaacctcctggcaaaggactggaatggatcggctccatctactacagcggcatcacctactacaaccccagcctgaagtccagagtgaccatctccgtggacaccagcaagaaccagttctccctgaagctgagcagcgtgacagccgccgataccgccgtgtattattgtgccagacatgacggcgctgtggccggcctgtttgattattggggacagggcaccctggtcaccgtgtcatctgctacgcgtgggtctggaggcggaggcagcggcggaggcgggagcggccagagttttgggttgttggaccctaaattgtgctatctgttggacggaatcctgttcatttacggagtgatcctgaccgcattgttcctgcgggttaagttttccagatccgcagacgcacccgcttaccaacaagggcagaaccaactctacaatgaacttaatttggggcggagggaagagtacgacgttctggacaaaaggaggggacgagatcccgagatgggcggaaagcctcagcgaaggaagaatccgcaagaggggctttataacgaactccagaaagataaaatggcagaagcctatagtgagattgggatgaagggagaaaggaggaggggtaaaggtcacgatgggttgtaccaaggattgagcacagccactaaagatacctatgatgcgctccacatgcaggccctgccgccaagacgcgccaagagaagcggatctggcgtgaagcagaccctgaatttcgacctgctgaagctggctggcgacgtggaatccaacccaggcccttctagaggccatatgaccgagtacaagcccacggtgcgcctcgccacccgcgacgacgtccccagggccgtacgcaccctcgccgccgcgttcgccgactaccccgccacgcgccacaccgtcgatccggaccgccacatcgagcgggtcaccgagctgcaagaactcttcctcacgcgcgtcgggctcgacatcggcaaggtgtgggtcgcggacgacggcgccgcggtggcggtctggaccacgccggagagcgtcgaagcgggggcggtgttcgccgagatcggcccgcgcatggccgagttgagcggttcccggctggccgcgcagcaacagatggaaggcctcctggcgccgcaccggcccaaggagcccgcgtggttcctggccaccgtcggcgtctcgcccgaccaccagggcaagggtctgggcagcgccgtcgtgctccccggagtggaggcggccgagcgcgccggggtgcccgccttcctggagacctccgcgccccgcaacctccccttctacgagcggctcggcttcaccgtcaccgccgacgtcgaggtgcccgaaggaccgcgcacctggtgcatgacccgcaagcccggtgcctga

SEQ ID NO: 7465 - DNA, 2274 bp, Artificial Sequence
  Synthetic Polynucloetide
atggccttaccagtgaccgccttgctcctgccgctggccttgctgctccacgccgccaggccggaagtgcagctggttgaatctggcggaggactggttcagcctggcggatctctgagactgtcttgtgccgccagcggcttcagcttcagcgacttttggatgagctgggtccgacaggcccctggcaaaggacttgaatgggtcgccacaatcagccaggccggcagcgagaaggactacgtggactctgtgaagggcagattcaccatcagccgggacaacgccaagaagtccctgtacctccagatgaacagcctgagagccgaggacaccgccgtgtactattgtgcctctggcgtgtacagcttcgactacagaggccagggcaccctggtcacagtctcttctggtaccggcggaggcggatctggcggcggaggtagcggtggcggaggatctgaattcagctacgtgctgacacagcctccatccgtgtctgtggctccaggacagaccgccagaatcacatgcggcggcaacaacatcggcagcaagagcgtgcactggtatcagcagccacctggacaggctccagtggtggtggtgtacgacgacagcgatagacctagcggcatccccgagagattcagcggcagcaattccggcaataccgccacactgaccatcagcagagtggaagctggcgacgaggccgtgtactactgccaagtgtgggacagcagcagcgatcacgtggtgtttggcggcggaacaaagctgacagtgcttctcgaggacctgaagaacgtgttcccacctgaggtggccgtgttcgagcctagcgaggccgagatcagccacacccagaaagccaccctcgtgtgcctggctaccggcttctaccccgaccatgtggaactgtcttggtgggtcaacggcaaagaggtgcacagcggcgtgtgtaccgacccccagccactgaaagaacagcccgccctgaacgacagccggtactgcctgagcagcagactgagagtgtccgccaccttctggcagaacccccggaaccacttcagatgccaggtgcagttctacggcctgagcgagaacgacgagtggacccaggacagagccaagcccgtgacccagatcgtgtctgccgaagcctggggcagagccgattgcggctttaccagcgagagctaccagcagggcgtgctgagcgccaccatcctgtacgagatcctgctgggcaaggccaccctgtacgccgtgctggtgtctgccctggtgctgatggctatggtcaagcggaaggacagccggggaagggccaagcgatctggatctggagcaacaaacttctcactactcaaacaagcaggtgacgtggaggagaatcccgggcctactagtatggactggatttggcgcatccttttccttgtcggcgctgctaccggcgcgcattccttcgaacaactccagctgcaagagtctggccctggcctggtcaagcctagcgaaacactgagcctgacctgtaccgtgtctggcggctctatcagctccagcagctatttctggggctggatcagacaacctcctggcaaaggactggaatggatcggctccatctactacagcggcatcacctactacaaccccagcctgaagtccagagtgaccatctccgtggacaccagcaagaaccagttctccctgaagctgagcagcgtgacagccgccgataccgccgtgtattattgtgccagacatgacggcgctgtggccggcctgtttgattattggggacagggcaccctggtcaccgtgtcatctgctacgcgtatccagaaccctgatcctgccgtgtaccagctgcgggatagcaagagcagcgacaagagcgtgtgtctgttcaccgacttcgacagccagaccaacgtgtcccagagcaaggactccgacgtgtacatcaccgataagtgcgtgctggacatgcggagcatggacttcaagagcaactccgccgtggcctggtccaacaagtccgatttcgcctgcgccaacgccttcaacaacagcattatccccgaggacacattcttcccaagccccgagagcagctgcgacgtgaagctggtggaaaagagcttcgagacagacaccaacctgaacttccagaacctgagcgtgatcggcttcagaatcctgctgctgaaagtggccggctttaacctgctgatgaccctgcggctgtggtccagc

SEQ ID NO: 7466 - DNA, 2286 bp, Artificial Sequence
  Synthetic Polynucloetide
atggccttaccagtgaccgccttgctcctgccgctggccttgctgctccacgccgccaggccggaagtgcagctggttgaatctggcggaggactggttcagcctggcggatctctgagactgtcttgtgccgccagcggcttcagcttcagcgacttttggatgagctgggtccgacaggcccctggcaaaggacttgaatgggtcgccacaatcagccaggccggcagcgagaaggactacgtggactctgtgaagggcagattcaccatcagccgggacaacgccaagaagtccctgtacctccagatgaacagcctgagagccgaggacaccgccgtgtactattgtgcctctggcgtgtacagcttcgactacagaggccagggcaccctggtcacagtctcttctggtaccggcggaggcggatctggcggcggaggtagcggtggcggaggatctgaattcagctacgtgctgacacagcctccatccgtgtctgtggctccaggacagaccgccagaatcacatgcggcggcaacaacatcggcagcaagagcgtgcactggtatcagcagccacctggacaggctccagtggtggtggtgtacgacgacagcgatagacctagcggcatccccgagagattcagcggcagcaattccggcaataccgccacactgaccatcagcagagtggaagctggcgacgaggccgtgtactactgccaagtgtgggacagcagcagcgatcacgtggtgtttggcggcggaacaaagctgacagtgcttctcgagatccagaaccctgatcctgccgtgtaccagctgcgggatagcaagagcagcgacaagagcgtgtgtctgttcaccgacttcgacagccagaccaacgtgtcccagagcaaggactccgacgtgtacatcaccgataagtgcgtgctggacatgcggagcatggacttcaagagcaactccgccgtggcctggtccaacaagtccgatttcgcctgcgccaacgccttcaacaacagcattatccccgaggacacattcttcccaagccccgagagcagctgcgacgtgaagctggtggaaaagagcttcgagacagacaccaacctgaacttccagaacctgagcgtgatcggcttcagaatcctgctgctgaaagtggccggctttaacctgctgatgaccctgcggctgtggtccagccgcgccaagagaagcggatctggcgtgaagcagaccctgaatttcgacctgctgaagctggctggcgacgtggaatccaacccaggccctactagtatggactggatttggcgcatccttttccttgtcggcgctgctaccggcgcgcattccttcgaacaactccagctgcaagagtctggccctggcctggtcaagcctagcgaaacactgagcctgacctgtaccgtgtctggcggctctatcagctccagcagctatttctggggctggatcagacaacctcctggcaaaggactggaatggatcggctccatctactacagcggcatcacctactacaaccccagcctgaagtccagagtgaccatctccgtggacaccagcaagaaccagttctccctgaagctgagcagcgtgacagccgccgataccgccgtgtattattgtgccagacatgacggcgctgtggccggcctgtttgattattggggacagggcaccctggtcaccgtgtcatctgctacgcgtgaggacctgaagaacgtgttcccacctgaggtggccgtgttcgagcctagcgaggccgagatcagccacacccagaaagccaccctcgtgtgcctggctaccggcttctaccccgaccatgtggaactgtcttggtgggtcaacggcaaagaggtgcacagcggcgtgtgtaccgacccccagccactgaaagaacagcccgccctgaacgacagccggtactgcctgagcagcagactgagagtgtccgccaccttctggcagaacccccggaaccacttcagatgccaggtgcagttctacggcctgagcgagaacgacgagtggacccaggacagagccaagcccgtgacccagatcgtgtctgccgaagcctggggcagagccgattgcggctttaccagcgagagctaccagcagggcgtgctgagcgccaccatcctgtacgagatcctgctgggcaaggccaccctgtacgccgtgctggtgtctgccctggtgctgatggctatggtcaagcggaaggacagccgggga

SEQ ID NO: 7467 - DNA, 2862 bp, Artificial Sequence
  Synthetic Polynucloetide
atggccttaccagtgaccgccttgctcctgccgctggccttgctgctccacgccgccaggccggaagtgcagctggttgaatctggcggaggactggttcagcctggcggatctctgagactgtcttgtgccgccagcggcttcagcttcagcgacttttggatgagctgggtccgacaggcccctggcaaaggacttgaatgggtcgccacaatcagccaggccggcagcgagaaggactacgtggactctgtgaagggcagattcaccatcagccgggacaacgccaagaagtccctgtacctccagatgaacagcctgagagccgaggacaccgccgtgtactattgtgcctctggcgtgtacagcttcgactacagaggccagggcaccctggtcacagtctcttctggtaccggcggaggcggatctggcggcggaggtagcggtggcggaggatctgaattcagctacgtgctgacacagcctccatccgtgtctgtggctccaggacagaccgccagaatcacatgcggcggcaacaacatcggcagcaagagcgtgcactggtatcagcagccacctggacaggctccagtggtggtggtgtacgacgacagcgatagacctagcggcatccccgagagattcagcggcagcaattccggcaataccgccacactgaccatcagcagagtggaagctggcgacgaggccgtgtactactgccaagtgtgggacagcagcagcgatcacgtggtgtttggcggcggaacaaagctgacagtgcttctcgaggacctgaagaacgtgttcccacctgaggtggccgtgttcgagcctagcgaggccgagatcagccacacccagaaagccaccctcgtgtgcctggctaccggcttctaccccgaccatgtggaactgtcttggtgggtcaacggcaaagaggtgcacagcggcgtgtctaccgacccccagccactgaaagaacagcccgccctgaacgacagccggtactgcctgagcagcagactgagagtgtccgccaccttctggcagaacccccggaaccacttcagatgccaggtgcagttctacggcctgagcgagaacgacgagtggacccaggacagagccaagcccgtgacccagatcgtgtctgccgaagcctggggcagagccgattgcggatcccagagcttcggcctgctggaccccaagctgtgctacctgctggatggcatcctgttcatctacggcgtgatcctgaccgccctgttcctgagagtgaagttcagcagaagcgccgacgcccctgcctaccagcagggacagaaccaactgtacaacgagctgaacctgggcagacgggaagagtacgacgtgctggacaagcggagaggcagggaccctgagatgggcggaaagccccagcggagaaagaacccccaggaaggactgtataacgaactccagaaagacaagatggccgaagcctacagcgagatcggcatgaagggcgagcggagaagaggcaagggccacgatggcctgtaccagggcctgagcaccgccaccaaggacacctatgacgccctgcacatgcaggccctgcctccaagaagggccaagcgatctggatctggagcaacaaacttctcactactcaaacaagcaggtgacgtggaggagaatcccgggcctactagtatggactggatttggcgcatccttttccttgtcggcgctgctaccggcgcgcattccttcgaacaactccagctgcaagagtctggccctggcctggtcaagcctagcgaaacactgagcctgacctgtaccgtgtctggcggctctatcagctccagcagctatttctggggctggatcagacaacctcctggcaaaggactggaatggatcggctccatctactacagcggcatcacctactacaaccccagcctgaagtccagagtgaccatctccgtggacaccagcaagaaccagttctccctgaagctgagcagcgtgacagccgccgataccgccgtgtattattgtgccagacatgacggcgctgtggccggcctgtttgattattggggacagggcaccctggtcaccgtgtcatctgctacgcgtatccagaaccctgatcctgccgtgtaccagctgcgggatagcaagagcagcgacaagagcgtgtgtctgttcaccgacttcgacagccagaccaacgtgtcccagagcaaggactccgacgtgtacatcaccgataagaccgtgctggacatgcggagcatggacttcaagagcaactccgccgtggcctggtccaacaagtccgatttcgcctgcgccaacgccttcaacaacagcattatccccgaggacacattcttcccaagccccgagagcagctgcggtacccagagttttgggttgttggaccctaaattgtgctatctgttggacggaatcctgttcatttacggagtgatcctgaccgcattgttcctgcgggttaagttttccagatccgcagacgcacccgcttaccaacaagggcagaaccaactctacaatgaacttaatttggggcggagggaagagtacgacgttctggacaaaaggaggggacgagatcccgagatgggcggaaagcctcagcgaaggaagaatccgcaagaggggctttataacgaactccagaaagataaaatggcagaagcctatagtgagattgggatgaagggagaaaggaggaggggtaaaggtcacgatgggttgtaccaaggattgagcacagccactaaagatacctatgatgcgctccacatgcaggccctgccgccaaga

SEQ ID NO: 7468 - DNA, 2352 bp, Artificial Sequence
  Synthetic Polynucloetide
atggccttaccagtgaccgccttgctcctgccgctggccttgctgctccacgccgccaggccggaagtgcagctggttgaatctggcggaggactggttcagcctggcggatctctgagactgtcttgtgccgccagcggcttcagcttcagcgacttttggatgagctgggtccgacaggcccctggcaaaggacttgaatgggtcgccacaatcagccaggccggcagcgagaaggactacgtggactctgtgaagggcagattcaccatcagccgggacaacgccaagaagtccctgtacctccagatgaacagcctgagagccgaggacaccgccgtgtactattgtgcctctggcgtgtacagcttcgactacagaggccagggcaccctggtcacagtctcttctggtaccggcggaggcggatctggcggcggaggtagcggtggcggaggatctgaattcagctacgtgctgacacagcctccatccgtgtctgtggctccaggacagaccgccagaatcacatgcggcggcaacaacatcggcagcaagagcgtgcactggtatcagcagccacctggacaggctccagtggtggtggtgtacgacgacagcgatagacctagcggcatccccgagagattcagcggcagcaattccggcaataccgccacactgaccatcagcagagtggaagctggcgacgaggccgtgtactactgccaagtgtgggacagcagcagcgatcacgtggtgtttggcggcggaacaaagctgacagtgcttctcgagggacagcctaaggccaatcctaccgtgacactgttccctccaagcagcgaagaactccaggccaacaaggccacacttgtgtgcctgatctccgacttctaccctggggctgtgacagtggcttggaaggccgatggatctcctgtgaaagccggcgtggaaaccaccaagccatccaagcagagcaacaacaaatacgccgccagctcctacctgagcctgacacctgagcagtggaagtcccacagatcctacagctgccaagtgacccacgaaggcagcaccgtggaaaagacagtggcccctacagagtgcagccccatcaagaccgatgtgattacaatggaccccaaggacaactgctccaaggacgccaacgataccctgctgctccagctgaccaacaccagcgcctactacatgtacttgttgctgctgctgaagtccgtggtgtacttcgccatcatcacatgctgcctgctgcggagaaccgccttctgctgcaacggcgagaagtctagggccaagcgatctggatctggagcaacaaacttctcactactcaaacaagcaggtgacgtggaggagaatcccgggcctactagtatggactggatttggcgcatccttttccttgtcggcgctgctaccggcgcgcattccttcgaacaactccagctgcaagagtctggccctggcctggtcaagcctagcgaaacactgagcctgacctgtaccgtgtctggcggctctatcagctccagcagctatttctggggctggatcagacaacctcctggcaaaggactggaatggatcggctccatctactacagcggcatcacctactacaaccccagcctgaagtccagagtgaccatctccgtggacaccagcaagaaccagttctccctgaagctgagcagcgtgacagccgccgataccgccgtgtattattgtgccagacatgacggcgctgtggccggcctgtttgattattggggacagggcaccctggtcaccgtgtcatctgctacgcgtgcctctacaaagggaccctccgtgtttcctctggctcccagcagcaagtctacaagcggaggaacagccgctctgggctgcctggtcaaggattactttcccgagcctgtgaccgtgtcctggaatagcggagcactgacaagcggcgtgcacacctttccagccgtgctgcaaagcagcggcctgtactctctgagcagcgtggtcacagtgcctagctctagcctgggcacccagacctacatctgcaatgtgaaccacaagcctagcaacaccaaggtggacaagagagtggaacccaagagctgtgaagtgaaaaccgactccaccgaccacgtgaagcccaaagagacagagaacaccaagcagcccagcaagagctgccacaagcccaaggccatcgtgcacaccgagaaagtgaacatgatgagcctgaccgtgctgggcctgcggatgctgttcgccaaaaccgtggccgtgaacttcctgctgaccgccaagctgttcttcctc

SEQ ID NO: 7469 - DNA, 2295 bp, Artificial Sequence
  Synthetic Polynucloetide
atggccttaccagtgaccgccttgctcctgccgctggccttgctgctccacgccgccaggccggaagtgcagctggttgaatctggcggaggactggttcagcctggcggatctctgagactgtcttgtgccgccagcggcttcagcttcagcgacttttggatgagctgggtccgacaggcccctggcaaaggacttgaatgggtcgccacaatcagccaggccggcagcgagaaggactacgtggactctgtgaagggcagattcaccatcagccgggacaacgccaagaagtccctgtacctccagatgaacagcctgagagccgaggacaccgccgtgtactattgtgcctctggcgtgtacagcttcgactacagaggccagggcaccctggtcacagtctcttctggtaccggcggaggcggatctggcggcggaggtagcggtggcggaggatctgaattcagctacgtgctgacacagcctccatccgtgtctgtggctccaggacagaccgccagaatcacatgcggcggcaacaacatcggcagcaagagcgtgcactggtatcagcagccacctggacaggctccagtggtggtggtgtacgacgacagcgatagacctagcggcatccccgagagattcagcggcagcaattccggcaataccgccacactgaccatcagcagagtggaagctggcgacgaggccgtgtactactgccaagtgtgggacagcagcagcgatcacgtggtgtttggcggcggaacaaagctgacagtgcttctcgagggacagcctaaggccaatcctaccgtgacactgttccctccaagcagcgaagaactccaggccaacaaggccacacttgtgtgcctgatctccgacttctaccctggggctgtgacagtggcttggaaggccgatggatctcctgtgaaagccggcgtggaaaccaccaagccatccaagcagagcaacaacaaatacgccgccagctcctacctgagcctgacacctgagcagtggaagtcccacagatcctacagctgccaagtgacccacgaaggcagcaccgtggaaaagacagtggcccctacagagtgcagcggcagagccgattgcggctttaccagcgagagctaccagcagggcgtgctgagcgccaccatcctgtacgagatcctgctgggcaaggccaccctgtacgccgtgctggtgtctgccctggtgctgatggctatggtcaagcggaaggacagccggggacgcgccaagagaagcggatctggcgtgaagcagaccctgaatttcgacctgctgaagctggctggcgacgtggaatccaacccaggccctactagtatggactggatttggcgcatccttttccttgtcggcgctgctaccggcgcgcattccttcgaacaactccagctgcaagagtctggccctggcctggtcaagcctagcgaaacactgagcctgacctgtaccgtgtctggcggctctatcagctccagcagctatttctggggctggatcagacaacctcctggcaaaggactggaatggatcggctccatctactacagcggcatcacctactacaaccccagcctgaagtccagagtgaccatctccgtggacaccagcaagaaccagttctccctgaagctgagcagcgtgacagccgccgataccgccgtgtattattgtgccagacatgacggcgctgtggccggcctgtttgattattggggacagggcaccctggtcaccgtgtcatctgctacgcgtgcctctacaaagggaccctccgtgtttcctctggctcccagcagcaagtctacaagcggaggaacagccgctctgggctgcctggtcaaggattactttcccgagcctgtgaccgtgtcctggaatagcggagcactgacaagcggcgtgcacacctttccagccgtgctgcaaagcagcggcctgtactctctgagcagcgtggtcacagtgcctagctctagcctgggcacccagacctacatctgcaatgtgaaccacaagcctagcaacaccaaggtggacaagagagtggaacccaagagctgtatccccgaggacacattcttcccaagccccgagagcagctgcgacgtgaagctggtggaaaagagcttcgagacagacaccaacctgaacttccagaacctgagcgtgatcggcttcagaatcctgctgctgaaagtggccggctttaacctgctgatgaccctgcggctgtggtccagc

SEQ ID NO: 7470 - DNA, 2697 bp, Artificial Sequence
  Synthetic Polynucloetide
atggccttaccagtgaccgccttgctcctgccgctggccttgctgctccacgccgccaggccggaagtgcagctggttgaatctggcggaggactggttcagcctggcggatctctgagactgtcttgtgccgccagcggcttcagcttcagcgacttttggatgagctgggtccgacaggcccctggcaaaggacttgaatgggtcgccacaatcagccaggccggcagcgagaaggactacgtggactctgtgaagggcagattcaccatcagccgggacaacgccaagaagtccctgtacctccagatgaacagcctgagagccgaggacaccgccgtgtactattgtgcctctggcgtgtacagcttcgactacagaggccagggcaccctggtcacagtctcttctggtaccggcggaggcggatctggcggcggaggtagcggtggcggaggatctgaattcagctacgtgctgacacagcctccatccgtgtctgtggctccaggacagaccgccagaatcacatgcggcggcaacaacatcggcagcaagagcgtgcactggtatcagcagccacctggacaggctccagtggtggtggtgtacgacgacagcgatagacctagcggcatccccgagagattcagcggcagcaattccggcaataccgccacactgaccatcagcagagtggaagctggcgacgaggccgtgtactactgccaagtgtgggacagcagcagcgatcacgtggtgtttggcggcggaacaaagctgacagtgcttctcgagatccagaaccctgatcctgccgtgtaccagctgcgggatagcaagagcagcgacaagagcgtgtgtctgttcaccgacttcgacagccagaccaacgtgtcccagagcaaggactccgacgtgtacatcaccgataagtgcgtgctggacatgcggagcatggacttcaagagcaactccgccgtggcctggtccaacaagtccgatttcgcctgcgccaacgccttcaacaacagcattatccccgaggacacattcttcccaagccccgagagcagctgcgacgtgaagctggtggaaaagagcttcgagacagacaccaacctgaacttccagaacctgagcgtgatcggcttcagaatcctgctgctgaaagtggccggctttaacctgctgatgaccctgcggctgtggtccagccgcgccaagagaagcggatctggcgtgaagcagaccctgaatttcgacctgctgaagctggctggcgacgtggaatccaacccaggccctactagtatggactggatttggcgcatccttttccttgtcggcgctgctaccggcgcgcattccgggccccagctccagctgcaagagtctggacctggcctggtcaagcctagcgagacactgagcctgacctgtaccgtgtccggcgatagcatcagcagcggcgattactactggggctggatcagacagcctcctggcaaaggactggaatggatcggccacatctactacagcggcgtgacctactacaaccccagcctgaagtccagagtgaccatcagcgtggacaccagccggaaccagttctccctgaagctgtctagcgtgacagccgccgataccgccgtgtactactgcaccagagaggacagcagcaactggcggagtagaggccagggaacactggtcacagttagctctggatccggcggaggcggaagtggaggcggaggatctggcggcggaggctctttcgaacaactccagctgcaagagtctggccctggcctggtcaagcctagcgaaacactgagcctgacctgtaccgtgtctggcggctctatcagctccagcagctatttctggggctggatcagacaacctcctggcaaaggactggaatggatcggctccatctactacagcggcatcacctactacaaccccagcctgaagtccagagtgaccatctccgtggacaccagcaagaaccagttctccctgaagctgagcagcgtgacagccgccgataccgccgtgtattattgtgccagacatgacggcgctgtggccggcctgtttgattattggggacagggcaccctggtcaccgtgtcatctgctacgcgtgaggacctgaagaacgtgttcccacctgaggtggccgtgttcgagcctagcgaggccgagatcagccacacccagaaagccaccctcgtgtgcctggctaccggcttctaccccgaccatgtggaactgtcttggtgggtcaacggcaaagaggtgcacagcggcgtgtgtaccgacccccagccactgaaagaacagcccgccctgaacgacagccggtactgcctgagcagcagactgagagtgtccgccaccttctggcagaacccccggaaccacttcagatgccaggtgcagttctacggcctgagcgagaacgacgagtggacccaggacagagccaagcccgtgacccagatcgtgtctgccgaagcctggggcagagccgattgcggctttaccagcgagagctaccagcagggcgtgctgagcgccaccatcctgtacgagatcctgctgggcaaggccaccctgtacgccgtgctggtgtctgccctggtgctgatggctatggtcaagcggaaggacagccgggga

SEQ ID NO: 7471 - DNA, 3273 bp, Artificial Sequence
  Synthetic Polynucloetide
atggccttaccagtgaccgccttgctcctgccgctggccttgctgctccacgccgccaggccggaagtgcagctggttgaatctggcggaggactggttcagcctggcggatctctgagactgtcttgtgccgccagcggcttcagcttcagcgacttttggatgagctgggtccgacaggcccctggcaaaggacttgaatgggtcgccacaatcagccaggccggcagcgagaaggactacgtggactctgtgaagggcagattcaccatcagccgggacaacgccaagaagtccctgtacctccagatgaacagcctgagagccgaggacaccgccgtgtactattgtgcctctggcgtgtacagcttcgactacagaggccagggcaccctggtcacagtctcttctggtaccggcggaggcggatctggcggcggaggtagcggtggcggaggatctgaattcagctacgtgctgacacagcctccatccgtgtctgtggctccaggacagaccgccagaatcacatgcggcggcaacaacatcggcagcaagagcgtgcactggtatcagcagccacctggacaggctccagtggtggtggtgtacgacgacagcgatagacctagcggcatccccgagagattcagcggcagcaattccggcaataccgccacactgaccatcagcagagtggaagctggcgacgaggccgtgtactactgccaagtgtgggacagcagcagcgatcacgtggtgtttggcggcggaacaaagctgacagtgcttctcgaggacctgaagaacgtgttcccacctgaggtggccgtgttcgagcctagcgaggccgagatcagccacacccagaaagccaccctcgtgtgcctggctaccggcttctaccccgaccatgtggaactgtcttggtgggtcaacggcaaagaggtgcacagcggcgtgtctaccgacccccagccactgaaagaacagcccgccctgaacgacagccggtactgcctgagcagcagactgagagtgtccgccaccttctggcagaacccccggaaccacttcagatgccaggtgcagttctacggcctgagcgagaacgacgagtggacccaggacagagccaagcccgtgacccagatcgtgtctgccgaagcctggggcagagccgattgcggatcccagagcttcggcctgctggaccccaagctgtgctacctgctggatggcatcctgttcatctacggcgtgatcctgaccgccctgttcctgagagtgaagttcagcagaagcgccgacgcccctgcctaccagcagggacagaaccaactgtacaacgagctgaacctgggcagacgggaagagtacgacgtgctggacaagcggagaggcagggaccctgagatgggcggaaagccccagcggagaaagaacccccaggaaggactgtataacgaactccagaaagacaagatggccgaagcctacagcgagatcggcatgaagggcgagcggagaagaggcaagggccacgatggcctgtaccagggcctgagcaccgccaccaaggacacctatgacgccctgcacatgcaggccctgcctccaagaagggccaagcgatctggatctggagcaacaaacttctcactactcaaacaagcaggtgacgtggaggagaatcccgggcctactagtatggactggatttggcgcatccttttccttgtcggcgctgctaccggcgcgcattccgggccccagctccagctgcaagagtctggacctggcctggtcaagcctagcgagacactgagcctgacctgtaccgtgtccggcgatagcatcagcagcggcgattactactggggctggatcagacagcctcctggcaaaggactggaatggatcggccacatctactacagcggcgtgacctactacaaccccagcctgaagtccagagtgaccatcagcgtggacaccagccggaaccagttctccctgaagctgtctagcgtgacagccgccgataccgccgtgtactactgcaccagagaggacagcagcaactggcggagtagaggccagggaacactggtcacagttagctctggatccggcggaggcggaagtggaggcggaggatctggcggcggaggctctttcgaacaactccagctgcaagagtctggccctggcctggtcaagcctagcgaaacactgagcctgacctgtaccgtgtctggcggctctatcagctccagcagctatttctggggctggatcagacaacctcctggcaaaggactggaatggatcggctccatctactacagcggcatcacctactacaaccccagcctgaagtccagagtgaccatctccgtggacaccagcaagaaccagttctccctgaagctgagcagcgtgacagccgccgataccgccgtgtattattgtgccagacatgacggcgctgtggccggcctgtttgattattggggacagggcaccctggtcaccgtgtcatctgctacgcgtatccagaaccctgatcctgccgtgtaccagctgcgggatagcaagagcagcgacaagagcgtgtgtctgttcaccgacttcgacagccagaccaacgtgtcccagagcaaggactccgacgtgtacatcaccgataagaccgtgctggacatgcggagcatggacttcaagagcaactccgccgtggcctggtccaacaagtccgatttcgcctgcgccaacgccttcaacaacagcattatccccgaggacacattcttcccaagccccgagagcagctgcggtacccagagttttgggttgttggaccctaaattgtgctatctgttggacggaatcctgttcatttacggagtgatcctgaccgcattgttcctgcgggttaagttttccagatccgcagacgcacccgcttaccaacaagggcagaaccaactctacaatgaacttaatttggggcggagggaagagtacgacgttctggacaaaaggaggggacgagatcccgagatgggcggaaagcctcagcgaaggaagaatccgcaagaggggctttataacgaactccagaaagataaaatggcagaagcctatagtgagattgggatgaagggagaaaggaggaggggtaaaggtcacgatgggttgtaccaaggattgagcacagccactaaagatacctatgatgcgctccacatgcaggccctgccgccaaga

SEQ ID NO: 7472 - DNA, 2763 bp, Artificial Sequence
  Synthetic Polynucloetide
atggccttaccagtgaccgccttgctcctgccgctggccttgctgctccacgccgccaggccggaagtgcagctggttgaatctggcggaggactggttcagcctggcggatctctgagactgtcttgtgccgccagcggcttcagcttcagcgacttttggatgagctgggtccgacaggcccctggcaaaggacttgaatgggtcgccacaatcagccaggccggcagcgagaaggactacgtggactctgtgaagggcagattcaccatcagccgggacaacgccaagaagtccctgtacctccagatgaacagcctgagagccgaggacaccgccgtgtactattgtgcctctggcgtgtacagcttcgactacagaggccagggcaccctggtcacagtctcttctggtaccggcggaggcggatctggcggcggaggtagcggtggcggaggatctgaattcagctacgtgctgacacagcctccatccgtgtctgtggctccaggacagaccgccagaatcacatgcggcggcaacaacatcggcagcaagagcgtgcactggtatcagcagccacctggacaggctccagtggtggtggtgtacgacgacagcgatagacctagcggcatccccgagagattcagcggcagcaattccggcaataccgccacactgaccatcagcagagtggaagctggcgacgaggccgtgtactactgccaagtgtgggacagcagcagcgatcacgtggtgtttggcggcggaacaaagctgacagtgcttctcgagggacagcctaaggccaatcctaccgtgacactgttccctccaagcagcgaagaactccaggccaacaaggccacacttgtgtgcctgatctccgacttctaccctggggctgtgacagtggcttggaaggccgatggatctcctgtgaaagccggcgtggaaaccaccaagccatccaagcagagcaacaacaaatacgccgccagctcctacctgagcctgacacctgagcagtggaagtcccacagatcctacagctgccaagtgacccacgaaggcagcaccgtggaaaagacagtggcccctacagagtgcagccccatcaagaccgatgtgattacaatggaccccaaggacaactgctccaaggacgccaacgataccctgctgctccagctgaccaacaccagcgcctactacatgtacttgttgctgctgctgaagtccgtggtgtacttcgccatcatcacatgctgcctgctgcggagaaccgccttctgctgcaacggcgagaagtctagggccaagcgatctggatctggagcaacaaacttctcactactcaaacaagcaggtgacgtggaggagaatcccgggcctactagtatggactggatttggcgcatccttttccttgtcggcgctgctaccggcgcgcattccgggccccagctccagctgcaagagtctggacctggcctggtcaagcctagcgagacactgagcctgacctgtaccgtgtccggcgatagcatcagcagcggcgattactactggggctggatcagacagcctcctggcaaaggactggaatggatcggccacatctactacagcggcgtgacctactacaaccccagcctgaagtccagagtgaccatcagcgtggacaccagccggaaccagttctccctgaagctgtctagcgtgacagccgccgataccgccgtgtactactgcaccagagaggacagcagcaactggcggagtagaggccagggaacactggtcacagttagctctggatccggcggaggcggaagtggaggcggaggatctggcggcggaggctctttcgaacaactccagctgcaagagtctggccctggcctggtcaagcctagcgaaacactgagcctgacctgtaccgtgtctggcggctctatcagctccagcagctatttctggggctggatcagacaacctcctggcaaaggactggaatggatcggctccatctactacagcggcatcacctactacaaccccagcctgaagtccagagtgaccatctccgtggacaccagcaagaaccagttctccctgaagctgagcagcgtgacagccgccgataccgccgtgtattattgtgccagacatgacggcgctgtggccggcctgtttgattattggggacagggcaccctggtcaccgtgtcatctgctacgcgtgcctctacaaagggaccctccgtgtttcctctggctcccagcagcaagtctacaagcggaggaacagccgctctgggctgcctggtcaaggattactttcccgagcctgtgaccgtgtcctggaatagcggagcactgacaagcggcgtgcacacctttccagccgtgctgcaaagcagcggcctgtactctctgagcagcgtggtcacagtgcctagctctagcctgggcacccagacctacatctgcaatgtgaaccacaagcctagcaacaccaaggtggacaagagagtggaacccaagagctgtgaagtgaaaaccgactccaccgaccacgtgaagcccaaagagacagagaacaccaagcagcccagcaagagctgccacaagcccaaggccatcgtgcacaccgagaaagtgaacatgatgagcctgaccgtgctgggcctgcggatgctgttcgccaaaaccgtggccgtgaacttcctgctgaccgccaagctgttcttcctc

SEQ ID NO: 7473 - DNA, 2706 bp, Artificial Sequence
  Synthetic Polynucloetide
atggccttaccagtgaccgccttgctcctgccgctggccttgctgctccacgccgccaggccggaagtgcagctggttgaatctggcggaggactggttcagcctggcggatctctgagactgtcttgtgccgccagcggcttcagcttcagcgacttttggatgagctgggtccgacaggcccctggcaaaggacttgaatgggtcgccacaatcagccaggccggcagcgagaaggactacgtggactctgtgaagggcagattcaccatcagccgggacaacgccaagaagtccctgtacctccagatgaacagcctgagagccgaggacaccgccgtgtactattgtgcctctggcgtgtacagcttcgactacagaggccagggcaccctggtcacagtctcttctggtaccggcggaggcggatctggcggcggaggtagcggtggcggaggatctgaattcagctacgtgctgacacagcctccatccgtgtctgtggctccaggacagaccgccagaatcacatgcggcggcaacaacatcggcagcaagagcgtgcactggtatcagcagccacctggacaggctccagtggtggtggtgtacgacgacagcgatagacctagcggcatccccgagagattcagcggcagcaattccggcaataccgccacactgaccatcagcagagtggaagctggcgacgaggccgtgtactactgccaagtgtgggacagcagcagcgatcacgtggtgtttggcggcggaacaaagctgacagtgcttctcgagggacagcctaaggccaatcctaccgtgacactgttccctccaagcagcgaagaactccaggccaacaaggccacacttgtgtgcctgatctccgacttctaccctggggctgtgacagtggcttggaaggccgatggatctcctgtgaaagccggcgtggaaaccaccaagccatccaagcagagcaacaacaaatacgccgccagctcctacctgagcctgacacctgagcagtggaagtcccacagatcctacagctgccaagtgacccacgaaggcagcaccgtggaaaagacagtggcccctacagagtgcagcggcagagccgattgcggctttaccagcgagagctaccagcagggcgtgctgagcgccaccatcctgtacgagatcctgctgggcaaggccaccctgtacgccgtgctggtgtctgccctggtgctgatggctatggtcaagcggaaggacagccggggacgcgccaagagaagcggatctggcgtgaagcagaccctgaatttcgacctgctgaagctggctggcgacgtggaatccaacccaggccctactagtatggactggatttggcgcatccttttccttgtcggcgctgctaccggcgcgcattccgggccccagctccagctgcaagagtctggacctggcctggtcaagcctagcgagacactgagcctgacctgtaccgtgtccggcgatagcatcagcagcggcgattactactggggctggatcagacagcctcctggcaaaggactggaatggatcggccacatctactacagcggcgtgacctactacaaccccagcctgaagtccagagtgaccatcagcgtggacaccagccggaaccagttctccctgaagctgtctagcgtgacagccgccgataccgccgtgtactactgcaccagagaggacagcagcaactggcggagtagaggccagggaacactggtcacagttagctctggatccggcggaggcggaagtggaggcggaggatctggcggcggaggctctttcgaacaactccagctgcaagagtctggccctggcctggtcaagcctagcgaaacactgagcctgacctgtaccgtgtctggcggctctatcagctccagcagctatttctggggctggatcagacaacctcctggcaaaggactggaatggatcggctccatctactacagcggcatcacctactacaaccccagcctgaagtccagagtgaccatctccgtggacaccagcaagaaccagttctccctgaagctgagcagcgtgacagccgccgataccgccgtgtattattgtgccagacatgacggcgctgtggccggcctgtttgattattggggacagggcaccctggtcaccgtgtcatctgctacgcgtgcctctacaaagggaccctccgtgtttcctctggctcccagcagcaagtctacaagcggaggaacagccgctctgggctgcctggtcaaggattactttcccgagcctgtgaccgtgtcctggaatagcggagcactgacaagcggcgtgcacacctttccagccgtgctgcaaagcagcggcctgtactctctgagcagcgtggtcacagtgcctagctctagcctgggcacccagacctacatctgcaatgtgaaccacaagcctagcaacaccaaggtggacaagagagtggaacccaagagctgtatccccgaggacacattcttcccaagccccgagagcagctgcgacgtgaagctggtggaaaagagcttcgagacagacaccaacctgaacttccagaacctgagcgtgatcggcttcagaatcctgctgctgaaagtggccggctttaacctgctgatgaccctgcggctgtggtccagc

SEQ ID NO: 7474 - DNA, 2277 bp, Artificial Sequence
  Synthetic Polynucloetide
atggccttaccagtgaccgccttgctcctgccgctggccttgctgctccacgccgccaggccggaagtgcaggttttggagtctggcggaggactggttcagcctggcggatctctgagactgtcttgtgccgccagcggcttcaccttcagcaactttgccatgagctgggtccgacaggcccctggcaaaggacttgaatgggtgtccacaatcagcggcagcgccggcacaacagattacgccgattctgtgaagggcagattcaccatcagccgggacaacagcaagaaaaccctgtacctccagatgaacagcctgcgcgtggaagataccgccgtgtactactgtgccgatggcagaggccccttcttcgattatcgcggccagggcacactggtcaccgtttcttctggtaccggcggaggcggatctggcggcggaggtagcggtggcggaggatctgaattcagctacgtgctgacacagcctccatccgtgtctgtggctccaggacagaccgccagaatcacatgcggcggcaacaacatcggcagcaagagcgtgcactggtatcagcagccacctggacaggctccagtggtggtggtgtacgacgacagcgatagacctagcggcatccccgagagattcagcggcagcaattccggcaataccgccacactgaccatcagcagagtggaagctggcgacgaggccgtgtactactgccaagtgtgggacagcagcagcgatcacgtggtgtttggcggcggaacaaagctgacagtgcttctcgaggacctgaagaacgtgttcccacctgaggtggccgtgttcgagcctagcgaggccgagatcagccacacccagaaagccaccctcgtgtgcctggctaccggcttctaccccgaccatgtggaactgtcttggtgggtcaacggcaaagaggtgcacagcggcgtgtgtaccgacccccagccactgaaagaacagcccgccctgaacgacagccggtactgcctgagcagcagactgagagtgtccgccaccttctggcagaacccccggaaccacttcagatgccaggtgcagttctacggcctgagcgagaacgacgagtggacccaggacagagccaagcccgtgacccagatcgtgtctgccgaagcctggggcagagccgattgcggctttaccagcgagagctaccagcagggcgtgctgagcgccaccatcctgtacgagatcctgctgggcaaggccaccctgtacgccgtgctggtgtctgccctggtgctgatggctatggtcaagcggaaggacagccggggaagggccaagcgatctggatctggagcaacaaacttctcactactcaaacaagcaggtgacgtggaggagaatcccgggcctactagtatggactggatttggcgcatccttttccttgtcggcgctgctaccggcgcgcattccttcgaacaactccagctgcaagagtctggccctggcctggtcaagcctagcgaaacactgagcctgacctgtaccgtgtctggcggctctatcagctccagcagctatttctggggctggatcagacaacctcctggcaaaggactggaatggatcggctccatctactacagcggcatcacctactacaaccccagcctgaagtccagagtgaccatctccgtggacaccagcaagaaccagttctccctgaagctgagcagcgtgacagccgccgataccgccgtgtattattgtgccagacatgacggcgctgtggccggcctgtttgattattggggacagggcaccctggtcaccgtgtcatctgctacgcgtatccagaaccctgatcctgccgtgtaccagctgcgggatagcaagagcagcgacaagagcgtgtgtctgttcaccgacttcgacagccagaccaacgtgtcccagagcaaggactccgacgtgtacatcaccgataagtgcgtgctggacatgcggagcatggacttcaagagcaactccgccgtggcctggtccaacaagtccgatttcgcctgcgccaacgccttcaacaacagcattatccccgaggacacattcttcccaagccccgagagcagctgcgacgtgaagctggtggaaaagagcttcgagacagacaccaacctgaacttccagaacctgagcgtgatcggcttcagaatcctgctgctgaaagtggccggctttaacctgctgatgaccctgcggctgtggtccagc

SEQ ID NO: 7475 - DNA, 2280 bp, Artificial Sequence
  Synthetic Polynucloetide
atggccttaccagtgaccgccttgctcctgccgctggccttgctgctccacgccgccaggccgagctacgtgctgacacagcctccatccgtgtctgtggctccaggacagaccgccagaatcacatgcggcggcaacaacatcggcagcaagagcgtgcactggtatcagcagccacctggacaggctccagtggtggtggtgtacgacgacagcgatagacctagcggcatccccgagagattcagcggcagcaattccggcaataccgccacactgaccatcagcagagtggaagctggcgacgaggccgtgtactactgccaagtgtgggacagcagcagcgatcacgtggtgtttggcggcggaacaaagctgacagtgcttctcgaggacctgaagaacgtgttcccacctgaggtggccgtgttcgagcctagcgaggccgagatcagccacacccagaaagccaccctcgtgtgcctggctaccggcttctaccccgaccatgtggaactgtcttggtgggtcaacggcaaagaggtgcacagcggcgtgtgtaccgacccccagccactgaaagaacagcccgccctgaacgacagccggtactgcctgagcagcagactgagagtgtccgccaccttctggcagaacccccggaaccacttcagatgccaggtgcagttctacggcctgagcgagaacgacgagtggacccaggacagagccaagcccgtgacccagatcgtgtctgccgaagcctggggcagagccgattgcggctttaccagcgagagctaccagcagggcgtgctgagcgccaccatcctgtacgagatcctgctgggcaaggccaccctgtacgccgtgctggtgtctgccctggtgctgatggctatggtcaagcggaaggacagccggggaagggccaagcgatctggatctggagcaacaaacttctcactactcaaacaagcaggtgacgtggaggagaatcccgggcctactagtatggactggatttggcgcatccttttccttgtcggcgctgctaccggcgcccattccgggcccgaagtgcagctggttgaatctggcggaggactggttcaggctggcggatctctgagactgtcttgtgccgccagcggcagaacctttagcatgggctggtttagacaggcccctggcaaagagagagagttcgtcgccgccatcacatactctggcggcagcccttactacgccgactctgtgaagggcagattcaccatcagccgggacaacgccaagaacaccgtgtacctccagatgaacagcctgaagcctgaggacaccgccgtgtactactgcgccgccaatccaacatacggcagcgactggaacgccgagaattggggccagggaacccaagtgacagtgtctagcggatccggcggcggaggatctggcggaggcggatctgggggcggaggctctttcgaacaactccagctgcaagagtctggccctggcctggtcaagcctagcgaaacactgagcctgacctgtaccgtgtctggcggctctatcagctccagcagctatttctggggctggatcagacaacctcctggcaaaggactggaatggatcggctccatctactacagcggcatcacctactacaaccccagcctgaagtccagagtgaccatctccgtggacaccagcaagaaccagttctccctgaagctgagcagcgtgacagccgccgataccgccgtgtattattgtgccagacatgacggcgctgtggccggcctgtttgattattggggacagggcaccctggtcaccgtgtcatctgctacgcgtatccagaaccctgatcctgccgtgtaccagctgcgggatagcaagagcagcgacaagagcgtgtgtctgttcaccgacttcgacagccagaccaacgtgtcccagagcaaggactccgacgtgtacatcaccgataagtgcgtgctggacatgcggagcatggacttcaagagcaactccgccgtggcctggtccaacaagtccgatttcgcctgcgccaacgccttcaacaacagcattatccccgaggacacattcttcccaagccccgagagcagctgcgacgtgaagctggtggaaaagagcttcgagacagacaccaacctgaacttccagaacctgagcgtgatcggcttcagaatcctgctgctgaaagtggccggctttaacctgctgatgaccctgcggctgtggtccagc

SEQ ID NO: 7476 - DNA, 2661 bp, Artificial Sequence
  Synthetic Polynucloetide
atggccttaccagtgaccgccttgctcctgccgctggccttgctgctccacgccgccaggccgagctacgtgctgacacagcctccatccgtgtctgtggctccaggacagaccgccagaatcacatgcggcggcaacaacatcggcagcaagagcgtgcactggtatcagcagccacctggacaggctccagtggtggtggtgtacgacgacagcgatagacctagcggcatccccgagagattcagcggcagcaattccggcaataccgccacactgaccatcagcagagtggaagctggcgacgaggccgtgtactactgccaagtgtgggacagcagcagcgatcacgtggtgtttggcggcggaacaaagctgacagtgcttctcgaggacctgaagaacgtgttcccacctgaggtggccgtgttcgagcctagcgaggccgagatcagccacacccagaaagccaccctcgtgtgcctggctaccggcttctaccccgaccatgtggaactgtcttggtgggtcaacggcaaagaggtgcacagcggcgtgtgtaccgacccccagccactgaaagaacagcccgccctgaacgacagccggtactgcctgagcagcagactgagagtgtccgccaccttctggcagaacccccggaaccacttcagatgccaggtgcagttctacggcctgagcgagaacgacgagtggacccaggacagagccaagcccgtgacccagatcgtgtctgccgaagcctggggcagagccgattgcggctttaccagcgagagctaccagcagggcgtgctgagcgccaccatcctgtacgagatcctgctgggcaaggccaccctgtacgccgtgctggtgtctgccctggtgctgatggctatggtcaagcggaaggacagccggggaagggccaagcgatctggatctggagcaacaaacttctcactactcaaacaagcaggtgacgtggaggagaatcccgggcctactagtatggactggatttggcgcatccttttccttgtcggcgctgctaccggcgcccattcccaactgcaactgcaagagtctggccctggcctggtcaagccttctgaaaccctgagcctgacctgtaccgtgtccggcggctctatcagcagcggcgattactactggggctggatcagacagcctccaggcaagggactcgaatggatcggcagcatcagctacagcggctccacctactacaacccaagcctgaagtccagagtgaccatcagcgtggacaccagcagaaaccagttctccctgaagctgagcagcgtgacagccgccgatacagccgtgtattattgcaccagagaggacagcagcaactggcggagtagaggacagggcacactggtcacagtgtcctcttctggaggcggtggaagcggtggaggaggatctgaagtgcagctggttgaatctggcggaggactggttcaggctggcggatctctgagactgtcttgtgccgccagcggcagaacctttagcatgggctggtttagacaggcccctggcaaagagagagagttcgtcgccgccatcacatactctggcggcagcccttactacgccgactctgtgaagggcagattcaccatcagccgggacaacgccaagaacaccgtgtacctccagatgaacagcctgaagcctgaggacaccgccgtgtactactgcgccgccaatccaacatacggcagcgactggaacgccgagaattggggccagggaacccaagtgacagtgtctagcggatccggcggcggaggatctggcggaggcggatctgggggcggaggctctttcgaacaactccagctgcaagagtctggccctggcctggtcaagcctagcgaaacactgagcctgacctgtaccgtgtctggcggctctatcagctccagcagctatttctggggctggatcagacaacctcctggcaaaggactggaatggatcggctccatctactacagcggcatcacctactacaaccccagcctgaagtccagagtgaccatctccgtggacaccagcaagaaccagttctccctgaagctgagcagcgtgacagccgccgataccgccgtgtattattgtgccagacatgacggcgctgtggccggcctgtttgattattggggacagggcaccctggtcaccgtgtcatctgctacgcgtatccagaaccctgatcctgccgtgtaccagctgcgggatagcaagagcagcgacaagagcgtgtgtctgttcaccgacttcgacagccagaccaacgtgtcccagagcaaggactccgacgtgtacatcaccgataagtgcgtgctggacatgcggagcatggacttcaagagcaactccgccgtggcctggtccaacaagtccgatttcgcctgcgccaacgccttcaacaacagcattatccccgaggacacattcttcccaagccccgagagcagctgcgacgtgaagctggtggaaaagagcttcgagacagacaccaacctgaacttccagaacctgagcgtgatcggcttcagaatcctgctgctgaaagtggccggctttaacctgctgatgaccctgcggctgtggtccagc

SEQ ID NO: 7477 - DNA, 2688 bp, Artificial Sequence
  Synthetic Polynucloetide
atggccttaccagtgaccgccttgctcctgccgctggccttgctgctccacgccgccaggccggaagtgcaggttttggagtctggcggaggactggttcagcctggcggatctctgagactgtcttgtgccgccagcggcttcaccttcagcaactttgccatgagctgggtccgacaggcccctggcaaaggacttgaatgggtgtccacaatcagcggcagcgccggcacaacagattacgccgattctgtgaagggcagattcaccatcagccgggacaacagcaagaaaaccctgtacctccagatgaacagcctgcgcgtggaagataccgccgtgtactactgtgccgatggcagaggccccttcttcgattatcgcggccagggcacactggtcaccgtttcttctggtaccggcggaggcggatctggcggcggaggtagcggtggcggaggatctgaattcagctacgtgctgacacagcctccatccgtgtctgtggctccaggacagaccgccagaatcacatgcggcggcaacaacatcggcagcaagagcgtgcactggtatcagcagccacctggacaggctccagtggtggtggtgtacgacgacagcgatagacctagcggcatccccgagagattcagcggcagcaattccggcaataccgccacactgaccatcagcagagtggaagctggcgacgaggccgtgtactactgccaagtgtgggacagcagcagcgatcacgtggtgtttggcggcggaacaaagctgacagtgcttctcgaggacctgaagaacgtgttcccacctgaggtggccgtgttcgagcctagcgaggccgagatcagccacacccagaaagccaccctcgtgtgcctggctaccggcttctaccccgaccatgtggaactgtcttggtgggtcaacggcaaagaggtgcacagcggcgtgtgtaccgacccccagccactgaaagaacagcccgccctgaacgacagccggtactgcctgagcagcagactgagagtgtccgccaccttctggcagaacccccggaaccacttcagatgccaggtgcagttctacggcctgagcgagaacgacgagtggacccaggacagagccaagcccgtgacccagatcgtgtctgccgaagcctggggcagagccgattgcggctttaccagcgagagctaccagcagggcgtgctgagcgccaccatcctgtacgagatcctgctgggcaaggccaccctgtacgccgtgctggtgtctgccctggtgctgatggctatggtcaagcggaaggacagccggggaagggccaagcgatctggatctggagcaacaaacttctcactactcaaacaagcaggtgacgtggaggagaatcccgggcctactagtatggactggatttggcgcatccttttccttgtcggcgctgctaccggcgcccattccgggcccgaagtgcagctggttgaatctggcggaggactggttcaggctggcggatctctgagactgtcttgtgccgccagcggcagaacctttagcatgggctggtttagacaggcccctggcaaagagagagagttcgtcgccgccatcacatacagcggcggcagcccttactacgcctcttctgtcagaggccggttcaccatcagccgggacaacgccaagaacaccgtgtacctccagatgaacagcctgaagccagaggacaccgccgtgtactactgtgccgccaatccaacctacggcagcgactggaatgccgagaattggggccagggcacccaagtgacagtgtctagtggatccggcggcggaggatctggcggaggcggatctgggggcggaggctctttcgaacaactccagctgcaagagtctggccctggcctggtcaagcctagcgaaacactgagcctgacctgtaccgtgtctggcggctctatcagctccagcagctatttctggggctggatcagacaacctcctggcaaaggactggaatggatcggctccatctactacagcggcatcacctactacaaccccagcctgaagtccagagtgaccatctccgtggacaccagcaagaaccagttctccctgaagctgagcagcgtgacagccgccgataccgccgtgtattattgtgccagacatgacggcgctgtggccggcctgtttgattattggggacagggcaccctggtcaccgtgtcatctgctacgcgtatccagaaccctgatcctgccgtgtaccagctgcgggatagcaagagcagcgacaagagcgtgtgtctgttcaccgacttcgacagccagaccaacgtgtcccagagcaaggactccgacgtgtacatcaccgataagtgcgtgctggacatgcggagcatggacttcaagagcaactccgccgtggcctggtccaacaagtccgatttcgcctgcgccaacgccttcaacaacagcattatccccgaggacacattcttcccaagccccgagagcagctgcgacgtgaagctggtggaaaagagcttcgagacagacaccaacctgaacttccagaacctgagcgtgatcggcttcagaatcctgctgctgaaagtggccggctttaacctgctgatgaccctgcggctgtggtccagc

SEQ ID NO: 7478 - DNA, 2184 bp, Artificial Sequence
  Synthetic Polynucloetide
atggccttaccagtgaccgccttgctcctgccgctggccttgctgctccacgccgccaggccgagctacgtgctgacacagcctccatccgtgtctgtggctccaggacagaccgccagaatcacatgcggcggcaacaacatcggcagcaagagcgtgcactggtatcagcagccacctggacaggctccagtggtggtggtgtacgacgacagcgatagacctagcggcatccccgagagattcagcggcagcaattccggcaataccgccacactgaccatcagcagagtggaagctggcgacgaggccgtgtactactgccaagtgtgggacagcagcagcgatcacgtggtgtttggcggcggaacaaagctgacagtgcttggcggaggcggaagtggaggcggaggatctggcggcggaggctctcaactccagctgcaagagtctggccctggcctggtcaagcctagcgaaacactgagcctgacctgtaccgtgtctggcggctctatcagctccggcagctatatctggggctggatcagacaacctcctggcaaaggactggaatggatcggctccatctactacagcggcatcacctactacaaccccagcctgaagtccagagtgaccatctccgtggacaccagcaagaaccagttctccctgaagctgagcagcgtgacagccgccgataccgccgtgtattattgtgccagacatgacggcgctgtggccggcctgtttgattattggggacagggcaccctggtcaccgtgtcatctgctacgcgtgagcagaaactgatctcggaagaggatctggcgaagcccaccacgacgccagcgccgcgaccaccaacaccggcgcccaccatcgcgtcgcagcccctgtccctgcgcccagaggcgtgccggccagcggcggggggcgcagtgcacacgagggggctggacttcgcctgtgacatctacatctgggcgcccttggccgggacttgtggggtccttctcctgtcactggttatcaccctttactgcaaacggggcagaaagaaactcctgtatatattcaaacaaccatttatgagaccagtacaaactactcaagaggaagatggctgtagctgccgatttccagaagaagaagaaggaggatgtgaactgagagtgaagttcagcaggagcgcagacgcccccgcgtaccagcagggccagaaccagctctataacgagctgaatctaggacgaagagaggagtacgatgttttggacaagagacgtggccgggaccctgagatggggggaaagccgagaaggaagaaccctcaggaaggcctgtacaatgaactgcagaaagataagatggcggaggcctacagtgagattgggatgaaaggcgagcgccggaggggcaaggggcacgatggcctttaccagggtctcagtacagccaccaaggacacctacgacgcccttcacatgcaggccctgccccctcgctctagtggctccggcgagggcagaggaagtctactaacctgcggagatgtggaagaaaatcctggcccacatatgaccgagtacaagcccacggtgcgcctcgccacccgcgacgacgtccccagggccgtacgcaccctcgccgccgcgttcgccgactaccccgccacgcgccacaccgtcgatccggaccgccacatcgagcgggtcaccgagctgcaagaactcttcctcacgcgcgtcgggctcgacatcggcaaggtgtgggtcgcggacgacggcgccgcggtggcggtctggaccacgccggagagcgtcgaagcgggggcggtgttcgccgagatcggcccgcgcatggccgagttgagcggttcccggctggccgcgcagcaacagatggaaggcctcctggcgccgcaccggcccaaggagcccgcgtggttcctggccaccgtcggcgtctcgcccgaccaccagggcaagggtctgggcagcgccgtcgtgctccccggagtggaggcggccgagcgcgccggggtgcccgccttcctggagacctccgcgccccgcaacctccccttctacgagcggctcggcttcaccgtcaccgccgacgtcgaggtgcccgaaggaccgcgcacctggtgcatgacccgcaagcccggtgcctga

SEQ ID NO: 7479 - DNA, 2166 bp, Artificial Sequence
  Synthetic Polynucloetide
atggccttaccagtgaccgccttgctcctgccgctggccttgctgctccacgccgccaggccgagctacgtgctgacacagcctccatccgtgtctgtggctccaggacagaccgccagaatcacatgcggcggcaacaacatcggcagcaagagcgtgcactggtatcagcagccacctggacaggctccagtggtggtggtgtacgacgacagcgatagacctagcggcatccccgagagattcagcggcagcaattccggcaataccgccacactgaccatcagcagagtggaagctggcgacgaggccgtgtactactgccaagtgtgggacagcagcagcgatcacgtggtgtttggcggcggaacaaagctgacagtgcttggcggaggcggaagtggaggcggaggatctggcggcggaggctctcaactccagctgcaagagtctggccctggcctggtcaagcctagcgaaacactgagcctgacctgtaccgtgtctggcggctctatcagctccggcagctatatctggggctggatcagacaacctcctggcaaaggactggaatggatcggctccatctactacagcggcatcacctactacaaccccagcctgaagtccagagtgaccatctccgtggacaccagcaagaaccagttctccctgaagctgagcagcgtgacagccgccgataccgccgtgtattattgtgccagacatgacggcgctgtggccggcctgtttgattattggggacagggcaccctggtcaccgtgtcatctgctacgcgtgagcagaaactgatctcggaagaggatctgaaaattgaagttatgtatcctcctccttacctagacaatgagaagagcaatggaaccattatccatgtgaaagggaaacacctttgtccaagtcccctatttcccggaccttctaagcccttttgggtgctggtggtggttgggggagtcctggcttgctatagcttgctagtaacagtggcctttattattttctgggtgaggagtaagaggagcaggctcctgcacagtgactacatgaacatgactccacgccgccccggacccacccgcaagcattaccagccctatgccccaccacgcgacttcgcagcctatcgctccagagtgaagttcagcaggagcgcagacgcccccgcgtaccagcagggccagaaccagctctataacgagctcaatctaggacgaagagaggagtacgatgttttggacaagagacgtggccgggaccctgagatggggggaaagccgagaaggaagaaccctcaggaaggcctgtacaatgaactgcagaaagataagatggcggaggcctacagtgagattgggatgaaaggcgagcgccggaggggcaaggggcacgatggcctttaccagggtctcagtacagccaccaaggacacctacgacgcccttcacatgcaggccctgccccctcgctctagtggctccggcgagggcagaggaagtctactaacctgcggagatgtggaagaaaatcctggcccacatatgaccgagtacaagcccacggtgcgcctcgccacccgcgacgacgtccccagggccgtacgcaccctcgccgccgcgttcgccgactaccccgccacgcgccacaccgtcgatccggaccgccacatcgagcgggtcaccgagctgcaagaactcttcctcacgcgcgtcgggctcgacatcggcaaggtgtgggtcgcggacgacggcgccgcggtggcggtctggaccacgccggagagcgtcgaagcgggggcggtgttcgccgagatcggcccgcgcatggccgagttgagcggttcccggctggccgcgcagcaacagatggaaggcctcctggcgccgcaccggcccaaggagcccgcgtggttcctggccaccgtcggcgtctcgcccgaccaccagggcaagggtctgggcagcgccgtcgtgctccccggagtggaggcggccgagcgcgccggggtgcccgccttcctggagacctccgcgccccgcaacctccccttctacgagcggctcggcttcaccgtcaccgccgacgtcgaggtgcccgaaggaccgcgcacctggtgcatgacccgcaagcccggtgcctga

SEQ ID NO: 7480 - DNA, 1494 bp, Artificial Sequence
  Synthetic Polynucloetide
atggccttaccagtgaccgccttgctcctgccgctggccttgctgctccacgccgccaggccgagctacgtgctgacacagcctccatccgtgtctgtggctccaggacagaccgccagaatcacatgcggcggcaacaacatcggcagcaagagcgtgcactggtatcagcagccacctggacaggctccagtggtggtggtgtacgacgacagcgatagacctagcggcatccccgagagattcagcggcagcaattccggcaataccgccacactgaccatcagcagagtggaagctggcgacgaggccgtgtactactgccaagtgtgggacagcagcagcgatcacgtggtgtttggcggcggaacaaagctgacagtgcttggcggaggcggaagtggaggcggaggatctggcggcggaggctctcaactccagctgcaagagtctggccctggcctggtcaagcctagcgaaacactgagcctgacctgtaccgtgtctggcggctctatcagctccggcagctatatctggggctggatcagacaacctcctggcaaaggactggaatggatcggctccatctactacagcggcatcacctactacaaccccagcctgaagtccagagtgaccatctccgtggacaccagcaagaaccagttctccctgaagctgagcagcgtgacagccgccgataccgccgtgtattattgtgccagacatgacggcgctgtggccggcctgtttgattattggggacagggcaccctggtcaccgtgtcatctgctacgcgtgagcagaaactgatctcggaagaggatctgaaaattgaagttatgtatcctcctccttacctagacaatgagaagagcaatggaaccattatccatgtgaaagggaaacacctttgtccaagtcccctatttcccggaccttctaagcccttttgggtgctggtggtggttgggggagtcctggcttgctatagcttgctagtaacagtggcctttattattttctgggtgaggagtaagaggagcaggctcctgcacagtgactacatgaacatgactccacgccgccccggacccacccgcaagcattaccagccctatgccccaccacgcgacttcgcagcctatcgctccagagtgaagttcagcaggagcgcagacgcccccgcgtaccagcagggccagaaccagctctataacgagctcaatctaggacgaagagaggagtacgatgttttggacaagagacgtggccgggaccctgagatggggggaaagccgagaaggaagaaccctcaggaaggcctgtacaatgaactgcagaaagataagatggcggaggcctacagtgagattgggatgaaaggcgagcgccggaggggcaaggggcacgatggcctttaccagggtctcagtacagccaccaaggacacctacgacgcccttcacatgcaggccctgccccctcgc

SEQ ID NO: 7481 - DNA, 1515 bp, Artificial Sequence
  Synthetic Polynucloetide
atggccttaccagtgaccgccttgctcctgccgctggccttgctgctccacgccgccaggccgagctacgtgctgacacagcctccatccgtgtctgtggctccaggacagaccgccagaatcacatgcggcggcaacaacatcggcagcaagagcgtgcactggtatcagcagccacctggacaggctccagtggtggtggtgtacgacgacagcgatagacctagcggcatccccgagagattcagcggcagcaattccggcaataccgccacactgaccatcagcagagtggaagctggcgacgaggccgtgtactactgccaagtgtgggacagcagcagcgatcacgtggtgtttggcggcggaacaaagctgacagtgcttggcggaggcggaagtggaggcggaggatctggcggcggaggctctcaactccagctgcaagagtctggccctggcctggtcaagcctagcgaaacactgagcctgacctgtaccgtgtctggcggctctatcagctccggcagctatatctggggctggatcagacaacctcctggcaaaggactggaatggatcggctccatctactacagcggcatcacctactacaaccccagcctgaagtccagagtgaccatctccgtggacaccagcaagaaccagttctccctgaagctgagcagcgtgacagccgccgataccgccgtgtattattgtgccagacatgacggcgctgtggccggcctgtttgattattggggacagggcaccctggtcaccgtgtcatctgctacgcgtgagcagaaactgatctcggaagaggatctggcgaagcccaccacgacgccagcgccgcgaccaccaacaccggcgcccaccatcgcgtcgcagcccctgtccctgcgcccagaggcgtgccggccagcggcggggggcgcagtgcacacgagggggctggacttcgcctgtgacatctacatctgggcgcccttggccgggacttgtggggtccttctcctgtcactggttatcaccctttactgcaaacggggcagaaagaaactcctgtatatattcaaacaaccatttatgagaccagtacaaactactcaagaggaagatggctgtagctgccgatttccagaagaagaagaaggaggatgtgaactgagagtgaagttcagcaggagcgcagacgcccccgcgtaccagcagggccagaaccagctctataacgagctgaatctaggacgaagagaggagtacgatgttttggacaagagacgtggccgggaccctgagatggggggaaagccgagaaggaagaaccctcaggaaggcctgtacaatgaactgcagaaagataagatggcggaggcctacagtgagattgggatgaaaggcgagcgccggaggggcaaggggcacgatggcctttaccagggtctcagtacagccaccaaggacacctacgacgcccttcacatgcaggccctgccccctcgctga

SEQ ID NO: 7482 - DNA, 1515 bp, Artificial Sequence
  Synthetic Polynucloetide
atggccttaccagtgaccgccttgctcctgccgctggccttgctgctccacgccgccaggccgcaactccagctgcaagagtctggccctggcctggtcaagcctagcgaaacactgagcctgacctgtaccgtgtctggcggctctatcagctccggcagctatatctggggctggatcagacaacctcctggcaaaggactggaatggatcggctccatctactacagcggcatcacctactacaaccccagcctgaagtccagagtgaccatctccgtggacaccagcaagaaccagttctccctgaagctgagcagcgtgacagccgccgataccgccgtgtattattgtgccagacatgacggcgctgtggccggcctgtttgattattggggacagggcaccctggtcaccgtgtcatctgctggcggaggcggaagtggaggcggaggatctggcggcggaggctctagctacgtgctgacacagcctccatccgtgtctgtggctccaggacagaccgccagaatcacatgcggcggcaacaacatcggcagcaagagcgtgcactggtatcagcagccacctggacaggctccagtggtggtggtgtacgacgacagcgatagacctagcggcatccccgagagattcagcggcagcaattccggcaataccgccacactgaccatcagcagagtggaagctggcgacgaggccgtgtactactgccaagtgtgggacagcagcagcgatcacgtggtgtttggcggcggaacaaagctgacagtgcttacgcgtgagcagaaactgatctcggaagaggatctggcgaagcccaccacgacgccagcgccgcgaccaccaacaccggcgcccaccatcgcgtcgcagcccctgtccctgcgcccagaggcgtgccggccagcggcggggggcgcagtgcacacgagggggctggacttcgcctgtgacatctacatctgggcgcccttggccgggacttgtggggtccttctcctgtcactggttatcaccctttactgcaaacggggcagaaagaaactcctgtatatattcaaacaaccatttatgagaccagtacaaactactcaagaggaagatggctgtagctgccgatttccagaagaagaagaaggaggatgtgaactgagagtgaagttcagcaggagcgcagacgcccccgcgtaccagcagggccagaaccagctctataacgagctgaatctaggacgaagagaggagtacgatgttttggacaagagacgtggccgggaccctgagatggggggaaagccgagaaggaagaaccctcaggaaggcctgtacaatgaactgcagaaagataagatggcggaggcctacagtgagattgggatgaaaggcgagcgccggaggggcaaggggcacgatggcctttaccagggtctcagtacagccaccaaggacacctacgacgcccttcacatgcaggccctgccccctcgctga

SEQ ID NO: 7483 - DNA, 2754 bp, Artificial Sequence
  Synthetic Polynucloetide
atggccttaccagtgaccgccttgctcctgccgctggccttgctgctccacgccgccaggccgagctacgtgctgacacagcctccatccgtgtctgtggctccaggacagaccgccagaatcacatgcggcggcaacaacatcggcagcaagagcgtgcactggtatcagcagccacctggacaggctccagtggtggtggtgtacgacgacagcgatagacctagcggcatccccgagagattcagcggcagcaattccggcaataccgccacactgaccatcagcagagtggaagctggcgacgaggccgtgtactactgccaagtgtgggacagcagcagcgatcacgtggtgtttggcggcggaacaaagctgacagtgcttggcggaggcggaagtggaggcggaggatctggcggcggaggctctcaactccagctgcaagagtctggccctggcctggtcaagcctagcgaaacactgagcctgacctgtaccgtgtctggcggctctatcagctccggcagctatatctggggctggatcagacaacctcctggcaaaggactggaatggatcggctccatctactacagcggcatcacctactacaaccccagcctgaagtccagagtgaccatctccgtggacaccagcaagaaccagttctccctgaagctgagcagcgtgacagccgccgataccgccgtgtattattgtgccagacatgacggcgctgtggccggcctgtttgattattggggacagggcaccctggtcaccgtgtcatctgctacgcgtgagcagaaactgatctcggaagaggatctggcgaagcccaccacgacgccagcgccgcgaccaccaacaccggcgcccaccatcgcgtcgcagcccctgtccctgcgcccagaggcgtgccggccagcggcggggggcgcagtgcacacgagggggctggacttcgcctgtgacatctacatctgggcgcccttggccgggacttgtggggtccttctcctgtcactggttatcaccctttactgcgggcgcgccagagtgaagttcagcaggagcgcagacgcccccgcgtaccagcagggccagaaccagctctataacgagctgaatctaggacgaagagaggagtacgatgttttggacaagagacgtggccgggaccctgagatggggggaaagccgagaaggaagaaccctcaggaaggcctgtacaatgaactgcagaaagataagatggcggaggcctacagtgagattgggatgaaaggcgagcgccggaggggcaaggggcacgatggcctttaccagggtctcagtacagccaccaaggacacctacgacgcccttcacatgcaggccctgccccctcgctctagaggatctggagcaacaaacttctcactactcaaacaagcaggtgacgtggaggagaatcccgggcctgggatccacatggccacttacgaggttctctgtgaggtggcgcggaaactgggcacggatgacagggaagtggtattgttcctcctaaacgtgttcatacctcaacccacactggcccaattaattggagctcttagagctttaaaggaggagggcaggttaacgtttcccctgttagcggaatgtctgtttcgtgcaggtcgcagagacctcttgcgcgacctgcttcacttagacccgcgttttttagagcgccacctagcgggcacaatgagttatttcagcccttatcagctcactgttctccacgtagacggggagctgtgtgcgagggatattaggtctttgatatttttaagcaaggacactatagggtctcgcagcacaccacagacattcttacactgggtgtactgtatggaaaacttagacctactgggtcccactgacgtggatgccctaatgtcaatgcttagatctttgtcaagagtagacctacagcgccaagtgcaaaccctaatgggccttcacctttccggcccatcacactcccaacactatcgccatacaccactcgagaccgatttctacgactacaaggacgacgatgacaagactagtggctccggcgagggcagaggaagtctactaacctgcggagatgtggaagaaaatcctggcccacatatgaccgagtacaagcccacggtgcgcctcgccacccgcgacgacgtccccagggccgtacgcaccctcgccgccgcgttcgccgactaccccgccacgcgccacaccgtcgatccggaccgccacatcgagcgggtcaccgagctgcaagaactcttcctcacgcgcgtcgggctcgacatcggcaaggtgtgggtcgcggacgacggcgccgcggtggcggtctggaccacgccggagagcgtcgaagcgggggcggtgttcgccgagatcggcccgcgcatggccgagttgagcggttcccggctggccgcgcagcaacagatggaaggcctcctggcgccgcaccggcccaaggagcccgcgtggttcctggccaccgtcggcgtctcgcccgaccaccagggcaagggtctgggcagcgccgtcgtgctccccggagtggaggcggccgagcgcgccggggtgcccgccttcctggagacctccgcgccccgcaacctccccttctacgagcggctcggcttcaccgtcaccgccgacgtcgaggtgcccgaaggaccgcgcacctggtgcatgacccgcaagcccggtgcctga

SEQ ID NO: 7484 - DNA, 2574 bp, Artificial Sequence
  Synthetic Polynucloetide
atggccttaccagtgaccgccttgctcctgccgctggccttgctgctccacgccgccaggccgagctacgtgctgacacagcctccatccgtgtctgtggctccaggacagaccgccagaatcacatgcggcggcaacaacatcggcagcaagagcgtgcactggtatcagcagccacctggacaggctccagtggtggtggtgtacgacgacagcgatagacctagcggcatccccgagagattcagcggcagcaattccggcaataccgccacactgaccatcagcagagtggaagctggcgacgaggccgtgtactactgccaagtgtgggacagcagcagcgatcacgtggtgtttggcggcggaacaaagctgacagtgcttctcgagatccagaaccctgatcctgccgtgtaccagctgcgggatagcaagagcagcgacaagagcgtgtgtctgttcaccgacttcgacagccagaccaacgtgtcccagagcaaggactccgacgtgtacatcaccgataagtgcgtgctggacatgcggagcatggacttcaagagcaactccgccgtggcctggtccaacaagtccgatttcgcctgcgccaacgccttcaacaacagcattatccccgaggacacattcttcccaagcagcgacgtgccctgcgacgtgaagctggtggaaaagagcttcgagacagacaccaacctgaacttccagaacctgagcgtgatcggcttcagaatcctgctgctgaaagtggccggctttaacctgctgatgaccctgcggctgtggtccagccgcgccaagagaagcggatctggcgtgaagcagaccctgaatttcgacctgctgaagctggctggcgacgtggaatccaacccaggccctactagtatggactggatttggcgcatccttttccttgtcggcgctgctaccggcgcgcattccttcgaacaactccagctgcaagagtctggccctggcctggtcaagcctagcgaaacactgagcctgacctgtaccgtgtctggcggctctatcagctccggcagctatatctggggctggatcagacaacctcctggcaaaggactggaatggatcggctccatctactacagcggcatcacctactacaaccccagcctgaagtccagagtgaccatctccgtggacaccagcaagaaccagttctccctgaagctgagcagcgtgacagccgccgataccgccgtgtattattgtgccagacatgacggcgctgtggccggcctgtttgattattggggacagggcaccctggtcaccgtgtcatctgctacgcgtgaggacctgaagaacgtgttcccacctgaggtggccgtgttcgagcctagcaaggccgagatcgcccacacccagaaagccaccctcgtgtgcctggctaccggcttctaccccgaccatgtggaactgtcttggtgggtcaacggcaaagaggtgcacagcggcgtgtgtaccgacccccagccactgaaagaacagcccgccctgaacgacagccggtactgcctgagcagcagactgagagtgtccgccaccttctggcagaacccccggaaccacttcagatgccaggtgcagttctacggcctgagcgagaacgacgagtggacccaggacagagccaagcccgtgacccagatcgtgtctgccgaagcctggggcagagccgattgcggcatcaccagcgccagctaccaccagggcgtgctgagcgccaccatcctgtacgagatcctgctgggcaaggccaccctgtacgccgtgctggtgtctgccctggtgctgatggctatggtcaagcggaaggacagccggggaagggccaagcgatctggatctggagcaacaaacttctcactactcaaacaagcaggtgacgtggaggagaatcccgggccttctagaggccatatgaccgagtacaagcccacggtgcgcctcgccacccgcgacgacgtccccagggccgtacgcaccctcgccgccgcgttcgccgactaccccgccacgcgccacaccgtcgatccggaccgccacatcgagcgggtcaccgagctgcaagaactcttcctcacgcgcgtcgggctcgacatcggcaaggtgtgggtcgcggacgacggcgccgcggtggcggtctggaccacgccggagagcgtcgaagcgggggcggtgttcgccgagatcggcccgcgcatggccgagttgagcggttcccggctggccgcgcagcaacagatggaaggcctcctggcgccgcaccggcccaaggagcccgcgtggttcctggccaccgtcggcgtctcgcccgaccaccagggcaagggtctgggcagcgccgtcgtgctccccggagtggaggcggccgagcgcgccggggtgcccgccttcctggagacctccgcgccccgcaacctccccttctacgagcggctcggcttcaccgtcaccgccgacgtcgaggtgcccgaaggaccgcgcacctggtgcatgacccgcaagcccggtgcctga

SEQ ID NO: 7485 - DNA, 2571 bp, Artificial Sequence
  Synthetic Polynucloetide
atggccttaccagtgaccgccttgctcctgccgctggccttgctgctccacgccgccaggccgagctacgtgctgacacagcctccatccgtgtctgtggctccaggacagaccgccagaatcacatgcggcggcaacaacatcggcagcaagagcgtgcactggtatcagcagccacctggacaggctccagtggtggtggtgtacgacgacagcgatagacctagcggcatccccgagagattcagcggcagcaattccggcaataccgccacactgaccatcagcagagtggaagctggcgacgaggccgtgtactactgccaagtgtgggacagcagcagcgatcacgtggtgtttggcggcggaacaaagctgacagtgcttctcgaggacctgaagaacgtgttcccacctgaggtggccgtgttcgagcctagcaaggccgagatcgcccacacccagaaagccaccctcgtgtgcctggctaccggcttctaccccgaccatgtggaactgtcttggtgggtcaacggcaaagaggtgcacagcggcgtgtgtaccgacccccagccactgaaagaacagcccgccctgaacgacagccggtactgcctgagcagcagactgagagtgtccgccaccttctggcagaacccccggaaccacttcagatgccaggtgcagttctacggcctgagcgagaacgacgagtggacccaggacagagccaagcccgtgacccagatcgtgtctgccgaagcctggggcagagccgattgcggcatcaccagcgccagctaccaccagggcgtgctgagcgccaccatcctgtacgagatcctgctgggcaaggccaccctgtacgccgtgctggtgtctgccctggtgctgatggctatggtcaagcggaaggacagccggggaagggccaagcgatctggatctggagcaacaaacttctcactactcaaacaagcaggtgacgtggaggagaatcccgggcctactagtatggactggatttggcgcatccttttccttgtcggcgctgctaccggcgcgcattccttcgaacaactccagctgcaagagtctggccctggcctggtcaagcctagcgaaacactgagcctgacctgtaccgtgtctggcggctctatcagctccggcagctatatctggggctggatcagacaacctcctggcaaaggactggaatggatcggctccatctactacagcggcatcacctactacaaccccagcctgaagtccagagtgaccatctccgtggacaccagcaagaaccagttctccctgaagctgagcagcgtgacagccgccgataccgccgtgtattattgtgccagacatgacggcgctgtggccggcctgtttgattattggggacagggcaccctggtcaccgtgtcatctgctacgcgtatccagaaccctgatcctgccgtgtaccagctgcgggatagcaagagcagcgacaagagcgtgtgtctgttcaccgacttcgacagccagaccaacgtgtcccagagcaaggactccgacgtgtacatcaccgataagtgcgtgctggacatgcggagcatggacttcaagagcaactccgccgtggcctggtccaacaagtccgatttcgcctgcgccaacgccttcaacaacagcattatccccgaggacacattcttcccaagcagcgacgtgccctgcgacgtgaagctggtggaaaagagcttcgagacagacaccaacctgaacttccagaacctgagcgtgatcggcttcagaatcctgctgctgaaagtggccggctttaacctgctgatgaccctgcggctgtggtccagccgcgccaagagaagcggatctggcgtgaagcagaccctgaatttcgacctgctgaagctggctggcgacgtggaatccaacccaggcccttctagaggccatatgaccgagtacaagcccacggtgcgcctcgccacccgcgacgacgtccccagggccgtacgcaccctcgccgccgcgttcgccgactaccccgccacgcgccacaccgtcgatccggaccgccacatcgagcgggtcaccgagctgcaagaactcttcctcacgcgcgtcgggctcgacatcggcaaggtgtgggtcgcggacgacggcgccgcggtggcggtctggaccacgccggagagcgtcgaagcgggggcggtgttcgccgagatcggcccgcgcatggccgagttgagcggttcccggctggccgcgcagcaacagatggaaggcctcctggcgccgcaccggcccaaggagcccgcgtggttcctggccaccgtcggcgtctcgcccgaccaccagggcaagggtctgggcagcgccgtcgtgctccccggagtggaggcggccgagcgcgccggggtgcccgccttcctggagacctccgcgccccgcaacctccccttctacgagcggctcggcttcaccgtcaccgccgacgtcgaggtgcccgaaggaccgcgcacctggtgcatgacccgcaagcccggtgcctga

SEQ ID NO: 7486 - DNA, 1869 bp, Artificial Sequence
  Synthetic Polynucloetide
atggccttaccagtgaccgccttgctcctgccgctggccttgctgctccacgccgccaggccgagctacgtgctgacacagcctccatccgtgtctgtggctccaggacagaccgccagaatcacatgcggcggcaacaacatcggcagcaagagcgtgcactggtatcagcagccacctggacaggctccagtggtggtggtgtacgacgacagcgatagacctagcggcatccccgagagattcagcggcagcaattccggcaataccgccacactgaccatcagcagagtggaagctggcgacgaggccgtgtactactgccaagtgtgggacagcagcagcgatcacgtggtgtttggcggcggaacaaagctgacagtgcttctcgaggacctgaagaacgtgttcccacctgaggtggccgtgttcgagcctagcgaggccgagatcagccacacccagaaagccaccctcgtgtgcctggctaccggcttctaccccgaccatgtggaactgtcttggtgggtcaacggcaaagaggtgcacagcggcgtgtgtaccgacccccagccactgaaagaacagcccgccctgaacgacagccggtactgcctgagcagcagactgagagtgtccgccaccttctggcagaacccccggaaccacttcagatgccaggtgcagttctacggcctgagcgagaacgacgagtggacccaggacagagccaagcccgtgacccagatcgtgtctgccgaagcctggggcagagccgattgcggctttaccagcgagagctaccagcagggcgtgctgagcgccaccatcctgtacgagatcctgctgggcaaggccaccctgtacgccgtgctggtgtctgccctggtgctgatggctatggtcaagcggaaggacagccggggaagggccaagcgatctggatctggagcaacaaacttctcactactcaaacaagcaggtgacgtggaggagaatcccgggcctactagtatggactggatttggcgcatccttttccttgtcggcgctgctaccggcgcgcattccttcgaacaactccagctgcaagagtctggccctggcctggtcaagcctagcgaaacactgagcctgacctgtaccgtgtctggcggctctatcagctccggcagctatatctggggctggatcagacaacctcctggcaaaggactggaatggatcggctccatctactacagcggcatcacctactacaaccccagcctgaagtccagagtgaccatctccgtggacaccagcaagaaccagttctccctgaagctgagcagcgtgacagccgccgataccgccgtgtattattgtgccagacatgacggcgctgtggccggcctgtttgattattggggacagggcaccctggtcaccgtgtcatctgctacgcgtatccagaaccctgatcctgccgtgtaccagctgcgggatagcaagagcagcgacaagagcgtgtgtctgttcaccgacttcgacagccagaccaacgtgtcccagagcaaggactccgacgtgtacatcaccgataagtgcgtgctggacatgcggagcatggacttcaagagcaactccgccgtggcctggtccaacaagtccgatttcgcctgcgccaacgccttcaacaacagcattatccccgaggacacattcttcccaagccccgagagcagctgcgacgtgaagctggtggaaaagagcttcgagacagacaccaacctgaacttccagaacctgagcgtgatcggcttcagaatcctgctgctgaaagtggccggctttaacctgctgatgaccctgcggctgtggtccagc

SEQ ID NO: 7487 - DNA, 2544 bp, Artificial Sequence
  Synthetic Polynucloetide
atggccttaccagtgaccgccttgctcctgccgctggccttgctgctccacgccgccaggccgagctacgtgctgacacagcctccatccgtgtctgtggctccaggacagaccgccagaatcacatgcggcggcaacaacatcggcagcaagagcgtgcactggtatcagcagccacctggacaggctccagtggtggtggtgtacgacgacagcgatagacctagcggcatccccgagagattcagcggcagcaattccggcaataccgccacactgaccatcagcagagtggaagctggcgacgaggccgtgtactactgccaagtgtgggacagcagcagcgatcacgtggtgtttggcggcggaacaaagctgacagtgcttctcgaggacctgaagaacgtgttcccacctgaggtggccgtgttcgagcctagcgaggccgagatcagccacacccagaaagccaccctcgtgtgcctggctaccggcttctaccccgaccatgtggaactgtcttggtgggtcaacggcaaagaggtgcacagcggcgtgtgtaccgacccccagccactgaaagaacagcccgccctgaacgacagccggtactgcctgagcagcagactgagagtgtccgccaccttctggcagaacccccggaaccacttcagatgccaggtgcagttctacggcctgagcgagaacgacgagtggacccaggacagagccaagcccgtgacccagatcgtgtctgccgaagcctggggcagagccgattgcggctttaccagcgagagctaccagcagggcgtgctgagcgccaccatcctgtacgagatcctgctgggcaaggccaccctgtacgccgtgctggtgtctgccctggtgctgatggctatggtcaagcggaaggacagccggggaagggccaagcgatctggatctggagcaacaaacttctcactactcaaacaagcaggtgacgtggaggagaatcccgggcctactagtatggactggatttggcgcatccttttccttgtcggcgctgctaccggcgcgcattccttcgaacaactccagctgcaagagtctggccctggcctggtcaagcctagcgaaacactgagcctgacctgtaccgtgtctggcggctctatcagctccggcagctatatctggggctggatcagacaacctcctggcaaaggactggaatggatcggctccatctactacagcggcatcacctactacaaccccagcctgaagtccagagtgaccatctccgtggacaccagcaagaaccagttctccctgaagctgagcagcgtgacagccgccgataccgccgtgtattattgtgccagacatgacggcgctgtggccggcctgtttgattattggggacagggcaccctggtcaccgtgtcatctgctacgcgtatccagaaccctgatcctgccgtgtaccagctgcgggatagcaagagcagcgacaagagcgtgtgtctgttcaccgacttcgacagccagaccaacgtgtcccagagcaaggactccgacgtgtacatcaccgataagtgcgtgctggacatgcggagcatggacttcaagagcaactccgccgtggcctggtccaacaagtccgatttcgcctgcgccaacgccttcaacaacagcattatccccgaggacacattcttcccaagccccgagagcagctgcgacgtgaagctggtggaaaagagcttcgagacagacaccaacctgaacttccagaacctgagcgtgatcggcttcagaatcctgctgctgaaagtggccggctttaacctgctgatgaccctgcggctgtggtccagccgcgccaagagaagcggatctggcgtgaagcagaccctgaatttcgacctgctgaagctggctggcgacgtggaatccaacccaggcccttctagaggcgggatccacaccatggctacctacgaggtgctgtgcgaggtggcaagaaagctgggcaccgacgacagagaagtggtgctgttcctgctgaacgtgttcatccctcagcctacactggcccagctgatcggtgcactgagagccctgaaagaggaaggccggctgacctttcctctgctggccgaatgcctgttcagagccggaagaagggatctgctgcgggacctgctgcatctggaccccagatttctggaaagacacctggccggcaccatgagctacttcagcccttaccagctgaccgtgctgcacgttgacggcgaactgtgcgccagagatattcggagcctgatcttcctgagcaaggacaccatcggcagccggtctacccctcagacatttctgcactgggtgtactgcatggaaaacctggacctgctcggccccacagatgtggatgccctgatgtccatgctgagaagcctgagcagagtggacctccagagacaggtgcagacactgatgggactgcacctgagcggacctagccacagccagcactacagacacacccct

SEQ ID NO: 7488 - DNA, 1881 bp, Artificial Sequence
  Synthetic Polynucloetide
atggccttaccagtgaccgccttgctcctgccgctggccttgctgctccacgccgccaggccgagctacgtgctgacacagcctccatccgtgtctgtggctccaggacagaccgccagaatcacatgcggcggcaacaacatcggcagcaagagcgtgcactggtatcagcagccacctggacaggctccagtggtggtggtgtacgacgacagcgatagacctagcggcatccccgagagattcagcggcagcaattccggcaataccgccacactgaccatcagcagagtggaagctggcgacgaggccgtgtactactgccaagtgtgggacagcagcagcgatcacgtggtgtttggcggcggaacaaagctgacagtgcttctcgagatccagaaccctgatcctgccgtgtaccagctgcgggatagcaagagcagcgacaagagcgtgtgtctgttcaccgacttcgacagccagaccaacgtgtcccagagcaaggactccgacgtgtacatcaccgataagtgcgtgctggacatgcggagcatggacttcaagagcaactccgccgtggcctggtccaacaagtccgatttcgcctgcgccaacgccttcaacaacagcattatccccgaggacacattcttcccaagccccgagagcagctgcgacgtgaagctggtggaaaagagcttcgagacagacaccaacctgaacttccagaacctgagcgtgatcggcttcagaatcctgctgctgaaagtggccggctttaacctgctgatgaccctgcggctgtggtccagccgcgccaagagaagcggatctggcgtgaagcagaccctgaatttcgacctgctgaagctggctggcgacgtggaatccaacccaggccctactagtatggactggatttggcgcatccttttccttgtcggcgctgctaccggcgcgcattccttcgaacaactccagctgcaagagtctggccctggcctggtcaagcctagcgaaacactgagcctgacctgtaccgtgtctggcggctctatcagctccggcagctatatctggggctggatcagacaacctcctggcaaaggactggaatggatcggctccatctactacagcggcatcacctactacaaccccagcctgaagtccagagtgaccatctccgtggacaccagcaagaaccagttctccctgaagctgagcagcgtgacagccgccgataccgccgtgtattattgtgccagacatgacggcgctgtggccggcctgtttgattattggggacagggcaccctggtcaccgtgtcatctgctacgcgtgaggacctgaagaacgtgttcccacctgaggtggccgtgttcgagcctagcgaggccgagatcagccacacccagaaagccaccctcgtgtgcctggctaccggcttctaccccgaccatgtggaactgtcttggtgggtcaacggcaaagaggtgcacagcggcgtgtgtaccgacccccagccactgaaagaacagcccgccctgaacgacagccggtactgcctgagcagcagactgagagtgtccgccaccttctggcagaacccccggaaccacttcagatgccaggtgcagttctacggcctgagcgagaacgacgagtggacccaggacagagccaagcccgtgacccagatcgtgtctgccgaagcctggggcagagccgattgcggctttaccagcgagagctaccagcagggcgtgctgagcgccaccatcctgtacgagatcctgctgggcaaggccaccctgtacgccgtgctggtgtctgccctggtgctgatggctatggtcaagcggaaggacagccgggga

SEQ ID NO: 7489 - DNA, 2547 bp, Artificial Sequence
  Synthetic Polynucloetide
atggccttaccagtgaccgccttgctcctgccgctggccttgctgctccacgccgccaggccgagctacgtgctgacacagcctccatccgtgtctgtggctccaggacagaccgccagaatcacatgcggcggcaacaacatcggcagcaagagcgtgcactggtatcagcagccacctggacaggctccagtggtggtggtgtacgacgacagcgatagacctagcggcatccccgagagattcagcggcagcaattccggcaataccgccacactgaccatcagcagagtggaagctggcgacgaggccgtgtactactgccaagtgtgggacagcagcagcgatcacgtggtgtttggcggcggaacaaagctgacagtgcttctcgagatccagaaccctgatcctgccgtgtaccagctgcgggatagcaagagcagcgacaagagcgtgtgtctgttcaccgacttcgacagccagaccaacgtgtcccagagcaaggactccgacgtgtacatcaccgataagtgcgtgctggacatgcggagcatggacttcaagagcaactccgccgtggcctggtccaacaagtccgatttcgcctgcgccaacgccttcaacaacagcattatccccgaggacacattcttcccaagccccgagagcagctgcgacgtgaagctggtggaaaagagcttcgagacagacaccaacctgaacttccagaacctgagcgtgatcggcttcagaatcctgctgctgaaagtggccggctttaacctgctgatgaccctgcggctgtggtccagccgcgccaagagaagcggatctggcgtgaagcagaccctgaatttcgacctgctgaagctggctggcgacgtggaatccaacccaggccctactagtatggactggatttggcgcatccttttccttgtcggcgctgctaccggcgcgcattccttcgaacaactccagctgcaagagtctggccctggcctggtcaagcctagcgaaacactgagcctgacctgtaccgtgtctggcggctctatcagctccggcagctatatctggggctggatcagacaacctcctggcaaaggactggaatggatcggctccatctactacagcggcatcacctactacaaccccagcctgaagtccagagtgaccatctccgtggacaccagcaagaaccagttctccctgaagctgagcagcgtgacagccgccgataccgccgtgtattattgtgccagacatgacggcgctgtggccggcctgtttgattattggggacagggcaccctggtcaccgtgtcatctgctacgcgtgaggacctgaagaacgtgttcccacctgaggtggccgtgttcgagcctagcgaggccgagatcagccacacccagaaagccaccctcgtgtgcctggctaccggcttctaccccgaccatgtggaactgtcttggtgggtcaacggcaaagaggtgcacagcggcgtgtgtaccgacccccagccactgaaagaacagcccgccctgaacgacagccggtactgcctgagcagcagactgagagtgtccgccaccttctggcagaacccccggaaccacttcagatgccaggtgcagttctacggcctgagcgagaacgacgagtggacccaggacagagccaagcccgtgacccagatcgtgtctgccgaagcctggggcagagccgattgcggctttaccagcgagagctaccagcagggcgtgctgagcgccaccatcctgtacgagatcctgctgggcaaggccaccctgtacgccgtgctggtgtctgccctggtgctgatggctatggtcaagcggaaggacagccggggaagggccaagcgatctggatctggagcaacaaacttctcactactcaaacaagcaggtgacgtggaggagaatcccgggccttctagaggcgggatccacaccatggctacctacgaggtgctgtgcgaggtggcaagaaagctgggcaccgacgacagagaagtggtgctgttcctgctgaacgtgttcatccctcagcctacactggcccagctgatcggtgcactgagagccctgaaagaggaaggccggctgacctttcctctgctggccgaatgcctgttcagagccggaagaagggatctgctgcgggacctgctgcatctggaccccagatttctggaaagacacctggccggcaccatgagctacttcagcccttaccagctgaccgtgctgcacgttgacggcgaactgtgcgccagagatattcggagcctgatcttcctgagcaaggacaccatcggcagccggtctacccctcagacatttctgcactgggtgtactgcatggaaaacctggacctgctcggccccacagatgtggatgccctgatgtccatgctgagaagcctgagcagagtggacctccagagacaggtgcagacactgatgggactgcacctgagcggacctagccacagccagcactacagacacacccct

SEQ ID NO: 7490 - DNA, 2706 bp, Artificial Sequence
  Synthetic Polynucloetide
atggccttaccagtgaccgccttgctcctgccgctggccttgctgctccacgccgccaggccgctcgaggggaaaccaattcccaaccctcttctgggactggattcaaccggcagcggcgaggacctgaagaacgtgttcccacctgaggtggccgtgttcgagcctagcaaggccgagatcgcccacacccagaaagccaccctcgtgtgcctggctaccggcttctaccccgaccatgtggaactgtcttggtgggtcaacggcaaagaggtgcacagcggcgtgtgtaccgacccccagccactgaaagaacagcccgccctgaacgacagccggtactgcctgagcagcagactgagagtgtccgccaccttctggcagaacccccggaaccacttcagatgccaggtgcagttctacggcctgagcgagaacgacgagtggacccaggacagagccaagcccgtgacccagatcgtgtctgccgaagcctggggcagagccgattgcggcatcaccagcgccagctaccaccagggcgtgctgagcgccaccatcctgtacgagatcctgctgggcaaggccaccctgtacgccgtgctggtgtctgccctggtgctgatggctatggtcaagcggaaggacagccggggaagggccaagcgatctggatctggagcaacaaacttctcactactcaaacaagcaggtgacgtggaggagaatcccgggcctactagcatggccttaccagtgaccgccttgctcctgccgctggccttgctgctccacgccgccaggccgagctacgtgctgacacagcctccatccgtgtctgtggctccaggacagaccgccagaatcacatgcggcggcaacaacatcggcagcaagagcgtgcactggtatcagcagccacctggacaggctccagtggtggtggtgtacgacgacagcgatagacctagcggcatccccgagagattcagcggcagcaattccggcaataccgccacactgaccatcagcagagtggaagctggcgacgaggccgtgtactactgccaagtgtgggacagcagcagcgatcacgtggtgtttggcggcggaacaaagctgacagtgcttggcggaggcggaagtggaggcggaggatctggcggcggaggctctcaactccagctgcaagagtctggccctggcctggtcaagcctagcgaaacactgagcctgacctgtaccgtgtctggcggctctatcagctccggcagctatatctggggctggatcagacaacctcctggcaaaggactggaatggatcggctccatctactacagcggcatcacctactacaaccccagcctgaagtccagagtgaccatctccgtggacaccagcaagaaccagttctccctgaagctgagcagcgtgacagccgccgataccgccgtgtattattgtgccagacatgacggcgctgtggccggcctgtttgattattggggacagggcaccctggtcaccgtgtcatctgctacgcgtgagcagaaactgatctcggaagaggatgggagcggcatccagaaccctgatcctgccgtgtaccagctgcgggatagcaagagcagcgacaagagcgtgtgtctgttcaccgacttcgacagccagaccaacgtgtcccagagcaaggactccgacgtgtacatcaccgataagtgcgtgctggacatgcggagcatggacttcaagagcaactccgccgtggcctggtccaacaagtccgatttcgcctgcgccaacgccttcaacaacagcattatccccgaggacacattcttcccaagcagcgacgtgccctgcgacgtgaagctggtggaaaagagcttcgagacagacaccaacctgaacttccagaacctgagcgtgatcggcttcagaatcctgctgctgaaagtggccggctttaacctgctgatgaccctgcggctgtggtccagccgcgccaagagaagcggatctggcgtgaagcagaccctgaatttcgacctgctgaagctggctggcgacgtggaatccaacccaggcccttctagaggccatatgaccgagtacaagcccacggtgcgcctcgccacccgcgacgacgtccccagggccgtacgcaccctcgccgccgcgttcgccgactaccccgccacgcgccacaccgtcgatccggaccgccacatcgagcgggtcaccgagctgcaagaactcttcctcacgcgcgtcgggctcgacatcggcaaggtgtgggtcgcggacgacggcgccgcggtggcggtctggaccacgccggagagcgtcgaagcgggggcggtgttcgccgagatcggcccgcgcatggccgagttgagcggttcccggctggccgcgcagcaacagatggaaggcctcctggcgccgcaccggcccaaggagcccgcgtggttcctggccaccgtcggcgtctcgcccgaccaccagggcaagggtctgggcagcgccgtcgtgctccccggagtggaggcggccgagcgcgccggggtgcccgccttcctggagacctccgcgccccgcaacctccccttctacgagcggctcggcttcaccgtcaccgccgacgtcgaggtgcccgaaggaccgcgcacctggtgcatgacccgcaagcccggtgcctga

SEQ ID NO: 7491 - DNA, 2709 bp, Artificial Sequence
  Synthetic Polynucloetide
atggccttaccagtgaccgccttgctcctgccgctggccttgctgctccacgccgccaggccgctcgagcagaaactgatctcggaagaggatctgggctccggcgatcgccctgatcctgccgtgtaccagctgcgggatagcaagagcagcgacaagagcgtgtgtctgttcaccgacttcgacagccagaccaacgtgtcccagagcaaggactccgacgtgtacatcaccgataagtgcgtgctggacatgcggagcatggacttcaagagcaactccgccgtggcctggtccaacaagtccgatttcgcctgcgccaacgccttcaacaacagcattatccccgaggacacattcttcccaagccccgagagcagctgcgacgtgaagctggtggaaaagagcttcgagacagacaccaacctgaacttccagaacctgagcgtgatcggcttcagaatcctgctgctgaaagtggccggctttaacctgctgatgaccctgcggctgtggtccagctctagtcgcgccaagagaagcggatctggcgtgaagcagaccctgaatttcgacctgctgaagctggctggcgacgtggaatccaacccaggccccactagcatggccttaccagtgaccgccttgctcctgccgctggccttgctgctccacgccgccaggccgagctacgtgctgacacagcctccatccgtgtctgtggctccaggacagaccgccagaatcacatgcggcggcaacaacatcggcagcaagagcgtgcactggtatcagcagccacctggacaggctccagtggtggtggtgtacgacgacagcgatagacctagcggcatccccgagagattcagcggcagcaattccggcaataccgccacactgaccatcagcagagtggaagctggcgacgaggccgtgtactactgccaagtgtgggacagcagcagcgatcacgtggtgtttggcggcggaacaaagctgacagtgcttggcggaggcggaagtggaggcggaggatctggcggcggaggctctcaactccagctgcaagagtctggccctggcctggtcaagcctagcgaaacactgagcctgacctgtaccgtgtctggcggctctatcagctccggcagctatatctggggctggatcagacaacctcctggcaaaggactggaatggatcggctccatctactacagcggcatcacctactacaaccccagcctgaagtccagagtgaccatctccgtggacaccagcaagaaccagttctccctgaagctgagcagcgtgacagccgccgataccgccgtgtattattgtgccagacatgacggcgctgtggccggcctgtttgattattggggacagggcaccctggtcaccgtgtcatctgctacgcgtgggaaaccaattcccaaccctcttctgggactggattcaaccggcagcggcgaggacctgaagaacgtgttcccacctgaggtggccgtgttcgagcctagcgaggccgagatcagccacacccagaaagccaccctcgtgtgcctggctaccggcttctaccccgaccatgtggaactgtcttggtgggtcaacggcaaagaggtgcacagcggcgtgtgtaccgacccccagccactgaaagaacagcccgccctgaacgacagccggtactgcctgagcagcagactgagagtgtccgccaccttctggcagaacccccggaaccacttcagatgccaggtgcagttctacggcctgagcgagaacgacgagtggacccaggacagagccaagcccgtgacccagatcgtgtctgccgaagcctggggcagagccgattgcggctttaccagcgagagctaccagcagggcgtgctgagcgccaccatcctgtacgagatcctgctgggcaaggccaccctgtacgccgtgctggtgtctgccctggtgctgatggctatggtcaagcggaaggacagccggggaagggccaagcgatctggatctggagcaacaaacttctcactactcaaacaagcaggtgacgtggaggagaatcccgggccttctagaggccatatgaccgagtacaagcccacggtgcgcctcgccacccgcgacgacgtccccagggccgtacgcaccctcgccgccgcgttcgccgactaccccgccacgcgccacaccgtcgatccggaccgccacatcgagcgggtcaccgagctgcaagaactcttcctcacgcgcgtcgggctcgacatcggcaaggtgtgggtcgcggacgacggcgccgcggtggcggtctggaccacgccggagagcgtcgaagcgggggcggtgttcgccgagatcggcccgcgcatggccgagttgagcggttcccggctggccgcgcagcaacagatggaaggcctcctggcgccgcaccggcccaaggagcccgcgtggttcctggccaccgtcggcgtctcgcccgaccaccagggcaagggtctgggcagcgccgtcgtgctccccggagtggaggcggccgagcgcgccggggtgcccgccttcctggagacctccgcgccccgcaacctccccttctacgagcggctcggcttcaccgtcaccgccgacgtcgaggtgcccgaaggaccgcgcacctggtgcatgacccgcaagcccggtgcctga

SEQ ID NO: 7492 - DNA, 2571 bp, Artificial Sequence
  Synthetic Polynucloetide
atggccttaccagtgaccgccttgctcctgccgctggccttgctgctccacgccgccaggccgagctacgtgctgacacagcctccatccgtgtctgtggctccaggacagaccgccagaatcacatgcggcggcaacaacatcggcagcaagagcgtgcactggtatcagcagccacctggacaggctccagtggtggtggtgtacgacgacagcgatagacctagcggcatccccgagagattcagcggcagcaattccggcaataccgccacactgaccatcagcagagtggaagctggcgacgaggccgtgtactactgccaagtgtgggacagcagcagcgatcacgtggtgtttggcggcggaacaaagctgacagtgcttctcgaggacctgaagaacgtgttcccacctgaggtggccgtgttcgagcctagcgaggccgagatcagccacacccagaaagccaccctcgtgtgcctggctaccggcttctaccccgaccatgtggaactgtcttggtgggtcaacggcaaagaggtgcacagcggcgtgtctaccgacccccagccactgaaagaacagcccgccctgaacgacagccggtactgcctgagcagcagactgagagtgtccgccaccttctggcagaacccccggaaccacttcagatgccaggtgcagttctacggcctgagcgagaacgacgagtggacccaggacagagccaagcccgtgacccagatcgtgtctgccgaagcctggggcagagccgattgcggctttaccagcgagagctaccagcagggcgtgctgagcgccaccatcctgtacgagatcctgctgggcaaggccaccctgtacgccgtgctggtgtctgccctggtgctgatggctatggtcaagcggaaggacagccggggaagggccaagcgatctggatctggagcaacaaacttctcactactcaaacaagcaggtgacgtggaggagaatcccgggcctactagtatggactggatttggcgcatccttttccttgtcggcgctgctaccggcgcgcattccttcgaacaactccagctgcaagagtctggccctggcctggtcaagcctagcgaaacactgagcctgacctgtaccgtgtctggcggctctatcagctccggcagctatatctggggctggatcagacaacctcctggcaaaggactggaatggatcggctccatctactacagcggcatcacctactacaaccccagcctgaagtccagagtgaccatctccgtggacaccagcaagaaccagttctccctgaagctgagcagcgtgacagccgccgataccgccgtgtattattgtgccagacatgacggcgctgtggccggcctgtttgattattggggacagggcaccctggtcaccgtgtcatctgctacgcgtatccagaaccctgatcctgccgtgtaccagctgcgggatagcaagagcagcgacaagagcgtgtgtctgttcaccgacttcgacagccagaccaacgtgtcccagagcaaggactccgacgtgtacatcaccgataagaccgtgctggacatgcggagcatggacttcaagagcaactccgccgtggcctggtccaacaagtccgatttcgcctgcgccaacgccttcaacaacagcattatccccgaggacacattcttcccaagccccgagagcagctgcgacgtgaagctggtggaaaagagcttcgagacagacaccaacctgaacttccagaacctgagcgtgatcggcttcagaatcctgctgctgaaagtggccggctttaacctgctgatgaccctgcggctgtggtccagccgcgccaagagaagcggatctggcgtgaagcagaccctgaatttcgacctgctgaagctggctggcgacgtggaatccaacccaggcccttctagaggccatatgaccgagtacaagcccacggtgcgcctcgccacccgcgacgacgtccccagggccgtacgcaccctcgccgccgcgttcgccgactaccccgccacgcgccacaccgtcgatccggaccgccacatcgagcgggtcaccgagctgcaagaactcttcctcacgcgcgtcgggctcgacatcggcaaggtgtgggtcgcggacgacggcgccgcggtggcggtctggaccacgccggagagcgtcgaagcgggggcggtgttcgccgagatcggcccgcgcatggccgagttgagcggttcccggctggccgcgcagcaacagatggaaggcctcctggcgccgcaccggcccaaggagcccgcgtggttcctggccaccgtcggcgtctcgcccgaccaccagggcaagggtctgggcagcgccgtcgtgctccccggagtggaggcggccgagcgcgccggggtgcccgccttcctggagacctccgcgccccgcaacctccccttctacgagcggctcggcttcaccgtcaccgccgacgtcgaggtgcccgaaggaccgcgcacctggtgcatgacccgcaagcccggtgcctga

SEQ ID NO: 7493 - DNA, 2817 bp, Artificial Sequence
  Synthetic Polynucloetide
atggccttaccagtgaccgccttgctcctgccgctggccttgctgctccacgccgccaggccgagctacgtgctgacacagcctccatccgtgtctgtggctccaggacagaccgccagaatcacatgcggcggcaacaacatcggcagcaagagcgtgcactggtatcagcagccacctggacaggctccagtggtggtggtgtacgacgacagcgatagacctagcggcatccccgagagattcagcggcagcaattccggcaataccgccacactgaccatcagcagagtggaagctggcgacgaggccgtgtactactgccaagtgtgggacagcagcagcgatcacgtggtgtttggcggcggaacaaagctgacagtgcttctcgaggacctgaagaacgtgttcccacctgaggtggccgtgttcgagcctagcgaggccgagatcagccacacccagaaagccaccctcgtgtgcctggctaccggcttctaccccgaccatgtggaactgtcttggtgggtcaacggcaaagaggtgcacagcggcgtgtctaccgacccccagccactgaaagaacagcccgccctgaacgacagccggtactgcctgagcagcagactgagagtgtccgccaccttctggcagaacccccggaaccacttcagatgccaggtgcagttctacggcctgagcgagaacgacgagtggacccaggacagagccaagcccgtgacccagatcgtgtctgccgaagcctggggcagagccgattgcggctttaccagcgagagctaccagcagggcgtgctgagcgccaccatcctgtacgagatcctgctgggcaaggccaccctgtacgccgtgctggtgtctgccctggtgctgatggctatggtcaagcggaaggacagccggggaagggccaagcgatctggatctggagcaacaaacttctcactactcaaacaagcaggtgacgtggaggagaatcccgggcctactagtatggactggatttggcgcatccttttccttgtcggcgctgctaccggcgcgcattccttcgaacaactccagctgcaagagtctggccctggcctggtcaagcctagcgaaacactgagcctgacctgtaccgtgtctggcggctctatcagctccggcagctatatctggggctggatcagacaacctcctggcaaaggactggaatggatcggctccatctactacagcggcatcacctactacaaccccagcctgaagtccagagtgaccatctccgtggacaccagcaagaaccagttctccctgaagctgagcagcgtgacagccgccgataccgccgtgtattattgtgccagacatgacggcgctgtggccggcctgtttgattattggggacagggcaccctggtcaccgtgtcatctgctacgcgtgagcagaaactgatctcggaagaggatgggagcggcaccccattcccttctctggcccctcccatcatgctgctggtggacggcaagcagcagatggtggtcgtgtgcctggtgctggatgtggccccacctggactggacagccccatctggtttagcgccggcaatggctctgccctggacgcctttacctacggcccaagccctgccaccgatggcacctggacaaatctggcccacctgagcctgcccagcgaggaactggcttcttgggagcctctcgtgtgccacacaggacctggcgctgagggacacagcagatccacccagcctatgcacctgtctggcgaggccagcaccgccagaacctgtcctcaggaacctctgagaggcacccctggcggagcactgtggctgggagtgctgagactgctgctgttcaagctgctgctgtttgacctgctgctgacctgctcctgtctgtgcgatcctgccggccctctgccttctcctgccaccaccacaagactgagagccctgggcagccacagactgcaccctgccacagagacaggcggcagagaggccacaagcagccctagaccccagcccagagacagaagatggggcgataccccccctggcagaaagcctggatctccagtccgcgccaagagaagcggatctggcgtgaagcagaccctgaatttcgacctgctgaagctggctggcgacgtggaatccaacccaggcccttctagaggccatatgaccgagtacaagcccacggtgcgcctcgccacccgcgacgacgtccccagggccgtacgcaccctcgccgccgcgttcgccgactaccccgccacgcgccacaccgtcgatccggaccgccacatcgagcgggtcaccgagctgcaagaactcttcctcacgcgcgtcgggctcgacatcggcaaggtgtgggtcgcggacgacggcgccgcggtggcggtctggaccacgccggagagcgtcgaagcgggggcggtgttcgccgagatcggcccgcgcatggccgagttgagcggttcccggctggccgcgcagcaacagatggaaggcctcctggcgccgcaccggcccaaggagcccgcgtggttcctggccaccgtcggcgtctcgcccgaccaccagggcaagggtctgggcagcgccgtcgtgctccccggagtggaggcggccgagcgcgccggggtgcccgccttcctggagacctccgcgccccgcaacctccccttctacgagcggctcggcttcaccgtcaccgccgacgtcgaggtgcccgaaggaccgcgcacctggtgcatgacccgcaagcccggtgcctga

SEQ ID NO: 7494 - DNA, 2871 bp, Artificial Sequence
  Synthetic Polynucloetide
atggccttaccagtgaccgccttgctcctgccgctggccttgctgctccacgccgccaggccgctcgaggacctgaagaacgtgttcccacctgaggtggccgtgttcgagcctagcgaggccgagatcagccacacccagaaagccaccctcgtgtgcctggctaccggcttctaccccgaccatgtggaactgtcttggtgggtcaacggcaaagaggtgcacagcggcgtgtctaccgacccccagccactgaaagaacagcccgccctgaacgacagccggtactgcctgagcagcagactgagagtgtccgccaccttctggcagaacccccggaaccacttcagatgccaggtgcagttctacggcctgagcgagaacgacgagtggacccaggacagagccaagcccgtgacccagatcgtgtctgccgaagcctggggcagagccgattgcggctttaccagcgagagctaccagcagggcgtgctgagcgccaccatcctgtacgagatcctgctgggcaaggccaccctgtacgccgtgctggtgtctgccctggtgctgatggctatggtcaagcggaaggacagccggggaagggccaagcgatctggatctggagcaacaaacttctcactactcaaacaagcaggtgacgtggaggagaatcccgggcctactagcatggccttaccagtgaccgccttgctcctgccgctggccttgctgctccacgccgccaggccgagctacgtgctgacacagcctccatccgtgtctgtggctccaggacagaccgccagaatcacatgcggcggcaacaacatcggcagcaagagcgtgcactggtatcagcagccacctggacaggctccagtggtggtggtgtacgacgacagcgatagacctagcggcatccccgagagattcagcggcagcaattccggcaataccgccacactgaccatcagcagagtggaagctggcgacgaggccgtgtactactgccaagtgtgggacagcagcagcgatcacgtggtgtttggcggcggaacaaagctgacagtgcttggcggaggcggaagtggaggcggaggatctggcggcggaggctctcaactccagctgcaagagtctggccctggcctggtcaagcctagcgaaacactgagcctgacctgtaccgtgtctggcggctctatcagctccggcagctatatctggggctggatcagacaacctcctggcaaaggactggaatggatcggctccatctactacagcggcatcacctactacaaccccagcctgaagtccagagtgaccatctccgtggacaccagcaagaaccagttctccctgaagctgagcagcgtgacagccgccgataccgccgtgtattattgtgccagacatgacggcgctgtggccggcctgtttgattattggggacagggcaccctggtcaccgtgtcatctgctacgcgtgagcagaaactgatctcggaagaggatctggggagcggcaccccattcccttctctggcccctcccatcatgctgctggtggacggcaagcagcagatggtggtcgtgtgcctggtgctggatgtggccccacctggactggacagccccatctggtttagcgccggcaatggctctgccctggacgcctttacctacggcccaagccctgccaccgatggcacctggacaaatctggcccacctgagcctgcccagcgaggaactggcttcttgggagcctctcgtgtgccacacaggacctggcgctgagggacacagcagatccacccagcctatgcacctgtctggcgaggccagcaccgccagaacctgtcctcaggaacctctgagaggcacccctggcggagcactgtggctgggagtgctgagactgctgctgttcaagctgctgctgtttgacctgctgctgacctgctcctgtctgtgcgatcctgccggccctctgccttctcctgccaccaccacaagactgagagccctgggcagccacagactgcaccctgccacagagacaggcggcagagaggccacaagcagccctagaccccagcccagagacagaagatggggcgataccccccctggcagaaagcctggatctccagtccgcgccaagagaagcggatctggcgtgaagcagaccctgaatttcgacctgctgaagctggctggcgacgtggaatccaacccaggcccttctagatctagaggccatatgaccgagtacaagcccacggtgcgcctcgccacccgcgacgacgtccccagggccgtacgcaccctcgccgccgcgttcgccgactaccccgccacgcgccacaccgtcgatccggaccgccacatcgagcgggtcaccgagctgcaagaactcttcctcacgcgcgtcgggctcgacatcggcaaggtgtgggtcgcggacgacggcgccgcggtggcggtctggaccacgccggagagcgtcgaagcgggggcggtgttcgccgagatcggcccgcgcatggccgagttgagcggttcccggctggccgcgcagcaacagatggaaggcctcctggcgccgcaccggcccaaggagcccgcgtggttcctggccaccgtcggcgtctcgcccgaccaccagggcaagggtctgggcagcgccgtcgtgctccccggagtggaggcggccgagcgcgccggggtgcccgccttcctggagacctccgcgccccgcaacctccccttctacgagcggctcggcttcaccgtcaccgccgacgtcgaggtgcccgaaggaccgcgcacctggtgcatgacccgcaagcccggtgcctga

SEQ ID NO: 7495 - DNA, 2682 bp, Artificial Sequence
  Synthetic Polynucloetide
atggccttaccagtgaccgccttgctcctgccgctggccttgctgctccacgccgccaggccgagctacgtgctgacacagcctccatccgtgtctgtggctccaggacagaccgccagaatcacatgcggcggcaacaacatcggcagcaagagcgtgcactggtatcagcagccacctggacaggctccagtggtggtggtgtacgacgacagcgatagacctagcggcatccccgagagattcagcggcagcaattccggcaataccgccacactgaccatcagcagagtggaagctggcgacgaggccgtgtactactgccaagtgtgggacagcagcagcgatcacgtggtgtttggcggcggaacaaagctgacagtgcttctcgaggggaaaccaattcccaaccctcttctgggactggattcaaccggcagcggcgacaagcagctggacgccgacgtgtcccccaagcctaccatcttcctgccctctatcgccgagacaaagctccagaaggccggcacctacctgtgcctgctggaaaagttcttcccagatgtgattaagatccactggcaggaaaagaagtccaacaccatcctgggcagccaggaaggcaacaccatgaagaccaacgacacctacatgaagttcagctggctgaccgtgcccgagaagtccctggacaaagaacacagatgcatcgtgcggcacgaaaacaacaagaacggcgtggaccaggaaatcatcttcccacccatcaagaccgatgtgattacaatggaccccaaggacaactgctccaaggacgccaacgataccctgctgctccagctgaccaacaccagcgcctactacatgtacttgttgctgctgctgaagtccgtggtgtacttcgccatcatcacatgctgcctgctgcggagaaccgccttctgctgcaacggcgagaagtctagggccaagcgatctggatctggagcaacaaacttctcactactcaaacaagcaggtgacgtggaggagaatcccgggcctactagtatggactggatttggcgcatccttttccttgtcggcgctgctaccggcgcgcattccttcgaacaactccagctgcaagagtctggccctggcctggtcaagcctagcgaaacactgagcctgacctgtaccgtgtctggcggctctatcagctccggcagctatatctggggctggatcagacaacctcctggcaaaggactggaatggatcggctccatctactacagcggcatcacctactacaaccccagcctgaagtccagagtgaccatctccgtggacaccagcaagaaccagttctccctgaagctgagcagcgtgacagccgccgataccgccgtgtattattgtgccagacatgacggcgctgtggccggcctgtttgattattggggacagggcaccctggtcaccgtgtcatctgctacgcgtgagcagaaactgatctcggaagaggatgggagcggcagccagcctcacaccaagcccagcgtgttcgtgatgaagaacggcaccaacgtggcctgcctcgtgaaagagttctaccccaaggacatcaggatcaacctggtgtccagcaagaagatcaccgagttcgaccccgccatcgtgatctcccccagcggcaagtacaacgccgtgaagctggggaagtacgaggacagcaacagcgtgacctgctccgtgcagcacgacaacaagaccgtgcacagcaccgactttgaagtgaaaaccgactccaccgaccacgtgaagcccaaagagacagagaacaccaagcagcccagcaagagctgccacaagcccaaggccatcgtgcacaccgagaaagtgaacatgatgagcctgaccgtgctgggcctgcggatgctgttcgccaaaaccgtggccgtgaacttcctgctgaccgccaagctgttcttcctccgcgccaagagaagcggatctggcgtgaagcagaccctgaatttcgacctgctgaagctggctggcgacgtggaatccaacccaggcccttctagaggccatatgaccgagtacaagcccacggtgcgcctcgccacccgcgacgacgtccccagggccgtacgcaccctcgccgccgcgttcgccgactaccccgccacgcgccacaccgtcgatccggaccgccacatcgagcgggtcaccgagctgcaagaactcttcctcacgcgcgtcgggctcgacatcggcaaggtgtgggtcgcggacgacggcgccgcggtggcggtctggaccacgccggagagcgtcgaagcgggggcggtgttcgccgagatcggcccgcgcatggccgagttgagcggttcccggctggccgcgcagcaacagatggaaggcctcctggcgccgcaccggcccaaggagcccgcgtggttcctggccaccgtcggcgtctcgcccgaccaccagggcaagggtctgggcagcgccgtcgtgctccccggagtggaggcggccgagcgcgccggggtgcccgccttcctggagacctccgcgccccgcaacctccccttctacgagcggctcggcttcaccgtcaccgccgacgtcgaggtgcccgaaggaccgcgcacctggtgcatgacccgcaagcccggtgcctga

SEQ ID NO: 7496 - DNA, 1893 bp, Artificial Sequence
  Synthetic Polynucloetide
atggccttaccagtgaccgccttgctcctgccgctggccttgctgctccacgccgccaggccgagctacgtgctgacacagcctccatccgtgtctgtggctccaggacagaccgccagaatcacatgcggcggcaacaacatcggcagcaagagcgtgcactggtatcagcagccacctggacaggctccagtggtggtggtgtacgacgacagcgatagacctagcggcatccccgagagattcagcggcagcaattccggcaataccgccacactgaccatcagcagagtggaagctggcgacgaggccgtgtactactgccaagtgtgggacagcagcagcgatcacgtggtgtttggcggcggaacaaagctgacagtgcttctcgagagccagcctcacaccaagcccagcgtgttcgtgatgaagaacggcaccaacgtggcctgcctcgtgaaagagttctaccccaaggacatcaggatcaacctggtgtccagcaagaagatcaccgagttcgaccccgccatcgtgatctcccccagcggcaagtacaacgccgtgaagctggggaagtacgaggacagcaacagcgtgacctgctccgtgcagcacgacaacaagaccgtgcacagcaccgactttgaagtgaaaaccgactccaccgaccacgtgaagcccaaagagacagagaacaccaagcagcccagcaagagctgccacaagcccaaggccatcgtgcacaccgagaaagtgaacatgatgagcctgaccgtgctgggcctgcggatgctgttcgccaaaaccgtggccgtgaacttcctgctgaccgccaagctgttcttcctcagggccaagcgatctggatctggagcaacaaacttctcactactcaaacaagcaggtgacgtggaggagaatcccgggcctactagtatggactggatttggcgcatccttttccttgtcggcgctgctaccggcgcgcattccttcgaacaactccagctgcaagagtctggccctggcctggtcaagcctagcgaaacactgagcctgacctgtaccgtgtctggcggctctatcagctccggcagctatatctggggctggatcagacaacctcctggcaaaggactggaatggatcggctccatctactacagcggcatcacctactacaaccccagcctgaagtccagagtgaccatctccgtggacaccagcaagaaccagttctccctgaagctgagcagcgtgacagccgccgataccgccgtgtattattgtgccagacatgacggcgctgtggccggcctgtttgattattggggacagggcaccctggtcaccgtgtcatctgctacgcgtgacaagcagctggacgccgacgtgtcccccaagcctaccatcttcctgccctctatcgccgagacaaagctccagaaggccggcacctacctgtgcctgctggaaaagttcttcccagatgtgattaagatccactggcaggaaaagaagtccaacaccatcctgggcagccaggaaggcaacaccatgaagaccaacgacacctacatgaagttcagctggctgaccgtgcccgagaagtccctggacaaagaacacagatgcatcgtgcggcacgaaaacaacaagaacggcgtggaccaggaaatcatcttcccacccatcaagaccgatgtgattacaatggaccccaaggacaactgctccaaggacgccaacgataccctgctgctccagctgaccaacaccagcgcctactacatgtacttgttgctgctgctgaagtccgtggtgtacttcgccatcatcacatgctgcctgctgcggagaaccgccttctgctgcaacggcgagaagtct

SEQ ID NO: 7497 - DNA, 2727 bp, Artificial Sequence
  Synthetic Polynucloetide
atggccttaccagtgaccgccttgctcctgccgctggccttgctgctccacgccgccaggccgctcgaggggaaaccaattcccaaccctcttctgggactggattcaaccggcagcggcgacaagcagctggacgccgacgtgtcccccaagcctaccatcttcctgccctctatcgccgagacaaagctccagaaggccggcacctacctgtgcctgctggaaaagttcttcccagatgtgattaagatccactggcaggaaaagaagtccaacaccatcctgggcagccaggaaggcaacaccatgaagaccaacgacacctacatgaagttcagctggctgaccgtgcccgagaagtccctggacaaagaacacagatgcatcgtgcggcacgaaaacaacaagaacggcgtggaccaggaaatcatcttcccacccatcaagaccgatgtgattacaatggaccccaaggacaactgctccaaggacgccaacgataccctgctgctccagctgaccaacaccagcgcctactacatgtacttgttgctgctgctgaagtccgtggtgtacttcgccatcatcacatgctgcctgctgcggagaaccgccttctgctgcaacggcgagaagtctagggccaagcgatctggatctggagcaacaaacttctcactactcaaacaagcaggtgacgtggaggagaatcccgggcctactagcatggccttaccagtgaccgccttgctcctgccgctggccttgctgctccacgccgccaggccgagctacgtgctgacacagcctccatccgtgtctgtggctccaggacagaccgccagaatcacatgcggcggcaacaacatcggcagcaagagcgtgcactggtatcagcagccacctggacaggctccagtggtggtggtgtacgacgacagcgatagacctagcggcatccccgagagattcagcggcagcaattccggcaataccgccacactgaccatcagcagagtggaagctggcgacgaggccgtgtactactgccaagtgtgggacagcagcagcgatcacgtggtgtttggcggcggaacaaagctgacagtgcttggcggaggcggaagtggaggcggaggatctggcggcggaggctctcaactccagctgcaagagtctggccctggcctggtcaagcctagcgaaacactgagcctgacctgtaccgtgtctggcggctctatcagctccggcagctatatctggggctggatcagacaacctcctggcaaaggactggaatggatcggctccatctactacagcggcatcacctactacaaccccagcctgaagtccagagtgaccatctccgtggacaccagcaagaaccagttctccctgaagctgagcagcgtgacagccgccgataccgccgtgtattattgtgccagacatgacggcgctgtggccggcctgtttgattattggggacagggcaccctggtcaccgtgtcatctgctacgcgtgagcagaaactgatctcggaagaggatgggagcggcagccagcctcacaccaagcccagcgtgttcgtgatgaagaacggcaccaacgtggcctgcctcgtgaaagagttctaccccaaggacatcaggatcaacctggtgtccagcaagaagatcaccgagttcgaccccgccatcgtgatctcccccagcggcaagtacaacgccgtgaagctggggaagtacgaggacagcaacagcgtgacctgctccgtgcagcacgacaacaagaccgtgcacagcaccgactttgaagtgaaaaccgactccaccgaccacgtgaagcccaaagagacagagaacaccaagcagcccagcaagagctgccacaagcccaaggccatcgtgcacaccgagaaagtgaacatgatgagcctgaccgtgctgggcctgcggatgctgttcgccaaaaccgtggccgtgaacttcctgctgaccgccaagctgttcttcctccgcgccaagagaagcggatctggcgtgaagcagaccctgaatttcgacctgctgaagctggctggcgacgtggaatccaacccaggcccttctagaggccatatgaccgagtacaagcccacggtgcgcctcgccacccgcgacgacgtccccagggccgtacgcaccctcgccgccgcgttcgccgactaccccgccacgcgccacaccgtcgatccggaccgccacatcgagcgggtcaccgagctgcaagaactcttcctcacgcgcgtcgggctcgacatcggcaaggtgtgggtcgcggacgacggcgccgcggtggcggtctggaccacgccggagagcgtcgaagcgggggcggtgttcgccgagatcggcccgcgcatggccgagttgagcggttcccggctggccgcgcagcaacagatggaaggcctcctggcgccgcaccggcccaaggagcccgcgtggttcctggccaccgtcggcgtctcgcccgaccaccagggcaagggtctgggcagcgccgtcgtgctccccggagtggaggcggccgagcgcgccggggtgcccgccttcctggagacctccgcgccccgcaacctccccttctacgagcggctcggcttcaccgtcaccgccgacgtcgaggtgcccgaaggaccgcgcacctggtgcatgacccgcaagcccggtgcctga

SEQ ID NO: 7498 - DNA, 3102 bp, Artificial Sequence
  Synthetic Polynucloetide
atggccttaccagtgaccgccttgctcctgccgctggccttgctgctccacgccgccaggccgagctacgtgctgacacagcctccatccgtgtctgtggctccaggacagaccgccagaatcacatgcggcggcaacaacatcggcagcaagagcgtgcactggtatcagcagccacctggacaggctccagtggtggtggtgtacgacgacagcgatagacctagcggcatccccgagagattcagcggcagcaattccggcaataccgccacactgaccatcagcagagtggaagctggcgacgaggccgtgtactactgccaagtgtgggacagcagcagcgatcacgtggtgtttggcggcggaacaaagctgacagtgcttggacagcctaaggccaatcctaccgtgacactgttccctccaagcagcgaagaactccaggccaacaaggccacacttgtgtgcctgatctccgacttctaccctggggctgtgacagtggcttggaaggccgatggatctcctgtgaaagccggcgtggaaaccaccaagccatccaagcagagcaacaacaaatacgccgccagctcctacctgagcctgacacctgagcagtggaagtcccacagatcctacagctgccaagtgacccacgaaggcagcaccgtggaaaagacagtggcccctacagagtgcagcggatcccagagcttcggcctgctggaccccaagctgtgctacctgctggatggcatcctgttcatctacggcgtgatcctgaccgccctgttcctgagagtgaagttcagcagaagcgccgacgcccctgcctaccagcagggacagaaccaactgtacaacgagctgaacctgggcagacgggaagagtacgacgtgctggacaagcggagaggcagggaccctgagatgggcggaaagccccagcggagaaagaacccccaggaaggactgtataacgaactccagaaagacaagatggccgaagcctacagcgagatcggcatgaagggcgagcggagaagaggcaagggccacgatggcctgtaccagggcctgagcaccgccaccaaggacacctatgacgccctgcacatgcaggccctgcctccaagaagggccaagcgatctggatctggagcaacaaacttctcactactcaaacaagcaggtgacgtggaggagaatcccgggcctactagtatggactggatttggcgcatccttttccttgtcggcgctgctaccggcgcgcattccttcgaacaactccagctgcaagagtctggccctggcctggtcaagcctagcgaaacactgagcctgacctgtaccgtgtctggcggctctatcagctccggcagctatatctggggctggatcagacaacctcctggcaaaggactggaatggatcggctccatctactacagcggcatcacctactacaaccccagcctgaagtccagagtgaccatctccgtggacaccagcaagaaccagttctccctgaagctgagcagcgtgacagccgccgataccgccgtgtattattgtgccagacatgacggcgctgtggccggcctgtttgattattggggacagggcaccctggtcaccgtgtcatctgctgcctctacaaagggaccctccgtgtttcctctggctcccagcagcaagtctacaagcggaggaacagccgctctgggctgcctggtcaaggattactttcccgagcctgtgaccgtgtcctggaatagcggagcactgacaagcggcgtgcacacctttccagccgtgctgcaaagcagcggcctgtactctctgagcagcgtggtcacagtgcctagctctagcctgggcacccagacctacatctgcaatgtgaaccacaagcctagcaacaccaaggtggacaagagagtggaacccaagagctgtggtacccagagttttgggttgttggaccctaaattgtgctatctgttggacggaatcctgttcatttacggagtgatcctgaccgcattgttcctgcgggttaagttttccagatccgcagacgcacccgcttaccaacaagggcagaaccaactctacaatgaacttaatttggggcggagggaagagtacgacgttctggacaaaaggaggggacgagatcccgagatgggcggaaagcctcagcgaaggaagaatccgcaagaggggctttataacgaactccagaaagataaaatggcagaagcctatagtgagattgggatgaagggagaaaggaggaggggtaaaggtcacgatgggttgtaccaaggattgagcacagccactaaagatacctatgatgcgctccacatgcaggccctgccgccaagacgcgccaagagaagcggatctggcgtgaagcagaccctgaatttcgacctgctgaagctggctggcgacgtggaatccaacccaggcccttctagaggccatatgaccgagtacaagcccacggtgcgcctcgccacccgcgacgacgtccccagggccgtacgcaccctcgccgccgcgttcgccgactaccccgccacgcgccacaccgtcgatccggaccgccacatcgagcgggtcaccgagctgcaagaactcttcctcacgcgcgtcgggctcgacatcggcaaggtgtgggtcgcggacgacggcgccgcggtggcggtctggaccacgccggagagcgtcgaagcgggggcggtgttcgccgagatcggcccgcgcatggccgagttgagcggttcccggctggccgcgcagcaacagatggaaggcctcctggcgccgcaccggcccaaggagcccgcgtggttcctggccaccgtcggcgtctcgcccgaccaccagggcaagggtctgggcagcgccgtcgtgctccccggagtggaggcggccgagcgcgccggggtgcccgccttcctggagacctccgcgccccgcaacctccccttctacgagcggctcggcttcaccgtcaccgccgacgtcgaggtgcccgaaggaccgcgcacctggtgcatgacccgcaagcccggtgcctga

SEQ ID NO: 7499 - DNA, 2457 bp, Artificial Sequence
  Synthetic Polynucloetide
atggccttaccagtgaccgccttgctcctgccgctggccttgctgctccacgccgccaggccgagctacgtgctgacacagcctccatccgtgtctgtggctccaggacagaccgccagaatcacatgcggcggcaacaacatcggcagcaagagcgtgcactggtatcagcagccacctggacaggctccagtggtggtggtgtacgacgacagcgatagacctagcggcatccccgagagattcagcggcagcaattccggcaataccgccacactgaccatcagcagagtggaagctggcgacgaggccgtgtactactgccaagtgtgggacagcagcagcgatcacgtggtgtttggcggcggaacaaagctgacagtgcttctcgaggacctgaagaacgtgttcccacctgaggtggccgtgttcgagcctagcgaggccgagatcagccacacccagaaagccaccctcgtgtgcctggctaccggcttctaccccgaccatgtggaactgtcttggtgggtcaacggcaaagaggtgcacagcggcgtgtctaccgacccccagccactgaaagaacagcccgccctgaacgacagccggtactgcctgagcagcagactgagagtgtccgccaccttctggcagaacccccggaaccacttcagatgccaggtgcagttctacggcctgagcgagaacgacgagtggacccaggacagagccaagcccgtgacccagatcgtgtctgccgaagcctggggcagagccgattgcggatcccagagcttcggcctgctggaccccaagctgtgctacctgctggatggcatcctgttcatctacggcgtgatcctgaccgccctgttcctgagagtgaagttcagcagaagcgccgacgcccctgcctaccagcagggacagaaccaactgtacaacgagctgaacctgggcagacgggaagagtacgacgtgctggacaagcggagaggcagggaccctgagatgggcggaaagccccagcggagaaagaacccccaggaaggactgtataacgaactccagaaagacaagatggccgaagcctacagcgagatcggcatgaagggcgagcggagaagaggcaagggccacgatggcctgtaccagggcctgagcaccgccaccaaggacacctatgacgccctgcacatgcaggccctgcctccaagaagggccaagcgatctggatctggagcaacaaacttctcactactcaaacaagcaggtgacgtggaggagaatcccgggcctactagtatggactggatttggcgcatccttttccttgtcggcgctgctaccggcgcgcattccttcgaacaactccagctgcaagagtctggccctggcctggtcaagcctagcgaaacactgagcctgacctgtaccgtgtctggcggctctatcagctccggcagctatatctggggctggatcagacaacctcctggcaaaggactggaatggatcggctccatctactacagcggcatcacctactacaaccccagcctgaagtccagagtgaccatctccgtggacaccagcaagaaccagttctccctgaagctgagcagcgtgacagccgccgataccgccgtgtattattgtgccagacatgacggcgctgtggccggcctgtttgattattggggacagggcaccctggtcaccgtgtcatctgctacgcgtatccagaaccctgatcctgccgtgtaccagctgcgggatagcaagagcagcgacaagagcgtgtgtctgttcaccgacttcgacagccagaccaacgtgtcccagagcaaggactccgacgtgtacatcaccgataagaccgtgctggacatgcggagcatggacttcaagagcaactccgccgtggcctggtccaacaagtccgatttcgcctgcgccaacgccttcaacaacagcattatccccgaggacacattcttcccaagccccgagagcagctgcggtacccagagttttgggttgttggaccctaaattgtgctatctgttggacggaatcctgttcatttacggagtgatcctgaccgcattgttcctgcgggttaagttttccagatccgcagacgcacccgcttaccaacaagggcagaaccaactctacaatgaacttaatttggggcggagggaagagtacgacgttctggacaaaaggaggggacgagatcccgagatgggcggaaagcctcagcgaaggaagaatccgcaagaggggctttataacgaactccagaaagataaaatggcagaagcctatagtgagattgggatgaagggagaaaggaggaggggtaaaggtcacgatgggttgtaccaaggattgagcacagccactaaagatacctatgatgcgctccacatgcaggccctgccgccaaga

SEQ ID NO: 7500 - DNA, 2457 bp, Artificial Sequence
  Synthetic Polynucloetide
atggccttaccagtgaccgccttgctcctgccgctggccttgctgctccacgccgccaggccgagctacgtgctgacacagcctccatccgtgtctgtggctccaggacagaccgccagaatcacatgcggcggcaacaacatcggcagcaagagcgtgcactggtatcagcagccacctggacaggctccagtggtggtggtgtacgacgacagcgatagacctagcggcatccccgagagattcagcggcagcaattccggcaataccgccacactgaccatcagcagagtggaagctggcgacgaggccgtgtactactgccaagtgtgggacagcagcagcgatcacgtggtgtttggcggcggaacaaagctgacagtgcttctcgaggacctgaagaacgtgttcccacctgaggtggccgtgttcgagcctagcaaggccgagatcgcccacacccagaaagccaccctcgtgtgcctggctaccggcttctaccccgaccatgtggaactgtcttggtgggtcaacggcaaagaggtgcacagcggcgtgtgtaccgacccccagccactgaaagaacagcccgccctgaacgacagccggtactgcctgagcagcagactgagagtgtccgccaccttctggcagaacccccggaaccacttcagatgccaggtgcagttctacggcctgagcgagaacgacgagtggacccaggacagagccaagcccgtgacccagatcgtgtctgccgaagcctggggcagagccgattgcggatcccagagcttcggcctgctggaccccaagctgtgctacctgctggatggcatcctgttcatctacggcgtgatcctgaccgccctgttcctgagagtgaagttcagcagaagcgccgacgcccctgcctaccagcagggacagaaccaactgtacaacgagctgaacctgggcagacgggaagagtacgacgtgctggacaagcggagaggcagggaccctgagatgggcggaaagccccagcggagaaagaacccccaggaaggactgtataacgaactccagaaagacaagatggccgaagcctacagcgagatcggcatgaagggcgagcggagaagaggcaagggccacgatggcctgtaccagggcctgagcaccgccaccaaggacacctatgacgccctgcacatgcaggccctgcctccaagaagggccaagcgatctggatctggagcaacaaacttctcactactcaaacaagcaggtgacgtggaggagaatcccgggcctactagtatggactggatttggcgcatccttttccttgtcggcgctgctaccggcgcgcattccttcgaacaactccagctgcaagagtctggccctggcctggtcaagcctagcgaaacactgagcctgacctgtaccgtgtctggcggctctatcagctccggcagctatatctggggctggatcagacaacctcctggcaaaggactggaatggatcggctccatctactacagcggcatcacctactacaaccccagcctgaagtccagagtgaccatctccgtggacaccagcaagaaccagttctccctgaagctgagcagcgtgacagccgccgataccgccgtgtattattgtgccagacatgacggcgctgtggccggcctgtttgattattggggacagggcaccctggtcaccgtgtcatctgctacgcgtatccagaaccctgatcctgccgtgtaccagctgcgggatagcaagagcagcgacaagagcgtgtgtctgttcaccgacttcgacagccagaccaacgtgtcccagagcaaggactccgacgtgtacatcaccgataagtgcgtgctggacatgcggagcatggacttcaagagcaactccgccgtggcctggtccaacaagtccgatttcgcctgcgccaacgccttcaacaacagcattatccccgaggacacattcttcccaagcagcgacgtgccctgcggtacccagagttttgggttgttggaccctaaattgtgctatctgttggacggaatcctgttcatttacggagtgatcctgaccgcattgttcctgcgggttaagttttccagatccgcagacgcacccgcttaccaacaagggcagaaccaactctacaatgaacttaatttggggcggagggaagagtacgacgttctggacaaaaggaggggacgagatcccgagatgggcggaaagcctcagcgaaggaagaatccgcaagaggggctttataacgaactccagaaagataaaatggcagaagcctatagtgagattgggatgaagggagaaaggaggaggggtaaaggtcacgatgggttgtaccaaggattgagcacagccactaaagatacctatgatgcgctccacatgcaggccctgccgccaaga

SEQ ID NO: 7501 - DNA, 2670 bp, Artificial Sequence
  Synthetic Polynucloetide
atggccttaccagtgaccgccttgctcctgccgctggccttgctgctccacgccgccaggccgagctacgtgctgacacagcctccatccgtgtctgtggctccaggacagaccgccagaatcacatgcggcggcaacaacatcggcagcaagagcgtgcactggtatcagcagccacctggacaggctccagtggtggtggtgtacgacgacagcgatagacctagcggcatccccgagagattcagcggcagcaattccggcaataccgccacactgaccatcagcagagtggaagctggcgacgaggccgtgtactactgccaagtgtgggacagcagcagcgatcacgtggtgtttggcggcggaacaaagctgacagtgcttctcgaggggaaaccaattcccaaccctcttctgggactggattcaaccggcagcggcgaggacctgaagaacgtgttcccacctgaggtggccgtgttcgagcctagcgaggccgagatcagccacacccagaaagccaccctcgtgtgcctggctaccggcttctaccccgaccatgtggaactgtcttggtgggtcaacggcaaagaggtgcacagcggcgtgtctaccgacccccagccactgaaagaacagcccgccctgaacgacagccggtactgcctgagcagcagactgagagtgtccgccaccttctggcagaacccccggaaccacttcagatgccaggtgcagttctacggcctgagcgagaacgacgagtggacccaggacagagccaagcccgtgacccagatcgtgtctgccgaagcctggggcagagccgattgcggatcccagagcttcggcctgctggaccccaagctgtgctacctgctggatggcatcctgttcatctacggcgtgatcctgaccgccctgttcctgagagtgaagttcagcagaagcgccgacgcccctgcctaccagcagggacagaaccaactgtacaacgagctgaacctgggcagacgggaagagtacgacgtgctggacaagcggagaggcagggaccctgagatgggcggaaagccccagcggagaaagaacccccaggaaggactgtataacgaactccagaaagacaagatggccgaagcctacagcgagatcggcatgaagggcgagcggagaagaggcaagggccacgatggcctgtaccagggcctgagcaccgccaccaaggacacctatgacgccctgcacatgcaggccctgcctccaagaagggccaagcgatctggatctggagcaacaaacttctcactactcaaacaagcaggtgacgtggaggagaatcccgggcctactagtatggactggatttggcgcatccttttccttgtcggcgctgctaccggcgcgcattccttcgaacaactccagctgcaagagtctggccctggcctggtcaagcctagcgaaacactgagcctgacctgtaccgtgtctggcggctctatcagctccggcagctatatctggggctggatcagacaacctcctggcaaaggactggaatggatcggctccatctactacagcggcatcacctactacaaccccagcctgaagtccagagtgaccatctccgtggacaccagcaagaaccagttctccctgaagctgagcagcgtgacagccgccgataccgccgtgtattattgtgccagacatgacggcgctgtggccggcctgtttgattattggggacagggcaccctggtcaccgtgtcatctgctacgcgtgagcagaaactgatctcggaagaggatgggagcggcatccagaaccctgatcctgccgtgtaccagctgcgggatagcaagagcagcgacaagagcgtgtgtctgttcaccgacttcgacagccagaccaacgtgtcccagagcaaggactccgacgtgtacatcaccgataagaccgtgctggacatgcggagcatggacttcaagagcaactccgccgtggcctggtccaacaagtccgatttcgcctgcgccaacgccttcaacaacagcattatccccgaggacacattcttcccaagccccgagagcagctgcggtacccagagttttgggttgttggaccctaaattgtgctatctgttggacggaatcctgttcatttacggagtgatcctgaccgcattgttcctgaggagcaagcggtcacggctgctccacagcgattacatgaatatgacaccacgaagaccgggtcctactcgcaaacactaccaaccctacgcacctccccgcgactttgcagcgtaccgatctcgggttaagttttccagatccgcagacgcacccgcttaccaacaagggcagaaccaactctacaatgaacttaatttggggcggagggaagagtacgacgttctggacaaaaggaggggacgagatcccgagatgggcggaaagcctcagcgaaggaagaatccgcaagaggggctttataacgaactccagaaagataaaatggcagaagcctatagtgagattgggatgaagggagaaaggaggaggggtaaaggtcacgatgggttgtaccaaggattgagcacagccactaaagatacctatgatgcgctccacatgcaggccctgccgccaaga

SEQ ID NO: 7502 - DNA, 2793 bp, Artificial Sequence
  Synthetic Polynucloetide
atggccttaccagtgaccgccttgctcctgccgctggccttgctgctccacgccgccaggccgagctacgtgctgacacagcctccatccgtgtctgtggctccaggacagaccgccagaatcacatgcggcggcaacaacatcggcagcaagagcgtgcactggtatcagcagccacctggacaggctccagtggtggtggtgtacgacgacagcgatagacctagcggcatccccgagagattcagcggcagcaattccggcaataccgccacactgaccatcagcagagtggaagctggcgacgaggccgtgtactactgccaagtgtgggacagcagcagcgatcacgtggtgtttggcggcggaacaaagctgacagtgcttctcgaggggaaaccaattcccaaccctcttctgggactggattcaaccggcagcggcgaggacctgaagaacgtgttcccacctgaggtggccgtgttcgagcctagcgaggccgagatcagccacacccagaaagccaccctcgtgtgcctggctaccggcttctaccccgaccatgtggaactgtcttggtgggtcaacggcaaagaggtgcacagcggcgtgtctaccgacccccagccactgaaagaacagcccgccctgaacgacagccggtactgcctgagcagcagactgagagtgtccgccaccttctggcagaacccccggaaccacttcagatgccaggtgcagttctacggcctgagcgagaacgacgagtggacccaggacagagccaagcccgtgacccagatcgtgtctgccgaagcctggggcagagccgattgcggatcccagagcttcggcctgctggaccccaagctgtgctacctgctggatggcatcctgttcatctacggcgtgatcctgaccgccctgttcctgaggagtaagaggagcaggctcctgcacagtgactacatgaacatgactccacgccgccccggacccacccgcaagcattaccagccctatgccccaccacgcgacttcgcagcctatcgctccagagtgaagttcagcagaagcgccgacgcccctgcctaccagcagggacagaaccaactgtacaacgagctgaacctgggcagacgggaagagtacgacgtgctggacaagcggagaggcagggaccctgagatgggcggaaagccccagcggagaaagaacccccaggaaggactgtataacgaactccagaaagacaagatggccgaagcctacagcgagatcggcatgaagggcgagcggagaagaggcaagggccacgatggcctgtaccagggcctgagcaccgccaccaaggacacctatgacgccctgcacatgcaggccctgcctccaagaagggccaagcgatctggatctggagcaacaaacttctcactactcaaacaagcaggtgacgtggaggagaatcccgggcctactagtatggactggatttggcgcatccttttccttgtcggcgctgctaccggcgcgcattccttcgaacaactccagctgcaagagtctggccctggcctggtcaagcctagcgaaacactgagcctgacctgtaccgtgtctggcggctctatcagctccggcagctatatctggggctggatcagacaacctcctggcaaaggactggaatggatcggctccatctactacagcggcatcacctactacaaccccagcctgaagtccagagtgaccatctccgtggacaccagcaagaaccagttctccctgaagctgagcagcgtgacagccgccgataccgccgtgtattattgtgccagacatgacggcgctgtggccggcctgtttgattattggggacagggcaccctggtcaccgtgtcatctgctacgcgtgagcagaaactgatctcggaagaggatgggagcggcatccagaaccctgatcctgccgtgtaccagctgcgggatagcaagagcagcgacaagagcgtgtgtctgttcaccgacttcgacagccagaccaacgtgtcccagagcaaggactccgacgtgtacatcaccgataagaccgtgctggacatgcggagcatggacttcaagagcaactccgccgtggcctggtccaacaagtccgatttcgcctgcgccaacgccttcaacaacagcattatccccgaggacacattcttcccaagccccgagagcagctgcggtacccagagttttgggttgttggaccctaaattgtgctatctgttggacggaatcctgttcatttacggagtgatcctgaccgcattgttcctgaggagcaagcggtcacggctgctccacagcgattacatgaatatgacaccacgaagaccgggtcctactcgcaaacactaccaaccctacgcacctccccgcgactttgcagcgtaccgatctcgggttaagttttccagatccgcagacgcacccgcttaccaacaagggcagaaccaactctacaatgaacttaatttggggcggagggaagagtacgacgttctggacaaaaggaggggacgagatcccgagatgggcggaaagcctcagcgaaggaagaatccgcaagaggggctttataacgaactccagaaagataaaatggcagaagcctatagtgagattgggatgaagggagaaaggaggaggggtaaaggtcacgatgggttgtaccaaggattgagcacagccactaaagatacctatgatgcgctccacatgcaggccctgccgccaaga

SEQ ID NO: 7503 - DNA, 2676 bp, Artificial Sequence
  Synthetic Polynucloetide
atggccttaccagtgaccgccttgctcctgccgctggccttgctgctccacgccgccaggccgagctacgtgctgacacagcctccatccgtgtctgtggctccaggacagaccgccagaatcacatgcggcggcaacaacatcggcagcaagagcgtgcactggtatcagcagccacctggacaggctccagtggtggtggtgtacgacgacagcgatagacctagcggcatccccgagagattcagcggcagcaattccggcaataccgccacactgaccatcagcagagtggaagctggcgacgaggccgtgtactactgccaagtgtgggacagcagcagcgatcacgtggtgtttggcggcggaacaaagctgacagtgcttctcgaggggaaaccaattcccaaccctcttctgggactggattcaaccggcagcggcgaggacctgaagaacgtgttcccacctgaggtggccgtgttcgagcctagcgaggccgagatcagccacacccagaaagccaccctcgtgtgcctggctaccggcttctaccccgaccatgtggaactgtcttggtgggtcaacggcaaagaggtgcacagcggcgtgtctaccgacccccagccactgaaagaacagcccgccctgaacgacagccggtactgcctgagcagcagactgagagtgtccgccaccttctggcagaacccccggaaccacttcagatgccaggtgcagttctacggcctgagcgagaacgacgagtggacccaggacagagccaagcccgtgacccagatcgtgtctgccgaagcctggggcagagccgattgcggatcccagagcttcggcctgctggaccccaagctgtgctacctgctggatggcatcctgttcatctacggcgtgatcctgaccgccctgttcctgagagtgaagttcagcagaagcgccgacgcccctgcctaccagcagggacagaaccaactgtacaacgagctgaacctgggcagacgggaagagtacgacgtgctggacaagcggagaggcagggaccctgagatgggcggaaagccccagcggagaaagaacccccaggaaggactgtataacgaactccagaaagacaagatggccgaagcctacagcgagatcggcatgaagggcgagcggagaagaggcaagggccacgatggcctgtaccagggcctgagcaccgccaccaaggacacctatgacgccctgcacatgcaggccctgcctccaagaagggccaagcgatctggatctggagcaacaaacttctcactactcaaacaagcaggtgacgtggaggagaatcccgggcctactagtatggactggatttggcgcatccttttccttgtcggcgctgctaccggcgcgcattccttcgaacaactccagctgcaagagtctggccctggcctggtcaagcctagcgaaacactgagcctgacctgtaccgtgtctggcggctctatcagctccggcagctatatctggggctggatcagacaacctcctggcaaaggactggaatggatcggctccatctactacagcggcatcacctactacaaccccagcctgaagtccagagtgaccatctccgtggacaccagcaagaaccagttctccctgaagctgagcagcgtgacagccgccgataccgccgtgtattattgtgccagacatgacggcgctgtggccggcctgtttgattattggggacagggcaccctggtcaccgtgtcatctgctacgcgtgagcagaaactgatctcggaagaggatctggggagcggcatccagaaccctgatcctgccgtgtaccagctgcgggatagcaagagcagcgacaagagcgtgtgtctgttcaccgacttcgacagccagaccaacgtgtcccagagcaaggactccgacgtgtacatcaccgataagaccgtgctggacatgcggagcatggacttcaagagcaactccgccgtggcctggtccaacaagtccgatttcgcctgcgccaacgccttcaacaacagcattatccccgaggacacattcttcccaagccccgagagcagctgcggtacccagagttttgggttgttggaccctaaattgtgctatctgttggacggaatcctgttcatttacggagtgatcctgaccgcattgttcctgaagagaggccggaagaagctgctgtacatcttcaagcagcctttcatgcggcccgtgcagaccacccaggaagaggacggctgctcctgccggttccccgaggaagaagaaggcggctgcgagctgcgggttaagttttccagatccgcagacgcacccgcttaccaacaagggcagaaccaactctacaatgaacttaatttggggcggagggaagagtacgacgttctggacaaaaggaggggacgagatcccgagatgggcggaaagcctcagcgaaggaagaatccgcaagaggggctttataacgaactccagaaagataaaatggcagaagcctatagtgagattgggatgaagggagaaaggaggaggggtaaaggtcacgatgggttgtaccaaggattgagcacagccactaaagatacctatgatgcgctccacatgcaggccctgccgccaaga

SEQ ID NO: 7504 - DNA, 2802 bp, Artificial Sequence
  Synthetic Polynucloetide
atggccttaccagtgaccgccttgctcctgccgctggccttgctgctccacgccgccaggccgagctacgtgctgacacagcctccatccgtgtctgtggctccaggacagaccgccagaatcacatgcggcggcaacaacatcggcagcaagagcgtgcactggtatcagcagccacctggacaggctccagtggtggtggtgtacgacgacagcgatagacctagcggcatccccgagagattcagcggcagcaattccggcaataccgccacactgaccatcagcagagtggaagctggcgacgaggccgtgtactactgccaagtgtgggacagcagcagcgatcacgtggtgtttggcggcggaacaaagctgacagtgcttctcgaggggaaaccaattcccaaccctcttctgggactggattcaaccggcagcggcgaggacctgaagaacgtgttcccacctgaggtggccgtgttcgagcctagcgaggccgagatcagccacacccagaaagccaccctcgtgtgcctggctaccggcttctaccccgaccatgtggaactgtcttggtgggtcaacggcaaagaggtgcacagcggcgtgtctaccgacccccagccactgaaagaacagcccgccctgaacgacagccggtactgcctgagcagcagactgagagtgtccgccaccttctggcagaacccccggaaccacttcagatgccaggtgcagttctacggcctgagcgagaacgacgagtggacccaggacagagccaagcccgtgacccagatcgtgtctgccgaagcctggggcagagccgattgcggatcccagagcttcggcctgctggaccccaagctgtgctacctgctggatggcatcctgttcatctacggcgtgatcctgaccgccctgttcctgaaacggggcagaaagaaactcctgtatatattcaaacaaccatttatgagaccagtacaaactactcaagaggaagatggctgtagctgccgatttccagaagaagaagaaggaggatgtgaactgagagtgaagttcagcagaagcgccgacgcccctgcctaccagcagggacagaaccaactgtacaacgagctgaacctgggcagacgggaagagtacgacgtgctggacaagcggagaggcagggaccctgagatgggcggaaagccccagcggagaaagaacccccaggaaggactgtataacgaactccagaaagacaagatggccgaagcctacagcgagatcggcatgaagggcgagcggagaagaggcaagggccacgatggcctgtaccagggcctgagcaccgccaccaaggacacctatgacgccctgcacatgcaggccctgcctccaagaagggccaagcgatctggatctggagcaacaaacttctcactactcaaacaagcaggtgacgtggaggagaatcccgggcctactagtatggactggatttggcgcatccttttccttgtcggcgctgctaccggcgcgcattccttcgaacaactccagctgcaagagtctggccctggcctggtcaagcctagcgaaacactgagcctgacctgtaccgtgtctggcggctctatcagctccggcagctatatctggggctggatcagacaacctcctggcaaaggactggaatggatcggctccatctactacagcggcatcacctactacaaccccagcctgaagtccagagtgaccatctccgtggacaccagcaagaaccagttctccctgaagctgagcagcgtgacagccgccgataccgccgtgtattattgtgccagacatgacggcgctgtggccggcctgtttgattattggggacagggcaccctggtcaccgtgtcatctgctacgcgtgagcagaaactgatctcggaagaggatctggggagcggcatccagaaccctgatcctgccgtgtaccagctgcgggatagcaagagcagcgacaagagcgtgtgtctgttcaccgacttcgacagccagaccaacgtgtcccagagcaaggactccgacgtgtacatcaccgataagaccgtgctggacatgcggagcatggacttcaagagcaactccgccgtggcctggtccaacaagtccgatttcgcctgcgccaacgccttcaacaacagcattatccccgaggacacattcttcccaagccccgagagcagctgcggtacccagagttttgggttgttggaccctaaattgtgctatctgttggacggaatcctgttcatttacggagtgatcctgaccgcattgttcctgaagagaggccggaagaagctgctgtacatcttcaagcagcctttcatgcggcccgtgcagaccacccaggaagaggacggctgctcctgccggttccccgaggaagaagaaggcggctgcgagctgcgggttaagttttccagatccgcagacgcacccgcttaccaacaagggcagaaccaactctacaatgaacttaatttggggcggagggaagagtacgacgttctggacaaaaggaggggacgagatcccgagatgggcggaaagcctcagcgaaggaagaatccgcaagaggggctttataacgaactccagaaagataaaatggcagaagcctatagtgagattgggatgaagggagaaaggaggaggggtaaaggtcacgatgggttgtaccaaggattgagcacagccactaaagatacctatgatgcgctccacatgcaggccctgccgccaaga

SEQ ID NO: 7505 - DNA, 2475 bp, Artificial Sequence
  Synthetic Polynucloetide
atggccttaccagtgaccgccttgctcctgccgctggccttgctgctccacgccgccaggccgagctacgtgctgacacagcctccatccgtgtctgtggctccaggacagaccgccagaatcacatgcggcggcaacaacatcggcagcaagagcgtgcactggtatcagcagccacctggacaggctccagtggtggtggtgtacgacgacagcgatagacctagcggcatccccgagagattcagcggcagcaattccggcaataccgccacactgaccatcagcagagtggaagctggcgacgaggccgtgtactactgccaagtgtgggacagcagcagcgatcacgtggtgtttggcggcggaacaaagctgacagtgcttctcgagcagagcttcggcctgctggaccccaagctgtgctacctgctggatggcatcctgttcatctacggcgtgatcctgaccgccctgttcctgagagtgaagttcagcagaagcgccgacgcccctgcctaccagcagggacagaaccaactgtacaacgagctgaacctgggcagacgggaagagtacgacgtgctggacaagcggagaggcagggaccctgagatgggcggaaagccccagcggagaaagaacccccaggaaggactgtataacgaactccagaaagacaagatggccgaagcctacagcgagatcggcatgaagggcgagcggagaagaggcaagggccacgatggcctgtaccagggcctgagcaccgccaccaaggacacctatgacgccctgcacatgcaggccctgcctccaagaagggccaagcgatctggatctggagcaacaaacttctcactactcaaacaagcaggtgacgtggaggagaatcccgggcctactagtatggactggatttggcgcatccttttccttgtcggcgctgctaccggcgcgcattccttcgaacaactccagctgcaagagtctggccctggcctggtcaagcctagcgaaacactgagcctgacctgtaccgtgtctggcggctctatcagctccggcagctatatctggggctggatcagacaacctcctggcaaaggactggaatggatcggctccatctactacagcggcatcacctactacaaccccagcctgaagtccagagtgaccatctccgtggacaccagcaagaaccagttctccctgaagctgagcagcgtgacagccgccgataccgccgtgtattattgtgccagacatgacggcgctgtggccggcctgtttgattattggggacagggcaccctggtcaccgtgtcatctgctacgcgtcagagttttgggttgttggaccctaaattgtgctatctgttggacggaatcctgttcatttacggagtgatcctgaccgcattgttcctgcgggttaagttttccagatccgcagacgcacccgcttaccaacaagggcagaaccaactctacaatgaacttaatttggggcggagggaagagtacgacgttctggacaaaaggaggggacgagatcccgagatgggcggaaagcctcagcgaaggaagaatccgcaagaggggctttataacgaactccagaaagataaaatggcagaagcctatagtgagattgggatgaagggagaaaggaggaggggtaaaggtcacgatgggttgtaccaaggattgagcacagccactaaagatacctatgatgcgctccacatgcaggccctgccgccaagacgcgccaagagaagcggatctggcgtgaagcagaccctgaatttcgacctgctgaagctggctggcgacgtggaatccaacccaggcccttctagaggccatatgaccgagtacaagcccacggtgcgcctcgccacccgcgacgacgtccccagggccgtacgcaccctcgccgccgcgttcgccgactaccccgccacgcgccacaccgtcgatccggaccgccacatcgagcgggtcaccgagctgcaagaactcttcctcacgcgcgtcgggctcgacatcggcaaggtgtgggtcgcggacgacggcgccgcggtggcggtctggaccacgccggagagcgtcgaagcgggggcggtgttcgccgagatcggcccgcgcatggccgagttgagcggttcccggctggccgcgcagcaacagatggaaggcctcctggcgccgcaccggcccaaggagcccgcgtggttcctggccaccgtcggcgtctcgcccgaccaccagggcaagggtctgggcagcgccgtcgtgctccccggagtggaggcggccgagcgcgccggggtgcccgccttcctggagacctccgcgccccgcaacctccccttctacgagcggctcggcttcaccgtcaccgccgacgtcgaggtgcccgaaggaccgcgcacctggtgcatgacccgcaagcccggtgcctga

SEQ ID NO: 7506 - DNA, 1947 bp, Artificial Sequence
  Synthetic Polynucloetide
atggccttaccagtgaccgccttgctcctgccgctggccttgctgctccacgccgccaggccgagctacgtgctgacacagcctccatccgtgtctgtggctccaggacagaccgccagaatcacatgcggcggcaacaacatcggcagcaagagcgtgcactggtatcagcagccacctggacaggctccagtggtggtggtgtacgacgacagcgatagacctagcggcatccccgagagattcagcggcagcaattccggcaataccgccacactgaccatcagcagagtggaagctggcgacgaggccgtgtactactgccaagtgtgggacagcagcagcgatcacgtggtgtttggcggcggaacaaagctgacagtgcttctcgagggacagcctaaggccaatcctaccgtgacactgttccctccaagcagcgaagaactccaggccaacaaggccacacttgtgtgcctgatctccgacttctaccctggggctgtgacagtggcttggaaggccgatggatctcctgtgaaagccggcgtggaaaccaccaagccatccaagcagagcaacaacaaatacgccgccagctcctacctgagcctgacacctgagcagtggaagtcccacagatcctacagctgccaagtgacccacgaaggcagcaccgtggaaaagacagtggcccctacagagtgcagccccatcaagaccgatgtgattacaatggaccccaaggacaactgctccaaggacgccaacgataccctgctgctccagctgaccaacaccagcgcctactacatgtacttgttgctgctgctgaagtccgtggtgtacttcgccatcatcacatgctgcctgctgcggagaaccgccttctgctgcaacggcgagaagtctagggccaagcgatctggatctggagcaacaaacttctcactactcaaacaagcaggtgacgtggaggagaatcccgggcctactagtatggactggatttggcgcatccttttccttgtcggcgctgctaccggcgcgcattccttcgaacaactccagctgcaagagtctggccctggcctggtcaagcctagcgaaacactgagcctgacctgtaccgtgtctggcggctctatcagctccggcagctatatctggggctggatcagacaacctcctggcaaaggactggaatggatcggctccatctactacagcggcatcacctactacaaccccagcctgaagtccagagtgaccatctccgtggacaccagcaagaaccagttctccctgaagctgagcagcgtgacagccgccgataccgccgtgtattattgtgccagacatgacggcgctgtggccggcctgtttgattattggggacagggcaccctggtcaccgtgtcatctgctacgcgtgcctctacaaagggaccctccgtgtttcctctggctcccagcagcaagtctacaagcggaggaacagccgctctgggctgcctggtcaaggattactttcccgagcctgtgaccgtgtcctggaatagcggagcactgacaagcggcgtgcacacctttccagccgtgctgcaaagcagcggcctgtactctctgagcagcgtggtcacagtgcctagctctagcctgggcacccagacctacatctgcaatgtgaaccacaagcctagcaacaccaaggtggacaagagagtggaacccaagagctgtgaagtgaaaaccgactccaccgaccacgtgaagcccaaagagacagagaacaccaagcagcccagcaagagctgccacaagcccaaggccatcgtgcacaccgagaaagtgaacatgatgagcctgaccgtgctgggcctgcggatgctgttcgccaaaaccgtggccgtgaacttcctgctgaccgccaagctgttcttcctc

SEQ ID NO: 7507 - DNA, 1881 bp, Artificial Sequence
  Synthetic Polynucloetide
atggccttaccagtgaccgccttgctcctgccgctggccttgctgctccacgccgccaggccgagctacgtgctgacacagcctccatccgtgtctgtggctccaggacagaccgccagaatcacatgcggcggcaacaacatcggcagcaagagcgtgcactggtatcagcagccacctggacaggctccagtggtggtggtgtacgacgacagcgatagacctagcggcatccccgagagattcagcggcagcaattccggcaataccgccacactgaccatcagcagagtggaagctggcgacgaggccgtgtactactgccaagtgtgggacagcagcagcgatcacgtggtgtttggcggcggaacaaagctgacagtgcttctcgagggacagcctaaggccaatcctaccgtgacactgttccctccaagcagcgaagaactccaggccaacaaggccacacttgtgtgcctgatctccgacttctaccctggggctgtgacagtggcttggaaggccgatggatctcctgtgaaagccggcgtggaaaccaccaagccatccaagcagagcaacaacaaatacgccgccagctcctacctgagcctgacacctgagcagtggaagtcccacagatcctacagctgccaagtgacccacgaaggcagcaccgtggaaaagacagtggcccctacagagtgcagcggcagagccgattgcggcatcaccagcgccagctaccaccagggcgtgctgagcgccaccatcctgtacgagatcctgctgggcaaggccaccctgtacgccgtgctggtgtctgccctggtgctgatggctatggtcaagcggaaggacagccggggaagggccaagcgatctggatctggagcaacaaacttctcactactcaaacaagcaggtgacgtggaggagaatcccgggcctactagtatggactggatttggcgcatccttttccttgtcggcgctgctaccggcgcgcattccttcgaacaactccagctgcaagagtctggccctggcctggtcaagcctagcgaaacactgagcctgacctgtaccgtgtctggcggctctatcagctccggcagctatatctggggctggatcagacaacctcctggcaaaggactggaatggatcggctccatctactacagcggcatcacctactacaaccccagcctgaagtccagagtgaccatctccgtggacaccagcaagaaccagttctccctgaagctgagcagcgtgacagccgccgataccgccgtgtattattgtgccagacatgacggcgctgtggccggcctgtttgattattggggacagggcaccctggtcaccgtgtcatctgctacgcgtgcctctacaaagggaccctccgtgtttcctctggctcccagcagcaagtctacaagcggaggaacagccgctctgggctgcctggtcaaggattactttcccgagcctgtgaccgtgtcctggaatagcggagcactgacaagcggcgtgcacacctttccagccgtgctgcaaagcagcggcctgtactctctgagcagcgtggtcacagtgcctagctctagcctgggcacccagacctacatctgcaatgtgaaccacaagcctagcaacaccaaggtggacaagagagtggaacccaagagctgtatccccgaggacacattcttcccaagcagcgacgtgccctgcgacgtgaagctggtggaaaagagcttcgagacagacaccaacctgaacttccagaacctgagcgtgatcggcttcagaatcctgctgctgaaagtggccggctttaacctgctgatgaccctgcggctgtggtccagc

SEQ ID NO: 7508 - DNA, 1881 bp, Artificial Sequence
  Synthetic Polynucloetide
atggccttaccagtgaccgccttgctcctgccgctggccttgctgctccacgccgccaggccgagctacgtgctgacacagcctccatccgtgtctgtggctccaggacagaccgccagaatcacatgcggcggcaacaacatcggcagcaagagcgtgcactggtatcagcagccacctggacaggctccagtggtggtggtgtacgacgacagcgatagacctagcggcatccccgagagattcagcggcagcaattccggcaataccgccacactgaccatcagcagagtggaagctggcgacgaggccgtgtactactgccaagtgtgggacagcagcagcgatcacgtggtgtttggcggcggaacaaagctgacagtgcttctcgagggacagcctaaggccaatcctaccgtgacactgttccctccaagcagcgaagaactccaggccaacaaggccacacttgtgtgcctgatctccgacttctaccctggggctgtgacagtggcttggaaggccgatggatctcctgtgaaagccggcgtggaaaccaccaagccatccaagcagagcaacaacaaatacgccgccagctcctacctgagcctgacacctgagcagtggaagtcccacagatcctacagctgccaagtgacccacgaaggcagcaccgtggaaaagacagtggcccctacagagtgcagcggcagagccgattgcggctttaccagcgagagctaccagcagggcgtgctgagcgccaccatcctgtacgagatcctgctgggcaaggccaccctgtacgccgtgctggtgtctgccctggtgctgatggctatggtcaagcggaaggacagccggggaagggccaagcgatctggatctggagcaacaaacttctcactactcaaacaagcaggtgacgtggaggagaatcccgggcctactagtatggactggatttggcgcatccttttccttgtcggcgctgctaccggcgcgcattccttcgaacaactccagctgcaagagtctggccctggcctggtcaagcctagcgaaacactgagcctgacctgtaccgtgtctggcggctctatcagctccggcagctatatctggggctggatcagacaacctcctggcaaaggactggaatggatcggctccatctactacagcggcatcacctactacaaccccagcctgaagtccagagtgaccatctccgtggacaccagcaagaaccagttctccctgaagctgagcagcgtgacagccgccgataccgccgtgtattattgtgccagacatgacggcgctgtggccggcctgtttgattattggggacagggcaccctggtcaccgtgtcatctgctacgcgtgcctctacaaagggaccctccgtgtttcctctggctcccagcagcaagtctacaagcggaggaacagccgctctgggctgcctggtcaaggattactttcccgagcctgtgaccgtgtcctggaatagcggagcactgacaagcggcgtgcacacctttccagccgtgctgcaaagcagcggcctgtactctctgagcagcgtggtcacagtgcctagctctagcctgggcacccagacctacatctgcaatgtgaaccacaagcctagcaacaccaaggtggacaagagagtggaacccaagagctgtatccccgaggacacattcttcccaagccccgagagcagctgcgacgtgaagctggtggaaaagagcttcgagacagacaccaacctgaacttccagaacctgagcgtgatcggcttcagaatcctgctgctgaaagtggccggctttaacctgctgatgaccctgcggctgtggtccagc

SEQ ID NO: 7509 - DNA, 1359 bp, Artificial Sequence
  Synthetic Polynucloetide
atggccttaccagtgaccgccttgctcctgccgctggccttgctgctccacgccgccaggccgagctacgtgctgacacagcctccatccgtgtctgtggctccaggacagaccgccagaatcacatgcggcggcaacaacatcggcagcaagagcgtgcactggtatcagcagccacctggacaggctccagtggtggtggtgtacgacgacagcgatagacctagcggcatccccgagagattcagcggcagcaattccggcaataccgccacactgaccatcagcagagtggaagctggcgacgaggccgtgtactactgccaagtgtgggacagcagcagcgatcacgtggtgtttggcggcggaacaaagctgacagtgcttggcggaggcggaagtggaggcggaggatctggcggcggaggctctcaactccagctgcaagagtctggccctggcctggtcaagcctagcgaaacactgagcctgacctgtaccgtgtctggcggctctatcagctccggcagctatatctggggctggatcagacaacctcctggcaaaggactggaatggatcggctccatctactacagcggcatcacctactacaaccccagcctgaagtccagagtgaccatctccgtggacaccagcaagaaccagttctccctgaagctgagcagcgtgacagccgccgataccgccgtgtattattgtgccagacatgacggcgctgtggccggcctgtttgattattggggacagggcaccctggtcaccgtgtcatctgctacgcgtgacggtaacgaggagatgggaggaatcactcaaaccccttacaaagtctcaatttcaggaacaactgttatccttacatgtccccagtatcctggcagcgagatcctttggcagcataacgacaagaatatagggggagatgaagacgataagaatatcggatctgacgaggatcacttgagcctgaaagagttctccgagcttgaacaaagcggatattatgtgtgctatccgcgcgggtcaaagccggaagacgctaacttttacctttatctccgagccagagtgtgcgaaaattgcatggaaatggacgttatgtccgttgctacaatagttatcgtagatatatgcatcacgggtggactgcttctgctggtttattattggtccaagaatagaaaggccaaagctaaacccgtgaccagaggcgctggcgcaggcggaaggcaaaggggacaaaacaaagaacggccaccaccagtgccaaatccagattatgagcctattcggaaaggacagagggacctgtactctggcctgaatcagagaagaatc

SEQ ID NO: 7510 - DNA, 1254 bp, Artificial Sequence
  Synthetic Polynucloetide
atggccttaccagtgaccgccttgctcctgccgctggccttgctgctccacgccgccaggccgagctacgtgctgacacagcctccatccgtgtctgtggctccaggacagaccgccagaatcacatgcggcggcaacaacatcggcagcaagagcgtgcactggtatcagcagccacctggacaggctccagtggtggtggtgtacgacgacagcgatagacctagcggcatccccgagagattcagcggcagcaattccggcaataccgccacactgaccatcagcagagtggaagctggcgacgaggccgtgtactactgccaagtgtgggacagcagcagcgatcacgtggtgtttggcggcggaacaaagctgacagtgcttggcggaggcggaagtggaggcggaggatctggcggcggaggctctcaactccagctgcaagagtctggccctggcctggtcaagcctagcgaaacactgagcctgacctgtaccgtgtctggcggctctatcagctccggcagctatatctggggctggatcagacaacctcctggcaaaggactggaatggatcggctccatctactacagcggcatcacctactacaaccccagcctgaagtccagagtgaccatctccgtggacaccagcaagaaccagttctccctgaagctgagcagcgtgacagccgccgataccgccgtgtattattgtgccagacatgacggcgctgtggccggcctgtttgattattggggacagggcaccctggtcaccgtgtcatctgctacgcgtttcaagatccccatcgaggaactggaagatcgggtgttcgtgaactgcaacacctctatcacctgggtggaaggcaccgtgggaacactgctgagcgacatcaccagactggacctcggcaagcggattctggaccctcggggcatctacagatgcaacggcaccgacatctacaaggacaaagaaagcaccgtgcaggtccactacagaatgtgccagtcctgcgtggaactggaccctgctacagtggccggcatcatcgtgaccgatgtgatcgctactctgctgctggctctgggagtgttctgcttcgccggacacgaaacaggcagactgtctggcgctgccgatacacaggccctgctgagaaacgaccaagtgtatcagcccctgcgcgacagagatgatgcccagtattctcacctcggcggcaactgggctagaaacaag

SEQ ID NO: 7511 - DNA, 1284 bp, Artificial Sequence
  Synthetic Polynucloetide
atggccttaccagtgaccgccttgctcctgccgctggccttgctgctccacgccgccaggccgagctacgtgctgacacagcctccatccgtgtctgtggctccaggacagaccgccagaatcacatgcggcggcaacaacatcggcagcaagagcgtgcactggtatcagcagccacctggacaggctccagtggtggtggtgtacgacgacagcgatagacctagcggcatccccgagagattcagcggcagcaattccggcaataccgccacactgaccatcagcagagtggaagctggcgacgaggccgtgtactactgccaagtgtgggacagcagcagcgatcacgtggtgtttggcggcggaacaaagctgacagtgcttggcggaggcggaagtggaggcggaggatctggcggcggaggctctcaactccagctgcaagagtctggccctggcctggtcaagcctagcgaaacactgagcctgacctgtaccgtgtctggcggctctatcagctccggcagctatatctggggctggatcagacaacctcctggcaaaggactggaatggatcggctccatctactacagcggcatcacctactacaaccccagcctgaagtccagagtgaccatctccgtggacaccagcaagaaccagttctccctgaagctgagcagcgtgacagccgccgataccgccgtgtattattgtgccagacatgacggcgctgtggccggcctgtttgattattggggacagggcaccctggtcaccgtgtcatctgctacgcgtcagagcatcaagggcaaccacctggtcaaggtgtacgactaccaagaggacggcagcgtgctgctgacatgtgatgccgaggccaagaacatcacctggtttaaggacggcaagatgatcggcttcctgaccgaggacaagaagaagtggaacctgggcagcaacgctaaggaccccagaggcatgtatcagtgcaagggcagccagaacaagagcaagcccctccaggtgtactaccggatgtgccagaactgcatcgagctgaacgccgctaccatcagcggctttctgttcgccgagatcgtgtccatcttcgtgctggccgtgggcgtgtactttatcgctggacaggatggcgtgcggcagagcagagcttccgataagcaaaccctgctgcctaacgaccagctgtaccagcctctgaaggacagagaggacgaccagtacagccacctccagggcaatcagctgagaagaaac

SEQ ID NO: 7512 - DNA, 1233 bp, Artificial Sequence
  Synthetic Polynucloetide
atggccttaccagtgaccgccttgctcctgccgctggccttgctgctccacgccgccaggccgagctacgtgctgacacagcctccatccgtgtctgtggctccaggacagaccgccagaatcacatgcggcggcaacaacatcggcagcaagagcgtgcactggtatcagcagccacctggacaggctccagtggtggtggtgtacgacgacagcgatagacctagcggcatccccgagagattcagcggcagcaattccggcaataccgccacactgaccatcagcagagtggaagctggcgacgaggccgtgtactactgccaagtgtgggacagcagcagcgatcacgtggtgtttggcggcggaacaaagctgacagtgcttggcggaggcggaagtggaggcggaggatctggcggcggaggctctcaactccagctgcaagagtctggccctggcctggtcaagcctagcgaaacactgagcctgacctgtaccgtgtctggcggctctatcagctccggcagctatatctggggctggatcagacaacctcctggcaaaggactggaatggatcggctccatctactacagcggcatcacctactacaaccccagcctgaagtccagagtgaccatctccgtggacaccagcaagaaccagttctccctgaagctgagcagcgtgacagccgccgataccgccgtgtattattgtgccagacatgacggcgctgtggccggcctgtttgattattggggacagggcaccctggtcaccgtgtcatctgctacgcgtcagagttttgggttgttggaccctaaattgtgctatctgttggacggaatcctgttcatttacggagtgatcctgaccgcattgttcctgcgggttaagttttccagatccgcagacgcacccgcttaccaacaagggcagaaccaactctacaatgaacttaatttggggcggagggaagagtacgacgttctggacaaaaggaggggacgagatcccgagatgggcggaaagcctcagcgaaggaagaatccgcaagaggggctttataacgaactccagaaagataaaatggcagaagcctatagtgagattgggatgaagggagaaaggaggaggggtaaaggtcacgatgggttgtaccaaggattgagcacagccactaaagatacctatgatgcgctccacatgcaggccctgccgccaaga

SEQ ID NO: 7513 - DNA, 1359 bp, Artificial Sequence
  Synthetic Polynucloetide
atggccttaccagtgaccgccttgctcctgccgctggccttgctgctccacgccgccaggccgcaactccagctgcaagagtctggccctggcctggtcaagcctagcgaaacactgagcctgacctgtaccgtgtctggcggctctatcagctccggcagctatatctggggctggatcagacaacctcctggcaaaggactggaatggatcggctccatctactacagcggcatcacctactacaaccccagcctgaagtccagagtgaccatctccgtggacaccagcaagaaccagttctccctgaagctgagcagcgtgacagccgccgataccgccgtgtattattgtgccagacatgacggcgctgtggccggcctgtttgattattggggacagggcaccctggtcaccgtgtcatctgctggcggaggcggaagtggaggcggaggatctggcggcggaggctctagctacgtgctgacacagcctccatccgtgtctgtggctccaggacagaccgccagaatcacatgcggcggcaacaacatcggcagcaagagcgtgcactggtatcagcagccacctggacaggctccagtggtggtggtgtacgacgacagcgatagacctagcggcatccccgagagattcagcggcagcaattccggcaataccgccacactgaccatcagcagagtggaagctggcgacgaggccgtgtactactgccaagtgtgggacagcagcagcgatcacgtggtgtttggcggcggaacaaagctgacagtgcttacgcgtgacggtaacgaggagatgggaggaatcactcaaaccccttacaaagtctcaatttcaggaacaactgttatccttacatgtccccagtatcctggcagcgagatcctttggcagcataacgacaagaatatagggggagatgaagacgataagaatatcggatctgacgaggatcacttgagcctgaaagagttctccgagcttgaacaaagcggatattatgtgtgctatccgcgcgggtcaaagccggaagacgctaacttttacctttatctccgagccagagtgtgcgaaaattgcatggaaatggacgttatgtccgttgctacaatagttatcgtagatatatgcatcacgggtggactgcttctgctggtttattattggtccaagaatagaaaggccaaagctaaacccgtgaccagaggcgctggcgcaggcggaaggcaaaggggacaaaacaaagaacggccaccaccagtgccaaatccagattatgagcctattcggaaaggacagagggacctgtactctggcctgaatcagagaagaatc

SEQ ID NO: 7514 - DNA, 1254 bp, Artificial Sequence
  Synthetic Polynucloetide
atggccttaccagtgaccgccttgctcctgccgctggccttgctgctccacgccgccaggccgcaactccagctgcaagagtctggccctggcctggtcaagcctagcgaaacactgagcctgacctgtaccgtgtctggcggctctatcagctccggcagctatatctggggctggatcagacaacctcctggcaaaggactggaatggatcggctccatctactacagcggcatcacctactacaaccccagcctgaagtccagagtgaccatctccgtggacaccagcaagaaccagttctccctgaagctgagcagcgtgacagccgccgataccgccgtgtattattgtgccagacatgacggcgctgtggccggcctgtttgattattggggacagggcaccctggtcaccgtgtcatctgctggcggaggcggaagtggaggcggaggatctggcggcggaggctctagctacgtgctgacacagcctccatccgtgtctgtggctccaggacagaccgccagaatcacatgcggcggcaacaacatcggcagcaagagcgtgcactggtatcagcagccacctggacaggctccagtggtggtggtgtacgacgacagcgatagacctagcggcatccccgagagattcagcggcagcaattccggcaataccgccacactgaccatcagcagagtggaagctggcgacgaggccgtgtactactgccaagtgtgggacagcagcagcgatcacgtggtgtttggcggcggaacaaagctgacagtgcttacgcgtttcaagatccccatcgaggaactggaagatcgggtgttcgtgaactgcaacacctctatcacctgggtggaaggcaccgtgggaacactgctgagcgacatcaccagactggacctcggcaagcggattctggaccctcggggcatctacagatgcaacggcaccgacatctacaaggacaaagaaagcaccgtgcaggtccactacagaatgtgccagtcctgcgtggaactggaccctgctacagtggccggcatcatcgtgaccgatgtgatcgctactctgctgctggctctgggagtgttctgcttcgccggacacgaaacaggcagactgtctggcgctgccgatacacaggccctgctgagaaacgaccaagtgtatcagcccctgcgcgacagagatgatgcccagtattctcacctcggcggcaactgggctagaaacaag

SEQ ID NO: 7515 - DNA, 1284 bp, Artificial Sequence
  Synthetic Polynucloetide
atggccttaccagtgaccgccttgctcctgccgctggccttgctgctccacgccgccaggccgcaactccagctgcaagagtctggccctggcctggtcaagcctagcgaaacactgagcctgacctgtaccgtgtctggcggctctatcagctccggcagctatatctggggctggatcagacaacctcctggcaaaggactggaatggatcggctccatctactacagcggcatcacctactacaaccccagcctgaagtccagagtgaccatctccgtggacaccagcaagaaccagttctccctgaagctgagcagcgtgacagccgccgataccgccgtgtattattgtgccagacatgacggcgctgtggccggcctgtttgattattggggacagggcaccctggtcaccgtgtcatctgctggcggaggcggaagtggaggcggaggatctggcggcggaggctctagctacgtgctgacacagcctccatccgtgtctgtggctccaggacagaccgccagaatcacatgcggcggcaacaacatcggcagcaagagcgtgcactggtatcagcagccacctggacaggctccagtggtggtggtgtacgacgacagcgatagacctagcggcatccccgagagattcagcggcagcaattccggcaataccgccacactgaccatcagcagagtggaagctggcgacgaggccgtgtactactgccaagtgtgggacagcagcagcgatcacgtggtgtttggcggcggaacaaagctgacagtgcttacgcgtcagagcatcaagggcaaccacctggtcaaggtgtacgactaccaagaggacggcagcgtgctgctgacatgtgatgccgaggccaagaacatcacctggtttaaggacggcaagatgatcggcttcctgaccgaggacaagaagaagtggaacctgggcagcaacgctaaggaccccagaggcatgtatcagtgcaagggcagccagaacaagagcaagcccctccaggtgtactaccggatgtgccagaactgcatcgagctgaacgccgctaccatcagcggctttctgttcgccgagatcgtgtccatcttcgtgctggccgtgggcgtgtactttatcgctggacaggatggcgtgcggcagagcagagcttccgataagcaaaccctgctgcctaacgaccagctgtaccagcctctgaaggacagagaggacgaccagtacagccacctccagggcaatcagctgagaagaaac

SEQ ID NO: 7516 - DNA, 1233 bp, Artificial Sequence
  Synthetic Polynucloetide
atggccttaccagtgaccgccttgctcctgccgctggccttgctgctccacgccgccaggccgcaactccagctgcaagagtctggccctggcctggtcaagcctagcgaaacactgagcctgacctgtaccgtgtctggcggctctatcagctccggcagctatatctggggctggatcagacaacctcctggcaaaggactggaatggatcggctccatctactacagcggcatcacctactacaaccccagcctgaagtccagagtgaccatctccgtggacaccagcaagaaccagttctccctgaagctgagcagcgtgacagccgccgataccgccgtgtattattgtgccagacatgacggcgctgtggccggcctgtttgattattggggacagggcaccctggtcaccgtgtcatctgctggcggaggcggaagtggaggcggaggatctggcggcggaggctctagctacgtgctgacacagcctccatccgtgtctgtggctccaggacagaccgccagaatcacatgcggcggcaacaacatcggcagcaagagcgtgcactggtatcagcagccacctggacaggctccagtggtggtggtgtacgacgacagcgatagacctagcggcatccccgagagattcagcggcagcaattccggcaataccgccacactgaccatcagcagagtggaagctggcgacgaggccgtgtactactgccaagtgtgggacagcagcagcgatcacgtggtgtttggcggcggaacaaagctgacagtgcttacgcgtcagagttttgggttgttggaccctaaattgtgctatctgttggacggaatcctgttcatttacggagtgatcctgaccgcattgttcctgcgggttaagttttccagatccgcagacgcacccgcttaccaacaagggcagaaccaactctacaatgaacttaatttggggcggagggaagagtacgacgttctggacaaaaggaggggacgagatcccgagatgggcggaaagcctcagcgaaggaagaatccgcaagaggggctttataacgaactccagaaagataaaatggcagaagcctatagtgagattgggatgaagggagaaaggaggaggggtaaaggtcacgatgggttgtaccaaggattgagcacagccactaaagatacctatgatgcgctccacatgcaggccctgccgccaaga

SEQ ID NO: 7517 - DNA, 1935 bp, Artificial Sequence
  Synthetic Polynucloetide
atggccttaccagtgaccgccttgctcctgccgctggccttgctgctccacgccgccaggccgagctacgtgctgacacagcctccatccgtgtctgtggctccaggacagaccgccagaatcacatgcggcggcaacaacatcggcagcaagagcgtgcactggtatcagcagccacctggacaggctccagtggtggtggtgtacgacgacagcgatagacctagcggcatccccgagagattcagcggcagcaattccggcaataccgccacactgaccatcagcagagtggaagctggcgacgaggccgtgtactactgccaagtgtgggacagcagcagcgatcacgtggtgtttggcggcggaacaaagctgacagtgcttggcggaggcggaagtggaggcggaggatctggcggcggaggctctcaactccagctgcaagagtctggccctggcctggtcaagcctagcgaaacactgagcctgacctgtaccgtgtctggcggctctatcagctccggcagctatatctggggctggatcagacaacctcctggcaaaggactggaatggatcggctccatctactacagcggcatcacctactacaaccccagcctgaagtccagagtgaccatctccgtggacaccagcaagaaccagttctccctgaagctgagcagcgtgacagccgccgataccgccgtgtattattgtgccagacatgacggcgctgtggccggcctgtttgattattggggacagggcaccctggtcaccgtgtcatctgctacgcgtgggagcggcatccagaaccctgatcctgccgtgtaccagctgcgggatagcaagagcagcgacaagagcgtgtgtctgttcaccgacttcgacagccagaccaacgtgtcccagagcaaggactccgacgtgtacatcaccgataagaccgtgctggacatgcggagcatggacttcaagagcaactccgccgtggcctggtccaacaagtccgatttcgcctgcgccaacgccttcaacaacagcattatccccgaggacacattcttcccaagccccgagagcagctgcgacgtgaagctggtggaaaagagcttcgagacagacaccaacctgaacttccagaacctgagcgtgatcggcttcagaatcctgctgctgaaagtggccggctttaacctgctgatgaccctgcggctgtggtccagccgcgccaagagaagcggatctggcgtgaagcagaccctgaatttcgacctgctgaagctggctggcgacgtggaatccaacccaggcccttctagaggccatatgaccgagtacaagcccacggtgcgcctcgccacccgcgacgacgtccccagggccgtacgcaccctcgccgccgcgttcgccgactaccccgccacgcgccacaccgtcgatccggaccgccacatcgagcgggtcaccgagctgcaagaactcttcctcacgcgcgtcgggctcgacatcggcaaggtgtgggtcgcggacgacggcgccgcggtggcggtctggaccacgccggagagcgtcgaagcgggggcggtgttcgccgagatcggcccgcgcatggccgagttgagcggttcccggctggccgcgcagcaacagatggaaggcctcctggcgccgcaccggcccaaggagcccgcgtggttcctggccaccgtcggcgtctcgcccgaccaccagggcaagggtctgggcagcgccgtcgtgctccccggagtggaggcggccgagcgcgccggggtgcccgccttcctggagacctccgcgccccgcaacctccccttctacgagcggctcggcttcaccgtcaccgccgacgtcgaggtgcccgaaggaccgcgcacctggtgcatgacccgcaagcccggtgcctga

SEQ ID NO: 7518 - DNA, 2031 bp, Artificial Sequence
  Synthetic Polynucloetide
atggccttaccagtgaccgccttgctcctgccgctggccttgctgctccacgccgccaggccgagctacgtgctgacacagcctccatccgtgtctgtggctccaggacagaccgccagaatcacatgcggcggcaacaacatcggcagcaagagcgtgcactggtatcagcagccacctggacaggctccagtggtggtggtgtacgacgacagcgatagacctagcggcatccccgagagattcagcggcagcaattccggcaataccgccacactgaccatcagcagagtggaagctggcgacgaggccgtgtactactgccaagtgtgggacagcagcagcgatcacgtggtgtttggcggcggaacaaagctgacagtgcttggcggaggcggaagtggaggcggaggatctggcggcggaggctctcaactccagctgcaagagtctggccctggcctggtcaagcctagcgaaacactgagcctgacctgtaccgtgtctggcggctctatcagctccggcagctatatctggggctggatcagacaacctcctggcaaaggactggaatggatcggctccatctactacagcggcatcacctactacaaccccagcctgaagtccagagtgaccatctccgtggacaccagcaagaaccagttctccctgaagctgagcagcgtgacagccgccgataccgccgtgtattattgtgccagacatgacggcgctgtggccggcctgtttgattattggggacagggcaccctggtcaccgtgtcatctgctctcgaggacctgaagaacgtgttcccacctgaggtggccgtgttcgagcctagcgaggccgagatcagccacacccagaaagccaccctcgtgtgcctggctaccggcttctaccccgaccatgtggaactgtcttggtgggtcaacggcaaagaggtgcacagcggcgtgtctaccgacccccagccactgaaagaacagcccgccctgaacgacagccggtactgcctgagcagcagactgagagtgtccgccaccttctggcagaacccccggaaccacttcagatgccaggtgcagttctacggcctgagcgagaacgacgagtggacccaggacagagccaagcccgtgacccagatcgtgtctgccgaagcctggggcagagccgattgcggctttaccagcgagagctaccagcagggcgtgctgagcgccaccatcctgtacgagatcctgctgggcaaggccaccctgtacgccgtgctggtgtctgccctggtgctgatggctatggtcaagcggaaggacagccggggaagggccaagcgatctggatctggagcaacaaacttctcactactcaaacaagcaggtgacgtggaggagaatcccgggcctactagaggccatatgaccgagtacaagcccacggtgcgcctcgccacccgcgacgacgtccccagggccgtacgcaccctcgccgccgcgttcgccgactaccccgccacgcgccacaccgtcgatccggaccgccacatcgagcgggtcaccgagctgcaagaactcttcctcacgcgcgtcgggctcgacatcggcaaggtgtgggtcgcggacgacggcgccgcggtggcggtctggaccacgccggagagcgtcgaagcgggggcggtgttcgccgagatcggcccgcgcatggccgagttgagcggttcccggctggccgcgcagcaacagatggaaggcctcctggcgccgcaccggcccaaggagcccgcgtggttcctggccaccgtcggcgtctcgcccgaccaccagggcaagggtctgggcagcgccgtcgtgctccccggagtggaggcggccgagcgcgccggggtgcccgccttcctggagacctccgcgccccgcaacctccccttctacgagcggctcggcttcaccgtcaccgccgacgtcgaggtgcccgaaggaccgcgcacctggtgcatgacccgcaagcccggtgcctga

SEQ ID NO: 7519 - DNA, 2181 bp, Artificial Sequence
  Synthetic Polynucloetide
atggccttaccagtgaccgccttgctcctgccgctggccttgctgctccacgccgccaggccgagctacgtgctgacacagcctccatccgtgtctgtggctccaggacagaccgccagaatcacatgcggcggcaacaacatcggcagcaagagcgtgcactggtatcagcagccacctggacaggctccagtggtggtggtgtacgacgacagcgatagacctagcggcatccccgagagattcagcggcagcaattccggcaataccgccacactgaccatcagcagagtggaagctggcgacgaggccgtgtactactgccaagtgtgggacagcagcagcgatcacgtggtgtttggcggcggaacaaagctgacagtgcttggcggaggcggaagtggaggcggaggatctggcggcggaggctctcaactccagctgcaagagtctggccctggcctggtcaagcctagcgaaacactgagcctgacctgtaccgtgtctggcggctctatcagctccggcagctatatctggggctggatcagacaacctcctggcaaaggactggaatggatcggctccatctactacagcggcatcacctactacaaccccagcctgaagtccagagtgaccatctccgtggacaccagcaagaaccagttctccctgaagctgagcagcgtgacagccgccgataccgccgtgtattattgtgccagacatgacggcgctgtggccggcctgtttgattattggggacagggcaccctggtcaccgtgtcatctgctacgcgtgagcagaaactgatctcggaagaggatctggggagcggcaccccattcccttctctggcccctcccatcatgctgctggtggacggcaagcagcagatggtggtcgtgtgcctggtgctggatgtggccccacctggactggacagccccatctggtttagcgccggcaatggctctgccctggacgcctttacctacggcccaagccctgccaccgatggcacctggacaaatctggcccacctgagcctgcccagcgaggaactggcttcttgggagcctctcgtgtgccacacaggacctggcgctgagggacacagcagatccacccagcctatgcacctgtctggcgaggccagcaccgccagaacctgtcctcaggaacctctgagaggcacccctggcggagcactgtggctgggagtgctgagactgctgctgttcaagctgctgctgtttgacctgctgctgacctgctcctgtctgtgcgatcctgccggccctctgccttctcctgccaccaccacaagactgagagccctgggcagccacagactgcaccctgccacagagacaggcggcagagaggccacaagcagccctagaccccagcccagagacagaagatggggcgataccccccctggcagaaagcctggatctccagtccgcgccaagagaagcggatctggcgtgaagcagaccctgaatttcgacctgctgaagctggctggcgacgtggaatccaacccaggcccttctagatctagaggccatatgaccgagtacaagcccacggtgcgcctcgccacccgcgacgacgtccccagggccgtacgcaccctcgccgccgcgttcgccgactaccccgccacgcgccacaccgtcgatccggaccgccacatcgagcgggtcaccgagctgcaagaactcttcctcacgcgcgtcgggctcgacatcggcaaggtgtgggtcgcggacgacggcgccgcggtggcggtctggaccacgccggagagcgtcgaagcgggggcggtgttcgccgagatcggcccgcgcatggccgagttgagcggttcccggctggccgcgcagcaacagatggaaggcctcctggcgccgcaccggcccaaggagcccgcgtggttcctggccaccgtcggcgtctcgcccgaccaccagggcaagggtctgggcagcgccgtcgtgctccccggagtggaggcggccgagcgcgccggggtgcccgccttcctggagacctccgcgccccgcaacctccccttctacgagcggctcggcttcaccgtcaccgccgacgtcgaggtgcccgaaggaccgcgcacctggtgcatgacccgcaagcccggtgcctga

SEQ ID NO: 7520 - DNA, 1620 bp, Artificial Sequence; identical to SEQ ID NO: 7451
  Synthetic Polynucloetide

SEQ ID NO: 7521 - DNA, 927 bp, Artificial Sequence; identical to SEQ ID NO: 7452
  Synthetic Polynucloetide

SEQ ID NO: 7522 - DNA, 1356 bp, Artificial Sequence
  Synthetic Polynucloetide
atggactggatttggcgcatccttttccttgtcggcgctgctaccggcgcgcattccttcgaacaactccagctgcaagagtctggccctggcctggtcaagcctagcgaaacactgagcctgacctgtaccgtgtctggcggctctatcagctccggcagctatatctggggctggatcagacaacctcctggcaaaggactggaatggatcggctccatctactacagcggcatcacctactacaaccccagcctgaagtccagagtgaccatctccgtggacaccagcaagaaccagttctccctgaagctgagcagcgtgacagccgccgataccgccgtgtattattgtgccagacatgacggcgctgtggccggcctgtttgattattggggacagggcaccctggtcaccgtgtcatctgctacgcgtatccagaaccctgatcctgccgtgtaccagctgcgggatagcaagagcagcgacaagagcgtgtgtctgttcaccgacttcgacagccagaccaacgtgtcccagagcaaggactccgacgtgtacatcaccgataagaccgtgctggacatgcggagcatggacttcaagagcaactccgccgtggcctggtccaacaagtccgatttcgcctgcgccaacgccttcaacaacagcattatccccgaggacacattcttcccaagccccgagagcagctgcgacgtgaagctggtggaaaagagcttcgagacagacaccaacctgaacttccagaacctgagcgtgatcggcttcagaatcctgctgctgaaagtggccggctttaacctgctgatgaccctgcggctgtggtccagccgcgccaagagaagcggatctggcgtgaagcagaccctgaatttcgacctgctgaagctggctggcgacgtggaatccaacccaggcccttctagaggccatatggccaagcctttgtctcaagaagaatccaccctcattgaaagagcaacggctacaatcaacagcatccccatctctgaagactacagcgtcgccagcgcagctctctctagcgacggccgcatcttcactggtgtcaatgtatatcattttactgggggaccttgtgcagaactcgtggtgctgggcactgctgctgctgcggcagctggcaacctgacttgtatcgtcgcgatcggaaatgagaacaggggcatcttgagcccctgcggacggtgccgacaggtgcttctcgatctgcatcctgggatcaaagccatagtgaaggacagtgatggacagccgacggcagttgggattcgtgaattgctgccctctggttatgtgtgggagggctga

SEQ ID NO: 7523 - DNA, 855 bp, Artificial Sequence
  Synthetic Polynucloetide
atggactggatttggcgcatccttttccttgtcggcgctgctaccggcgcgcattccttcgaacaactccagctgcaagagtctggccctggcctggtcaagcctagcgaaacactgagcctgacctgtaccgtgtctggcggctctatcagctccggcagctatatctggggctggatcagacaacctcctggcaaaggactggaatggatcggctccatctactacagcggcatcacctactacaaccccagcctgaagtccagagtgaccatctccgtggacaccagcaagaaccagttctccctgaagctgagcagcgtgacagccgccgataccgccgtgtattattgtgccagacatgacggcgctgtggccggcctgtttgattattggggacagggcaccctggtcaccgtgtcatctgctacgcgtatccagaaccctgatcctgccgtgtaccagctgcgggatagcaagagcagcgacaagagcgtgtgtctgttcaccgacttcgacagccagaccaacgtgtcccagagcaaggactccgacgtgtacatcaccgataagaccgtgctggacatgcggagcatggacttcaagagcaactccgccgtggcctggtccaacaagtccgatttcgcctgcgccaacgccttcaacaacagcattatccccgaggacacattcttcccaagccccgagagcagctgcgacgtgaagctggtggaaaagagcttcgagacagacaccaacctgaacttccagaacctgagcgtgatcggcttcagaatcctgctgctgaaagtggccggctttaacctgctgatgaccctgcggctgtggtccagc

SEQ ID NO: 7524 - DNA, 1674 bp, Artificial Sequence; identical to SEQ ID NO: 7455
  Synthetic Polynucloetide

SEQ ID NO: 7525 - DNA, 984 bp, Artificial Sequence; identical to SEQ ID NO: 7456
  Synthetic Polynucloetide

SEQ ID NO: 7526 - DNA, 1392 bp, Artificial Sequence
  Synthetic Polynucloetide
atggactggatttggcgcatccttttccttgtcggcgctgctaccggcgcgcattccttcgaacaactccagctgcaagagtctggccctggcctggtcaagcctagcgaaacactgagcctgacctgtaccgtgtctggcggctctatcagctccggcagctatatctggggctggatcagacaacctcctggcaaaggactggaatggatcggctccatctactacagcggcatcacctactacaaccccagcctgaagtccagagtgaccatctccgtggacaccagcaagaaccagttctccctgaagctgagcagcgtgacagccgccgataccgccgtgtattattgtgccagacatgacggcgctgtggccggcctgtttgattattggggacagggcaccctggtcaccgtgtcatctgctacgcgtgagcagaaactgatctcggaagaggatgggagcggcatccagaaccctgatcctgccgtgtaccagctgcgggatagcaagagcagcgacaagagcgtgtgtctgttcaccgacttcgacagccagaccaacgtgtcccagagcaaggactccgacgtgtacatcaccgataagtgcgtgctggacatgcggagcatggacttcaagagcaactccgccgtggcctggtccaacaagtccgatttcgcctgcgccaacgccttcaacaacagcattatccccgaggacacattcttcccaagccccgagagcagctgcgacgtgaagctggtggaaaagagcttcgagacagacaccaacctgaacttccagaacctgagcgtgatcggcttcagaatcctgctgctgaaagtggccggctttaacctgctgatgaccctgcggctgtggtccagccgcgccaagagaagcggatctggcgtgaagcagaccctgaatttcgacctgctgaagctggctggcgacgtggaatccaacccaggcccttctagaggccatatggccaagcctttgtctcaagaagaatccaccctcattgaaagagcaacggctacaatcaacagcatccccatctctgaagactacagcgtcgccagcgcagctctctctagcgacggccgcatcttcactggtgtcaatgtatatcattttactgggggaccttgtgcagaactcgtggtgctgggcactgctgctgctgcggcagctggcaacctgacttgtatcgtcgcgatcggaaatgagaacaggggcatcttgagcccctgcggacggtgccgacaggtgcttctcgatctgcatcctgggatcaaagccatagtgaaggacagtgatggacagccgacggcagttgggattcgtgaattgctgccctctggttatgtgtgggagggctga

SEQ ID NO: 7527 - DNA, 894 bp, Artificial Sequence
  Synthetic Polynucloetide
atggactggatttggcgcatccttttccttgtcggcgctgctaccggcgcgcattccttcgaacaactccagctgcaagagtctggccctggcctggtcaagcctagcgaaacactgagcctgacctgtaccgtgtctggcggctctatcagctccggcagctatatctggggctggatcagacaacctcctggcaaaggactggaatggatcggctccatctactacagcggcatcacctactacaaccccagcctgaagtccagagtgaccatctccgtggacaccagcaagaaccagttctccctgaagctgagcagcgtgacagccgccgataccgccgtgtattattgtgccagacatgacggcgctgtggccggcctgtttgattattggggacagggcaccctggtcaccgtgtcatctgctacgcgtgagcagaaactgatctcggaagaggatgggagcggcatccagaaccctgatcctgccgtgtaccagctgcgggatagcaagagcagcgacaagagcgtgtgtctgttcaccgacttcgacagccagaccaacgtgtcccagagcaaggactccgacgtgtacatcaccgataagtgcgtgctggacatgcggagcatggacttcaagagcaactccgccgtggcctggtccaacaagtccgatttcgcctgcgccaacgccttcaacaacagcattatccccgaggacacattcttcccaagccccgagagcagctgcgacgtgaagctggtggaaaagagcttcgagacagacaccaacctgaacttccagaacctgagcgtgatcggcttcagaatcctgctgctgaaagtggccggctttaacctgctgatgaccctgcggctgtggtccagctga

SEQ ID NO: 7528 - DNA, 1935 bp, Artificial Sequence
  Synthetic Polynucloetide
atggccttaccagtgaccgccttgctcctgccgctggccttgctgctccacgccgccaggccgagctacgtgctgacacagcctccatccgtgtctgtggctccaggacagaccgccagaatcacatgcggcggcaacaacatcggcagcaagagcgtgcactggtatcagcagccacctggacaggctccagtggtggtggtgtacgacgacagcgatagacctagcggcatccccgagagattcagcggcagcaattccggcaataccgccacactgaccatcagcagagtggaagctggcgacgaggccgtgtactactgccaagtgtgggacagcagcagcgatcacgtggtgtttggcggcggaacaaagctgacagtgcttggcggaggcggaagtggaggcggaggatctggcggcggaggctctcaactccagctgcaagagtctggccctggcctggtcaagcctagcgaaacactgagcctgacctgtaccgtgtctggcggctctatcagctccggcagctatatctggggctggatcagacaacctcctggcaaaggactggaatggatcggctccatctactacagcggcatcacctactacaaccccagcctgaagtccagagtgaccatctccgtggacaccagcaagaaccagttctccctgaagctgagcagcgtgacagccgccgataccgccgtgtattattgtgccagacatgacggcgctgtggccggcctgtttgattattggggacagggcaccctggtcaccgtgtcatctgctacgcgtgggagcggcatccagaaccctgatcctgccgtgtaccagctgcgggatagcaagagcagcgacaagagcgtgtgtctgttcaccgacttcgacagccagaccaacgtgtcccagagcaaggactccgacgtgtacatcaccgataagaccgtgctggacatgcggagcatggacttcaagagcaactccgccgtggcctggtccaacaagtccgatttcgcctgcgccaacgccttcaacaacagcattatccccgaggacacattcttcccaagcagcgacgtgccctgcgacgtgaagctggtggaaaagagcttcgagacagacaccaacctgaacttccagaacctgagcgtgatcggcttcagaatcctgctgctgaaagtggccggctttaacctgctgatgaccctgcggctgtggtccagccgcgccaagagaagcggatctggcgtgaagcagaccctgaatttcgacctgctgaagctggctggcgacgtggaatccaacccaggcccttctagaggccatatgaccgagtacaagcccacggtgcgcctcgccacccgcgacgacgtccccagggccgtacgcaccctcgccgccgcgttcgccgactaccccgccacgcgccacaccgtcgatccggaccgccacatcgagcgggtcaccgagctgcaagaactcttcctcacgcgcgtcgggctcgacatcggcaaggtgtgggtcgcggacgacggcgccgcggtggcggtctggaccacgccggagagcgtcgaagcgggggcggtgttcgccgagatcggcccgcgcatggccgagttgagcggttcccggctggccgcgcagcaacagatggaaggcctcctggcgccgcaccggcccaaggagcccgcgtggttcctggccaccgtcggcgtctcgcccgaccaccagggcaagggtctgggcagcgccgtcgtgctccccggagtggaggcggccgagcgcgccggggtgcccgccttcctggagacctccgcgccccgcaacctccccttctacgagcggctcggcttcaccgtcaccgccgacgtcgaggtgcccgaaggaccgcgcacctggtgcatgacccgcaagcccggtgcctga

SEQ ID NO: 7529 - DNA, 2031 bp, Artificial Sequence
  Synthetic Polynucloetide
atggccttaccagtgaccgccttgctcctgccgctggccttgctgctccacgccgccaggccgagctacgtgctgacacagcctccatccgtgtctgtggctccaggacagaccgccagaatcacatgcggcggcaacaacatcggcagcaagagcgtgcactggtatcagcagccacctggacaggctccagtggtggtggtgtacgacgacagcgatagacctagcggcatccccgagagattcagcggcagcaattccggcaataccgccacactgaccatcagcagagtggaagctggcgacgaggccgtgtactactgccaagtgtgggacagcagcagcgatcacgtggtgtttggcggcggaacaaagctgacagtgcttggcggaggcggaagtggaggcggaggatctggcggcggaggctctcaactccagctgcaagagtctggccctggcctggtcaagcctagcgaaacactgagcctgacctgtaccgtgtctggcggctctatcagctccggcagctatatctggggctggatcagacaacctcctggcaaaggactggaatggatcggctccatctactacagcggcatcacctactacaaccccagcctgaagtccagagtgaccatctccgtggacaccagcaagaaccagttctccctgaagctgagcagcgtgacagccgccgataccgccgtgtattattgtgccagacatgacggcgctgtggccggcctgtttgattattggggacagggcaccctggtcaccgtgtcatctgctctcgaggacctgaagaacgtgttcccacctgaggtggccgtgttcgagcctagcaaggccgagatcgcccacacccagaaagccaccctcgtgtgcctggctaccggcttctaccccgaccatgtggaactgtcttggtgggtcaacggcaaagaggtgcacagcggcgtgtctaccgacccccagccactgaaagaacagcccgccctgaacgacagccggtactgcctgagcagcagactgagagtgtccgccaccttctggcagaacccccggaaccacttcagatgccaggtgcagttctacggcctgagcgagaacgacgagtggacccaggacagagccaagcccgtgacccagatcgtgtctgccgaagcctggggcagagccgattgcggcatcaccagcgccagctaccaccagggcgtgctgagcgccaccatcctgtacgagatcctgctgggcaaggccaccctgtacgccgtgctggtgtctgccctggtgctgatggctatggtcaagcggaaggacagccggggaagggccaagcgatctggatctggagcaacaaacttctcactactcaaacaagcaggtgacgtggaggagaatcccgggcctactagaggccatatgaccgagtacaagcccacggtgcgcctcgccacccgcgacgacgtccccagggccgtacgcaccctcgccgccgcgttcgccgactaccccgccacgcgccacaccgtcgatccggaccgccacatcgagcgggtcaccgagctgcaagaactcttcctcacgcgcgtcgggctcgacatcggcaaggtgtgggtcgcggacgacggcgccgcggtggcggtctggaccacgccggagagcgtcgaagcgggggcggtgttcgccgagatcggcccgcgcatggccgagttgagcggttcccggctggccgcgcagcaacagatggaaggcctcctggcgccgcaccggcccaaggagcccgcgtggttcctggccaccgtcggcgtctcgcccgaccaccagggcaagggtctgggcagcgccgtcgtgctccccggagtggaggcggccgagcgcgccggggtgcccgccttcctggagacctccgcgccccgcaacctccccttctacgagcggctcggcttcaccgtcaccgccgacgtcgaggtgcccgaaggaccgcgcacctggtgcatgacccgcaagcccggtgcctga

SEQ ID NO: 7530 - DNA, 2100 bp, Artificial Sequence
  Synthetic Polynucloetide
atggccttaccagtgaccgccttgctcctgccgctggccttgctgctccacgccgccaggccgagctacgtgctgacacagcctccatccgtgtctgtggctccaggacagaccgccagaatcacatgcggcggcaacaacatcggcagcaagagcgtgcactggtatcagcagccacctggacaggctccagtggtggtggtgtacgacgacagcgatagacctagcggcatccccgagagattcagcggcagcaattccggcaataccgccacactgaccatcagcagagtggaagctggcgacgaggccgtgtactactgccaagtgtgggacagcagcagcgatcacgtggtgtttggcggcggaacaaagctgacagtgcttggcggaggcggaagtggaggcggaggatctggcggcggaggctctcaactccagctgcaagagtctggccctggcctggtcaagcctagcgaaacactgagcctgacctgtaccgtgtctggcggctctatcagctccggcagctatatctggggctggatcagacaacctcctggcaaaggactggaatggatcggctccatctactacagcggcatcacctactacaaccccagcctgaagtccagagtgaccatctccgtggacaccagcaagaaccagttctccctgaagctgagcagcgtgacagccgccgataccgccgtgtattattgtgccagacatgacggcgctgtggccggcctgtttgattattggggacagggcaccctggtcaccgtgtcatctgctacgcgtgggtctggaggcggaggcagcggcggaggcgggagcggcgacggtaacgaggagatgggaggaatcactcaaaccccttacaaagtctcaatttcaggaacaactgttatccttacatgtccccagtatcctggcagcgagatcctttggcagcataacgacaagaatatagggggagatgaagacgataagaatatcggatctgacgaggatcacttgagcctgaaagagttctccgagcttgaacaaagcggatattatgtgtgctatccgcgcgggtcaaagccggaagacgctaacttttacctttatctccgagccagagtgtgcgaaaattgcatggaaatggacgttatgtccgttgctacaatagttatcgtagatatatgcatcacgggtggactgcttctgctggtttattattggtccaagaatagaaaggccaaagctaaacccgtgaccagaggcgctggcgcaggcggaaggcaaaggggacaaaacaaagaacggccaccaccagtgccaaatccagattatgagcctattcggaaaggacagagggacctgtactctggcctgaatcagagaagaatccgcgccaagagaagcggatctggcgtgaagcagaccctgaatttcgacctgctgaagctggctggcgacgtggaatccaacccaggcccttctagaggccatatgaccgagtacaagcccacggtgcgcctcgccacccgcgacgacgtccccagggccgtacgcaccctcgccgccgcgttcgccgactaccccgccacgcgccacaccgtcgatccggaccgccacatcgagcgggtcaccgagctgcaagaactcttcctcacgcgcgtcgggctcgacatcggcaaggtgtgggtcgcggacgacggcgccgcggtggcggtctggaccacgccggagagcgtcgaagcgggggcggtgttcgccgagatcggcccgcgcatggccgagttgagcggttcccggctggccgcgcagcaacagatggaaggcctcctggcgccgcaccggcccaaggagcccgcgtggttcctggccaccgtcggcgtctcgcccgaccaccagggcaagggtctgggcagcgccgtcgtgctccccggagtggaggcggccgagcgcgccggggtgcccgccttcctggagacctccgcgccccgcaacctccccttctacgagcggctcggcttcaccgtcaccgccgacgtcgaggtgcccgaaggaccgcgcacctggtgcatgacccgcaagcccggtgcctga

SEQ ID NO: 7531 - DNA, 1995 bp, Artificial Sequence
  Synthetic Polynucloetide
atggccttaccagtgaccgccttgctcctgccgctggccttgctgctccacgccgccaggccgagctacgtgctgacacagcctccatccgtgtctgtggctccaggacagaccgccagaatcacatgcggcggcaacaacatcggcagcaagagcgtgcactggtatcagcagccacctggacaggctccagtggtggtggtgtacgacgacagcgatagacctagcggcatccccgagagattcagcggcagcaattccggcaataccgccacactgaccatcagcagagtggaagctggcgacgaggccgtgtactactgccaagtgtgggacagcagcagcgatcacgtggtgtttggcggcggaacaaagctgacagtgcttggcggaggcggaagtggaggcggaggatctggcggcggaggctctcaactccagctgcaagagtctggccctggcctggtcaagcctagcgaaacactgagcctgacctgtaccgtgtctggcggctctatcagctccggcagctatatctggggctggatcagacaacctcctggcaaaggactggaatggatcggctccatctactacagcggcatcacctactacaaccccagcctgaagtccagagtgaccatctccgtggacaccagcaagaaccagttctccctgaagctgagcagcgtgacagccgccgataccgccgtgtattattgtgccagacatgacggcgctgtggccggcctgtttgattattggggacagggcaccctggtcaccgtgtcatctgctacgcgtgggtctggaggcggaggcagcggcggaggcgggagcggcttcaagatccccatcgaggaactggaagatcgggtgttcgtgaactgcaacacctctatcacctgggtggaaggcaccgtgggaacactgctgagcgacatcaccagactggacctcggcaagcggattctggaccctcggggcatctacagatgcaacggcaccgacatctacaaggacaaagaaagcaccgtgcaggtccactacagaatgtgccagtcctgcgtggaactggaccctgctacagtggccggcatcatcgtgaccgatgtgatcgctactctgctgctggctctgggagtgttctgcttcgccggacacgaaacaggcagactgtctggcgctgccgatacacaggccctgctgagaaacgaccaagtgtatcagcccctgcgcgacagagatgatgcccagtattctcacctcggcggcaactgggctagaaacaagcgcgccaagagaagcggatctggcgtgaagcagaccctgaatttcgacctgctgaagctggctggcgacgtggaatccaacccaggcccttctagaggccatatgaccgagtacaagcccacggtgcgcctcgccacccgcgacgacgtccccagggccgtacgcaccctcgccgccgcgttcgccgactaccccgccacgcgccacaccgtcgatccggaccgccacatcgagcgggtcaccgagctgcaagaactcttcctcacgcgcgtcgggctcgacatcggcaaggtgtgggtcgcggacgacggcgccgcggtggcggtctggaccacgccggagagcgtcgaagcgggggcggtgttcgccgagatcggcccgcgcatggccgagttgagcggttcccggctggccgcgcagcaacagatggaaggcctcctggcgccgcaccggcccaaggagcccgcgtggttcctggccaccgtcggcgtctcgcccgaccaccagggcaagggtctgggcagcgccgtcgtgctccccggagtggaggcggccgagcgcgccggggtgcccgccttcctggagacctccgcgccccgcaacctccccttctacgagcggctcggcttcaccgtcaccgccgacgtcgaggtgcccgaaggaccgcgcacctggtgcatgacccgcaagcccggtgcctga

SEQ ID NO: 7532 - DNA, 2025 bp, Artificial Sequence
  Synthetic Polynucloetide
atggccttaccagtgaccgccttgctcctgccgctggccttgctgctccacgccgccaggccgagctacgtgctgacacagcctccatccgtgtctgtggctccaggacagaccgccagaatcacatgcggcggcaacaacatcggcagcaagagcgtgcactggtatcagcagccacctggacaggctccagtggtggtggtgtacgacgacagcgatagacctagcggcatccccgagagattcagcggcagcaattccggcaataccgccacactgaccatcagcagagtggaagctggcgacgaggccgtgtactactgccaagtgtgggacagcagcagcgatcacgtggtgtttggcggcggaacaaagctgacagtgcttggcggaggcggaagtggaggcggaggatctggcggcggaggctctcaactccagctgcaagagtctggccctggcctggtcaagcctagcgaaacactgagcctgacctgtaccgtgtctggcggctctatcagctccggcagctatatctggggctggatcagacaacctcctggcaaaggactggaatggatcggctccatctactacagcggcatcacctactacaaccccagcctgaagtccagagtgaccatctccgtggacaccagcaagaaccagttctccctgaagctgagcagcgtgacagccgccgataccgccgtgtattattgtgccagacatgacggcgctgtggccggcctgtttgattattggggacagggcaccctggtcaccgtgtcatctgctacgcgtgggtctggaggcggaggcagcggcggaggcgggagcggccagagcatcaagggcaaccacctggtcaaggtgtacgactaccaagaggacggcagcgtgctgctgacatgtgatgccgaggccaagaacatcacctggtttaaggacggcaagatgatcggcttcctgaccgaggacaagaagaagtggaacctgggcagcaacgctaaggaccccagaggcatgtatcagtgcaagggcagccagaacaagagcaagcccctccaggtgtactaccggatgtgccagaactgcatcgagctgaacgccgctaccatcagcggctttctgttcgccgagatcgtgtccatcttcgtgctggccgtgggcgtgtactttatcgctggacaggatggcgtgcggcagagcagagcttccgataagcaaaccctgctgcctaacgaccagctgtaccagcctctgaaggacagagaggacgaccagtacagccacctccagggcaatcagctgagaagaaaccgcgccaagagaagcggatctggcgtgaagcagaccctgaatttcgacctgctgaagctggctggcgacgtggaatccaacccaggcccttctagaggccatatgaccgagtacaagcccacggtgcgcctcgccacccgcgacgacgtccccagggccgtacgcaccctcgccgccgcgttcgccgactaccccgccacgcgccacaccgtcgatccggaccgccacatcgagcgggtcaccgagctgcaagaactcttcctcacgcgcgtcgggctcgacatcggcaaggtgtgggtcgcggacgacggcgccgcggtggcggtctggaccacgccggagagcgtcgaagcgggggcggtgttcgccgagatcggcccgcgcatggccgagttgagcggttcccggctggccgcgcagcaacagatggaaggcctcctggcgccgcaccggcccaaggagcccgcgtggttcctggccaccgtcggcgtctcgcccgaccaccagggcaagggtctgggcagcgccgtcgtgctccccggagtggaggcggccgagcgcgccggggtgcccgccttcctggagacctccgcgccccgcaacctccccttctacgagcggctcggcttcaccgtcaccgccgacgtcgaggtgcccgaaggaccgcgcacctggtgcatgacccgcaagcccggtgcctga

SEQ ID NO: 7533 - DNA, 1974 bp, Artificial Sequence
  Synthetic Polynucloetide
atggccttaccagtgaccgccttgctcctgccgctggccttgctgctccacgccgccaggccgagctacgtgctgacacagcctccatccgtgtctgtggctccaggacagaccgccagaatcacatgcggcggcaacaacatcggcagcaagagcgtgcactggtatcagcagccacctggacaggctccagtggtggtggtgtacgacgacagcgatagacctagcggcatccccgagagattcagcggcagcaattccggcaataccgccacactgaccatcagcagagtggaagctggcgacgaggccgtgtactactgccaagtgtgggacagcagcagcgatcacgtggtgtttggcggcggaacaaagctgacagtgcttggcggaggcggaagtggaggcggaggatctggcggcggaggctctcaactccagctgcaagagtctggccctggcctggtcaagcctagcgaaacactgagcctgacctgtaccgtgtctggcggctctatcagctccggcagctatatctggggctggatcagacaacctcctggcaaaggactggaatggatcggctccatctactacagcggcatcacctactacaaccccagcctgaagtccagagtgaccatctccgtggacaccagcaagaaccagttctccctgaagctgagcagcgtgacagccgccgataccgccgtgtattattgtgccagacatgacggcgctgtggccggcctgtttgattattggggacagggcaccctggtcaccgtgtcatctgctacgcgtgggtctggaggcggaggcagcggcggaggcgggagcggccagagttttgggttgttggaccctaaattgtgctatctgttggacggaatcctgttcatttacggagtgatcctgaccgcattgttcctgcgggttaagttttccagatccgcagacgcacccgcttaccaacaagggcagaaccaactctacaatgaacttaatttggggcggagggaagagtacgacgttctggacaaaaggaggggacgagatcccgagatgggcggaaagcctcagcgaaggaagaatccgcaagaggggctttataacgaactccagaaagataaaatggcagaagcctatagtgagattgggatgaagggagaaaggaggaggggtaaaggtcacgatgggttgtaccaaggattgagcacagccactaaagatacctatgatgcgctccacatgcaggccctgccgccaagacgcgccaagagaagcggatctggcgtgaagcagaccctgaatttcgacctgctgaagctggctggcgacgtggaatccaacccaggcccttctagaggccatatgaccgagtacaagcccacggtgcgcctcgccacccgcgacgacgtccccagggccgtacgcaccctcgccgccgcgttcgccgactaccccgccacgcgccacaccgtcgatccggaccgccacatcgagcgggtcaccgagctgcaagaactcttcctcacgcgcgtcgggctcgacatcggcaaggtgtgggtcgcggacgacggcgccgcggtggcggtctggaccacgccggagagcgtcgaagcgggggcggtgttcgccgagatcggcccgcgcatggccgagttgagcggttcccggctggccgcgcagcaacagatggaaggcctcctggcgccgcaccggcccaaggagcccgcgtggttcctggccaccgtcggcgtctcgcccgaccaccagggcaagggtctgggcagcgccgtcgtgctccccggagtggaggcggccgagcgcgccggggtgcccgccttcctggagacctccgcgccccgcaacctccccttctacgagcggctcggcttcaccgtcaccgccgacgtcgaggtgcccgaaggaccgcgcacctggtgcatgacccgcaagcccggtgcctga

SEQ ID NO: 7534 - DNA, 2274 bp, Artificial Sequence
  Synthetic Polynucloetide
atggccttaccagtgaccgccttgctcctgccgctggccttgctgctccacgccgccaggccggaagtgcagctggttgaatctggcggaggactggttcagcctggcggatctctgagactgtcttgtgccgccagcggcttcagcttcagcgacttttggatgagctgggtccgacaggcccctggcaaaggacttgaatgggtcgccacaatcagccaggccggcagcgagaaggactacgtggactctgtgaagggcagattcaccatcagccgggacaacgccaagaagtccctgtacctccagatgaacagcctgagagccgaggacaccgccgtgtactattgtgcctctggcgtgtacagcttcgactacagaggccagggcaccctggtcacagtctcttctggtaccggcggaggcggatctggcggcggaggtagcggtggcggaggatctgaattcagctacgtgctgacacagcctccatccgtgtctgtggctccaggacagaccgccagaatcacatgcggcggcaacaacatcggcagcaagagcgtgcactggtatcagcagccacctggacaggctccagtggtggtggtgtacgacgacagcgatagacctagcggcatccccgagagattcagcggcagcaattccggcaataccgccacactgaccatcagcagagtggaagctggcgacgaggccgtgtactactgccaagtgtgggacagcagcagcgatcacgtggtgtttggcggcggaacaaagctgacagtgcttctcgaggacctgaagaacgtgttcccacctgaggtggccgtgttcgagcctagcgaggccgagatcagccacacccagaaagccaccctcgtgtgcctggctaccggcttctaccccgaccatgtggaactgtcttggtgggtcaacggcaaagaggtgcacagcggcgtgtgtaccgacccccagccactgaaagaacagcccgccctgaacgacagccggtactgcctgagcagcagactgagagtgtccgccaccttctggcagaacccccggaaccacttcagatgccaggtgcagttctacggcctgagcgagaacgacgagtggacccaggacagagccaagcccgtgacccagatcgtgtctgccgaagcctggggcagagccgattgcggctttaccagcgagagctaccagcagggcgtgctgagcgccaccatcctgtacgagatcctgctgggcaaggccaccctgtacgccgtgctggtgtctgccctggtgctgatggctatggtcaagcggaaggacagccggggaagggccaagcgatctggatctggagcaacaaacttctcactactcaaacaagcaggtgacgtggaggagaatcccgggcctactagtatggactggatttggcgcatccttttccttgtcggcgctgctaccggcgcgcattccttcgaacaactccagctgcaagagtctggccctggcctggtcaagcctagcgaaacactgagcctgacctgtaccgtgtctggcggctctatcagctccggcagctatatctggggctggatcagacaacctcctggcaaaggactggaatggatcggctccatctactacagcggcatcacctactacaaccccagcctgaagtccagagtgaccatctccgtggacaccagcaagaaccagttctccctgaagctgagcagcgtgacagccgccgataccgccgtgtattattgtgccagacatgacggcgctgtggccggcctgtttgattattggggacagggcaccctggtcaccgtgtcatctgctacgcgtatccagaaccctgatcctgccgtgtaccagctgcgggatagcaagagcagcgacaagagcgtgtgtctgttcaccgacttcgacagccagaccaacgtgtcccagagcaaggactccgacgtgtacatcaccgataagtgcgtgctggacatgcggagcatggacttcaagagcaactccgccgtggcctggtccaacaagtccgatttcgcctgcgccaacgccttcaacaacagcattatccccgaggacacattcttcccaagccccgagagcagctgcgacgtgaagctggtggaaaagagcttcgagacagacaccaacctgaacttccagaacctgagcgtgatcggcttcagaatcctgctgctgaaagtggccggctttaacctgctgatgaccctgcggctgtggtccagc

SEQ ID NO: 7535 - DNA, 2286 bp, Artificial Sequence
  Synthetic Polynucloetide
atggccttaccagtgaccgccttgctcctgccgctggccttgctgctccacgccgccaggccggaagtgcagctggttgaatctggcggaggactggttcagcctggcggatctctgagactgtcttgtgccgccagcggcttcagcttcagcgacttttggatgagctgggtccgacaggcccctggcaaaggacttgaatgggtcgccacaatcagccaggccggcagcgagaaggactacgtggactctgtgaagggcagattcaccatcagccgggacaacgccaagaagtccctgtacctccagatgaacagcctgagagccgaggacaccgccgtgtactattgtgcctctggcgtgtacagcttcgactacagaggccagggcaccctggtcacagtctcttctggtaccggcggaggcggatctggcggcggaggtagcggtggcggaggatctgaattcagctacgtgctgacacagcctccatccgtgtctgtggctccaggacagaccgccagaatcacatgcggcggcaacaacatcggcagcaagagcgtgcactggtatcagcagccacctggacaggctccagtggtggtggtgtacgacgacagcgatagacctagcggcatccccgagagattcagcggcagcaattccggcaataccgccacactgaccatcagcagagtggaagctggcgacgaggccgtgtactactgccaagtgtgggacagcagcagcgatcacgtggtgtttggcggcggaacaaagctgacagtgcttctcgagatccagaaccctgatcctgccgtgtaccagctgcgggatagcaagagcagcgacaagagcgtgtgtctgttcaccgacttcgacagccagaccaacgtgtcccagagcaaggactccgacgtgtacatcaccgataagtgcgtgctggacatgcggagcatggacttcaagagcaactccgccgtggcctggtccaacaagtccgatttcgcctgcgccaacgccttcaacaacagcattatccccgaggacacattcttcccaagccccgagagcagctgcgacgtgaagctggtggaaaagagcttcgagacagacaccaacctgaacttccagaacctgagcgtgatcggcttcagaatcctgctgctgaaagtggccggctttaacctgctgatgaccctgcggctgtggtccagccgcgccaagagaagcggatctggcgtgaagcagaccctgaatttcgacctgctgaagctggctggcgacgtggaatccaacccaggccctactagtatggactggatttggcgcatccttttccttgtcggcgctgctaccggcgcgcattccttcgaacaactccagctgcaagagtctggccctggcctggtcaagcctagcgaaacactgagcctgacctgtaccgtgtctggcggctctatcagctccggcagctatatctggggctggatcagacaacctcctggcaaaggactggaatggatcggctccatctactacagcggcatcacctactacaaccccagcctgaagtccagagtgaccatctccgtggacaccagcaagaaccagttctccctgaagctgagcagcgtgacagccgccgataccgccgtgtattattgtgccagacatgacggcgctgtggccggcctgtttgattattggggacagggcaccctggtcaccgtgtcatctgctacgcgtgaggacctgaagaacgtgttcccacctgaggtggccgtgttcgagcctagcgaggccgagatcagccacacccagaaagccaccctcgtgtgcctggctaccggcttctaccccgaccatgtggaactgtcttggtgggtcaacggcaaagaggtgcacagcggcgtgtgtaccgacccccagccactgaaagaacagcccgccctgaacgacagccggtactgcctgagcagcagactgagagtgtccgccaccttctggcagaacccccggaaccacttcagatgccaggtgcagttctacggcctgagcgagaacgacgagtggacccaggacagagccaagcccgtgacccagatcgtgtctgccgaagcctggggcagagccgattgcggctttaccagcgagagctaccagcagggcgtgctgagcgccaccatcctgtacgagatcctgctgggcaaggccaccctgtacgccgtgctggtgtctgccctggtgctgatggctatggtcaagcggaaggacagccgggga

SEQ ID NO: 7536 - DNA, 2862 bp, Artificial Sequence
  Synthetic Polynucloetide
atggccttaccagtgaccgccttgctcctgccgctggccttgctgctccacgccgccaggccggaagtgcagctggttgaatctggcggaggactggttcagcctggcggatctctgagactgtcttgtgccgccagcggcttcagcttcagcgacttttggatgagctgggtccgacaggcccctggcaaaggacttgaatgggtcgccacaatcagccaggccggcagcgagaaggactacgtggactctgtgaagggcagattcaccatcagccgggacaacgccaagaagtccctgtacctccagatgaacagcctgagagccgaggacaccgccgtgtactattgtgcctctggcgtgtacagcttcgactacagaggccagggcaccctggtcacagtctcttctggtaccggcggaggcggatctggcggcggaggtagcggtggcggaggatctgaattcagctacgtgctgacacagcctccatccgtgtctgtggctccaggacagaccgccagaatcacatgcggcggcaacaacatcggcagcaagagcgtgcactggtatcagcagccacctggacaggctccagtggtggtggtgtacgacgacagcgatagacctagcggcatccccgagagattcagcggcagcaattccggcaataccgccacactgaccatcagcagagtggaagctggcgacgaggccgtgtactactgccaagtgtgggacagcagcagcgatcacgtggtgtttggcggcggaacaaagctgacagtgcttctcgaggacctgaagaacgtgttcccacctgaggtggccgtgttcgagcctagcgaggccgagatcagccacacccagaaagccaccctcgtgtgcctggctaccggcttctaccccgaccatgtggaactgtcttggtgggtcaacggcaaagaggtgcacagcggcgtgtctaccgacccccagccactgaaagaacagcccgccctgaacgacagccggtactgcctgagcagcagactgagagtgtccgccaccttctggcagaacccccggaaccacttcagatgccaggtgcagttctacggcctgagcgagaacgacgagtggacccaggacagagccaagcccgtgacccagatcgtgtctgccgaagcctggggcagagccgattgcggatcccagagcttcggcctgctggaccccaagctgtgctacctgctggatggcatcctgttcatctacggcgtgatcctgaccgccctgttcctgagagtgaagttcagcagaagcgccgacgcccctgcctaccagcagggacagaaccaactgtacaacgagctgaacctgggcagacgggaagagtacgacgtgctggacaagcggagaggcagggaccctgagatgggcggaaagccccagcggagaaagaacccccaggaaggactgtataacgaactccagaaagacaagatggccgaagcctacagcgagatcggcatgaagggcgagcggagaagaggcaagggccacgatggcctgtaccagggcctgagcaccgccaccaaggacacctatgacgccctgcacatgcaggccctgcctccaagaagggccaagcgatctggatctggagcaacaaacttctcactactcaaacaagcaggtgacgtggaggagaatcccgggcctactagtatggactggatttggcgcatccttttccttgtcggcgctgctaccggcgcgcattccttcgaacaactccagctgcaagagtctggccctggcctggtcaagcctagcgaaacactgagcctgacctgtaccgtgtctggcggctctatcagctccggcagctatatctggggctggatcagacaacctcctggcaaaggactggaatggatcggctccatctactacagcggcatcacctactacaaccccagcctgaagtccagagtgaccatctccgtggacaccagcaagaaccagttctccctgaagctgagcagcgtgacagccgccgataccgccgtgtattattgtgccagacatgacggcgctgtggccggcctgtttgattattggggacagggcaccctggtcaccgtgtcatctgctacgcgtatccagaaccctgatcctgccgtgtaccagctgcgggatagcaagagcagcgacaagagcgtgtgtctgttcaccgacttcgacagccagaccaacgtgtcccagagcaaggactccgacgtgtacatcaccgataagaccgtgctggacatgcggagcatggacttcaagagcaactccgccgtggcctggtccaacaagtccgatttcgcctgcgccaacgccttcaacaacagcattatccccgaggacacattcttcccaagccccgagagcagctgcggtacccagagttttgggttgttggaccctaaattgtgctatctgttggacggaatcctgttcatttacggagtgatcctgaccgcattgttcctgcgggttaagttttccagatccgcagacgcacccgcttaccaacaagggcagaaccaactctacaatgaacttaatttggggcggagggaagagtacgacgttctggacaaaaggaggggacgagatcccgagatgggcggaaagcctcagcgaaggaagaatccgcaagaggggctttataacgaactccagaaagataaaatggcagaagcctatagtgagattgggatgaagggagaaaggaggaggggtaaaggtcacgatgggttgtaccaaggattgagcacagccactaaagatacctatgatgcgctccacatgcaggccctgccgccaaga

SEQ ID NO: 7537 - DNA, 2352 bp, Artificial Sequence
  Synthetic Polynucloetide
atggccttaccagtgaccgccttgctcctgccgctggccttgctgctccacgccgccaggccggaagtgcagctggttgaatctggcggaggactggttcagcctggcggatctctgagactgtcttgtgccgccagcggcttcagcttcagcgacttttggatgagctgggtccgacaggcccctggcaaaggacttgaatgggtcgccacaatcagccaggccggcagcgagaaggactacgtggactctgtgaagggcagattcaccatcagccgggacaacgccaagaagtccctgtacctccagatgaacagcctgagagccgaggacaccgccgtgtactattgtgcctctggcgtgtacagcttcgactacagaggccagggcaccctggtcacagtctcttctggtaccggcggaggcggatctggcggcggaggtagcggtggcggaggatctgaattcagctacgtgctgacacagcctccatccgtgtctgtggctccaggacagaccgccagaatcacatgcggcggcaacaacatcggcagcaagagcgtgcactggtatcagcagccacctggacaggctccagtggtggtggtgtacgacgacagcgatagacctagcggcatccccgagagattcagcggcagcaattccggcaataccgccacactgaccatcagcagagtggaagctggcgacgaggccgtgtactactgccaagtgtgggacagcagcagcgatcacgtggtgtttggcggcggaacaaagctgacagtgcttctcgagggacagcctaaggccaatcctaccgtgacactgttccctccaagcagcgaagaactccaggccaacaaggccacacttgtgtgcctgatctccgacttctaccctggggctgtgacagtggcttggaaggccgatggatctcctgtgaaagccggcgtggaaaccaccaagccatccaagcagagcaacaacaaatacgccgccagctcctacctgagcctgacacctgagcagtggaagtcccacagatcctacagctgccaagtgacccacgaaggcagcaccgtggaaaagacagtggcccctacagagtgcagccccatcaagaccgatgtgattacaatggaccccaaggacaactgctccaaggacgccaacgataccctgctgctccagctgaccaacaccagcgcctactacatgtacttgttgctgctgctgaagtccgtggtgtacttcgccatcatcacatgctgcctgctgcggagaaccgccttctgctgcaacggcgagaagtctagggccaagcgatctggatctggagcaacaaacttctcactactcaaacaagcaggtgacgtggaggagaatcccgggcctactagtatggactggatttggcgcatccttttccttgtcggcgctgctaccggcgcgcattccttcgaacaactccagctgcaagagtctggccctggcctggtcaagcctagcgaaacactgagcctgacctgtaccgtgtctggcggctctatcagctccggcagctatatctggggctggatcagacaacctcctggcaaaggactggaatggatcggctccatctactacagcggcatcacctactacaaccccagcctgaagtccagagtgaccatctccgtggacaccagcaagaaccagttctccctgaagctgagcagcgtgacagccgccgataccgccgtgtattattgtgccagacatgacggcgctgtggccggcctgtttgattattggggacagggcaccctggtcaccgtgtcatctgctacgcgtgcctctacaaagggaccctccgtgtttcctctggctcccagcagcaagtctacaagcggaggaacagccgctctgggctgcctggtcaaggattactttcccgagcctgtgaccgtgtcctggaatagcggagcactgacaagcggcgtgcacacctttccagccgtgctgcaaagcagcggcctgtactctctgagcagcgtggtcacagtgcctagctctagcctgggcacccagacctacatctgcaatgtgaaccacaagcctagcaacaccaaggtggacaagagagtggaacccaagagctgtgaagtgaaaaccgactccaccgaccacgtgaagcccaaagagacagagaacaccaagcagcccagcaagagctgccacaagcccaaggccatcgtgcacaccgagaaagtgaacatgatgagcctgaccgtgctgggcctgcggatgctgttcgccaaaaccgtggccgtgaacttcctgctgaccgccaagctgttcttcctc

SEQ ID NO: 7538 - DNA, 2295 bp, Artificial Sequence
  Synthetic Polynucloetide
atggccttaccagtgaccgccttgctcctgccgctggccttgctgctccacgccgccaggccggaagtgcagctggttgaatctggcggaggactggttcagcctggcggatctctgagactgtcttgtgccgccagcggcttcagcttcagcgacttttggatgagctgggtccgacaggcccctggcaaaggacttgaatgggtcgccacaatcagccaggccggcagcgagaaggactacgtggactctgtgaagggcagattcaccatcagccgggacaacgccaagaagtccctgtacctccagatgaacagcctgagagccgaggacaccgccgtgtactattgtgcctctggcgtgtacagcttcgactacagaggccagggcaccctggtcacagtctcttctggtaccggcggaggcggatctggcggcggaggtagcggtggcggaggatctgaattcagctacgtgctgacacagcctccatccgtgtctgtggctccaggacagaccgccagaatcacatgcggcggcaacaacatcggcagcaagagcgtgcactggtatcagcagccacctggacaggctccagtggtggtggtgtacgacgacagcgatagacctagcggcatccccgagagattcagcggcagcaattccggcaataccgccacactgaccatcagcagagtggaagctggcgacgaggccgtgtactactgccaagtgtgggacagcagcagcgatcacgtggtgtttggcggcggaacaaagctgacagtgcttctcgagggacagcctaaggccaatcctaccgtgacactgttccctccaagcagcgaagaactccaggccaacaaggccacacttgtgtgcctgatctccgacttctaccctggggctgtgacagtggcttggaaggccgatggatctcctgtgaaagccggcgtggaaaccaccaagccatccaagcagagcaacaacaaatacgccgccagctcctacctgagcctgacacctgagcagtggaagtcccacagatcctacagctgccaagtgacccacgaaggcagcaccgtggaaaagacagtggcccctacagagtgcagcggcagagccgattgcggctttaccagcgagagctaccagcagggcgtgctgagcgccaccatcctgtacgagatcctgctgggcaaggccaccctgtacgccgtgctggtgtctgccctggtgctgatggctatggtcaagcggaaggacagccggggacgcgccaagagaagcggatctggcgtgaagcagaccctgaatttcgacctgctgaagctggctggcgacgtggaatccaacccaggccctactagtatggactggatttggcgcatccttttccttgtcggcgctgctaccggcgcgcattccttcgaacaactccagctgcaagagtctggccctggcctggtcaagcctagcgaaacactgagcctgacctgtaccgtgtctggcggctctatcagctccggcagctatatctggggctggatcagacaacctcctggcaaaggactggaatggatcggctccatctactacagcggcatcacctactacaaccccagcctgaagtccagagtgaccatctccgtggacaccagcaagaaccagttctccctgaagctgagcagcgtgacagccgccgataccgccgtgtattattgtgccagacatgacggcgctgtggccggcctgtttgattattggggacagggcaccctggtcaccgtgtcatctgctacgcgtgcctctacaaagggaccctccgtgtttcctctggctcccagcagcaagtctacaagcggaggaacagccgctctgggctgcctggtcaaggattactttcccgagcctgtgaccgtgtcctggaatagcggagcactgacaagcggcgtgcacacctttccagccgtgctgcaaagcagcggcctgtactctctgagcagcgtggtcacagtgcctagctctagcctgggcacccagacctacatctgcaatgtgaaccacaagcctagcaacaccaaggtggacaagagagtggaacccaagagctgtatccccgaggacacattcttcccaagccccgagagcagctgcgacgtgaagctggtggaaaagagcttcgagacagacaccaacctgaacttccagaacctgagcgtgatcggcttcagaatcctgctgctgaaagtggccggctttaacctgctgatgaccctgcggctgtggtccagc

SEQ ID NO: 7539 - DNA, 2697 bp, Artificial Sequence
  Synthetic Polynucloetide
atggccttaccagtgaccgccttgctcctgccgctggccttgctgctccacgccgccaggccggaagtgcagctggttgaatctggcggaggactggttcagcctggcggatctctgagactgtcttgtgccgccagcggcttcagcttcagcgacttttggatgagctgggtccgacaggcccctggcaaaggacttgaatgggtcgccacaatcagccaggccggcagcgagaaggactacgtggactctgtgaagggcagattcaccatcagccgggacaacgccaagaagtccctgtacctccagatgaacagcctgagagccgaggacaccgccgtgtactattgtgcctctggcgtgtacagcttcgactacagaggccagggcaccctggtcacagtctcttctggtaccggcggaggcggatctggcggcggaggtagcggtggcggaggatctgaattcagctacgtgctgacacagcctccatccgtgtctgtggctccaggacagaccgccagaatcacatgcggcggcaacaacatcggcagcaagagcgtgcactggtatcagcagccacctggacaggctccagtggtggtggtgtacgacgacagcgatagacctagcggcatccccgagagattcagcggcagcaattccggcaataccgccacactgaccatcagcagagtggaagctggcgacgaggccgtgtactactgccaagtgtgggacagcagcagcgatcacgtggtgtttggcggcggaacaaagctgacagtgcttctcgagatccagaaccctgatcctgccgtgtaccagctgcgggatagcaagagcagcgacaagagcgtgtgtctgttcaccgacttcgacagccagaccaacgtgtcccagagcaaggactccgacgtgtacatcaccgataagtgcgtgctggacatgcggagcatggacttcaagagcaactccgccgtggcctggtccaacaagtccgatttcgcctgcgccaacgccttcaacaacagcattatccccgaggacacattcttcccaagccccgagagcagctgcgacgtgaagctggtggaaaagagcttcgagacagacaccaacctgaacttccagaacctgagcgtgatcggcttcagaatcctgctgctgaaagtggccggctttaacctgctgatgaccctgcggctgtggtccagccgcgccaagagaagcggatctggcgtgaagcagaccctgaatttcgacctgctgaagctggctggcgacgtggaatccaacccaggccctactagtatggactggatttggcgcatccttttccttgtcggcgctgctaccggcgcgcattccgggccccagctccagctgcaagagtctggacctggcctggtcaagcctagcgagacactgagcctgacctgtaccgtgtccggcgatagcatcagcagcggcgattactactggggctggatcagacagcctcctggcaaaggactggaatggatcggccacatctactacagcggcgtgacctactacaaccccagcctgaagtccagagtgaccatcagcgtggacaccagccggaaccagttctccctgaagctgtctagcgtgacagccgccgataccgccgtgtactactgcaccagagaggacagcagcaactggcggagtagaggccagggaacactggtcacagttagctctggatccggcggaggcggaagtggaggcggaggatctggcggcggaggctctttcgaacaactccagctgcaagagtctggccctggcctggtcaagcctagcgaaacactgagcctgacctgtaccgtgtctggcggctctatcagctccggcagctatatctggggctggatcagacaacctcctggcaaaggactggaatggatcggctccatctactacagcggcatcacctactacaaccccagcctgaagtccagagtgaccatctccgtggacaccagcaagaaccagttctccctgaagctgagcagcgtgacagccgccgataccgccgtgtattattgtgccagacatgacggcgctgtggccggcctgtttgattattggggacagggcaccctggtcaccgtgtcatctgctacgcgtgaggacctgaagaacgtgttcccacctgaggtggccgtgttcgagcctagcgaggccgagatcagccacacccagaaagccaccctcgtgtgcctggctaccggcttctaccccgaccatgtggaactgtcttggtgggtcaacggcaaagaggtgcacagcggcgtgtgtaccgacccccagccactgaaagaacagcccgccctgaacgacagccggtactgcctgagcagcagactgagagtgtccgccaccttctggcagaacccccggaaccacttcagatgccaggtgcagttctacggcctgagcgagaacgacgagtggacccaggacagagccaagcccgtgacccagatcgtgtctgccgaagcctggggcagagccgattgcggctttaccagcgagagctaccagcagggcgtgctgagcgccaccatcctgtacgagatcctgctgggcaaggccaccctgtacgccgtgctggtgtctgccctggtgctgatggctatggtcaagcggaaggacagccgggga

SEQ ID NO: 7540 - DNA, 3273 bp, Artificial Sequence
  Synthetic Polynucloetide
atggccttaccagtgaccgccttgctcctgccgctggccttgctgctccacgccgccaggccggaagtgcagctggttgaatctggcggaggactggttcagcctggcggatctctgagactgtcttgtgccgccagcggcttcagcttcagcgacttttggatgagctgggtccgacaggcccctggcaaaggacttgaatgggtcgccacaatcagccaggccggcagcgagaaggactacgtggactctgtgaagggcagattcaccatcagccgggacaacgccaagaagtccctgtacctccagatgaacagcctgagagccgaggacaccgccgtgtactattgtgcctctggcgtgtacagcttcgactacagaggccagggcaccctggtcacagtctcttctggtaccggcggaggcggatctggcggcggaggtagcggtggcggaggatctgaattcagctacgtgctgacacagcctccatccgtgtctgtggctccaggacagaccgccagaatcacatgcggcggcaacaacatcggcagcaagagcgtgcactggtatcagcagccacctggacaggctccagtggtggtggtgtacgacgacagcgatagacctagcggcatccccgagagattcagcggcagcaattccggcaataccgccacactgaccatcagcagagtggaagctggcgacgaggccgtgtactactgccaagtgtgggacagcagcagcgatcacgtggtgtttggcggcggaacaaagctgacagtgcttctcgaggacctgaagaacgtgttcccacctgaggtggccgtgttcgagcctagcgaggccgagatcagccacacccagaaagccaccctcgtgtgcctggctaccggcttctaccccgaccatgtggaactgtcttggtgggtcaacggcaaagaggtgcacagcggcgtgtctaccgacccccagccactgaaagaacagcccgccctgaacgacagccggtactgcctgagcagcagactgagagtgtccgccaccttctggcagaacccccggaaccacttcagatgccaggtgcagttctacggcctgagcgagaacgacgagtggacccaggacagagccaagcccgtgacccagatcgtgtctgccgaagcctggggcagagccgattgcggatcccagagcttcggcctgctggaccccaagctgtgctacctgctggatggcatcctgttcatctacggcgtgatcctgaccgccctgttcctgagagtgaagttcagcagaagcgccgacgcccctgcctaccagcagggacagaaccaactgtacaacgagctgaacctgggcagacgggaagagtacgacgtgctggacaagcggagaggcagggaccctgagatgggcggaaagccccagcggagaaagaacccccaggaaggactgtataacgaactccagaaagacaagatggccgaagcctacagcgagatcggcatgaagggcgagcggagaagaggcaagggccacgatggcctgtaccagggcctgagcaccgccaccaaggacacctatgacgccctgcacatgcaggccctgcctccaagaagggccaagcgatctggatctggagcaacaaacttctcactactcaaacaagcaggtgacgtggaggagaatcccgggcctactagtatggactggatttggcgcatccttttccttgtcggcgctgctaccggcgcgcattccgggccccagctccagctgcaagagtctggacctggcctggtcaagcctagcgagacactgagcctgacctgtaccgtgtccggcgatagcatcagcagcggcgattactactggggctggatcagacagcctcctggcaaaggactggaatggatcggccacatctactacagcggcgtgacctactacaaccccagcctgaagtccagagtgaccatcagcgtggacaccagccggaaccagttctccctgaagctgtctagcgtgacagccgccgataccgccgtgtactactgcaccagagaggacagcagcaactggcggagtagaggccagggaacactggtcacagttagctctggatccggcggaggcggaagtggaggcggaggatctggcggcggaggctctttcgaacaactccagctgcaagagtctggccctggcctggtcaagcctagcgaaacactgagcctgacctgtaccgtgtctggcggctctatcagctccggcagctatatctggggctggatcagacaacctcctggcaaaggactggaatggatcggctccatctactacagcggcatcacctactacaaccccagcctgaagtccagagtgaccatctccgtggacaccagcaagaaccagttctccctgaagctgagcagcgtgacagccgccgataccgccgtgtattattgtgccagacatgacggcgctgtggccggcctgtttgattattggggacagggcaccctggtcaccgtgtcatctgctacgcgtatccagaaccctgatcctgccgtgtaccagctgcgggatagcaagagcagcgacaagagcgtgtgtctgttcaccgacttcgacagccagaccaacgtgtcccagagcaaggactccgacgtgtacatcaccgataagaccgtgctggacatgcggagcatggacttcaagagcaactccgccgtggcctggtccaacaagtccgatttcgcctgcgccaacgccttcaacaacagcattatccccgaggacacattcttcccaagccccgagagcagctgcggtacccagagttttgggttgttggaccctaaattgtgctatctgttggacggaatcctgttcatttacggagtgatcctgaccgcattgttcctgcgggttaagttttccagatccgcagacgcacccgcttaccaacaagggcagaaccaactctacaatgaacttaatttggggcggagggaagagtacgacgttctggacaaaaggaggggacgagatcccgagatgggcggaaagcctcagcgaaggaagaatccgcaagaggggctttataacgaactccagaaagataaaatggcagaagcctatagtgagattgggatgaagggagaaaggaggaggggtaaaggtcacgatgggttgtaccaaggattgagcacagccactaaagatacctatgatgcgctccacatgcaggccctgccgccaaga

SEQ ID NO: 7541 - DNA, 2763 bp, Artificial Sequence
  Synthetic Polynucloetide
atggccttaccagtgaccgccttgctcctgccgctggccttgctgctccacgccgccaggccggaagtgcagctggttgaatctggcggaggactggttcagcctggcggatctctgagactgtcttgtgccgccagcggcttcagcttcagcgacttttggatgagctgggtccgacaggcccctggcaaaggacttgaatgggtcgccacaatcagccaggccggcagcgagaaggactacgtggactctgtgaagggcagattcaccatcagccgggacaacgccaagaagtccctgtacctccagatgaacagcctgagagccgaggacaccgccgtgtactattgtgcctctggcgtgtacagcttcgactacagaggccagggcaccctggtcacagtctcttctggtaccggcggaggcggatctggcggcggaggtagcggtggcggaggatctgaattcagctacgtgctgacacagcctccatccgtgtctgtggctccaggacagaccgccagaatcacatgcggcggcaacaacatcggcagcaagagcgtgcactggtatcagcagccacctggacaggctccagtggtggtggtgtacgacgacagcgatagacctagcggcatccccgagagattcagcggcagcaattccggcaataccgccacactgaccatcagcagagtggaagctggcgacgaggccgtgtactactgccaagtgtgggacagcagcagcgatcacgtggtgtttggcggcggaacaaagctgacagtgcttctcgagggacagcctaaggccaatcctaccgtgacactgttccctccaagcagcgaagaactccaggccaacaaggccacacttgtgtgcctgatctccgacttctaccctggggctgtgacagtggcttggaaggccgatggatctcctgtgaaagccggcgtggaaaccaccaagccatccaagcagagcaacaacaaatacgccgccagctcctacctgagcctgacacctgagcagtggaagtcccacagatcctacagctgccaagtgacccacgaaggcagcaccgtggaaaagacagtggcccctacagagtgcagccccatcaagaccgatgtgattacaatggaccccaaggacaactgctccaaggacgccaacgataccctgctgctccagctgaccaacaccagcgcctactacatgtacttgttgctgctgctgaagtccgtggtgtacttcgccatcatcacatgctgcctgctgcggagaaccgccttctgctgcaacggcgagaagtctagggccaagcgatctggatctggagcaacaaacttctcactactcaaacaagcaggtgacgtggaggagaatcccgggcctactagtatggactggatttggcgcatccttttccttgtcggcgctgctaccggcgcgcattccgggccccagctccagctgcaagagtctggacctggcctggtcaagcctagcgagacactgagcctgacctgtaccgtgtccggcgatagcatcagcagcggcgattactactggggctggatcagacagcctcctggcaaaggactggaatggatcggccacatctactacagcggcgtgacctactacaaccccagcctgaagtccagagtgaccatcagcgtggacaccagccggaaccagttctccctgaagctgtctagcgtgacagccgccgataccgccgtgtactactgcaccagagaggacagcagcaactggcggagtagaggccagggaacactggtcacagttagctctggatccggcggaggcggaagtggaggcggaggatctggcggcggaggctctttcgaacaactccagctgcaagagtctggccctggcctggtcaagcctagcgaaacactgagcctgacctgtaccgtgtctggcggctctatcagctccggcagctatatctggggctggatcagacaacctcctggcaaaggactggaatggatcggctccatctactacagcggcatcacctactacaaccccagcctgaagtccagagtgaccatctccgtggacaccagcaagaaccagttctccctgaagctgagcagcgtgacagccgccgataccgccgtgtattattgtgccagacatgacggcgctgtggccggcctgtttgattattggggacagggcaccctggtcaccgtgtcatctgctacgcgtgcctctacaaagggaccctccgtgtttcctctggctcccagcagcaagtctacaagcggaggaacagccgctctgggctgcctggtcaaggattactttcccgagcctgtgaccgtgtcctggaatagcggagcactgacaagcggcgtgcacacctttccagccgtgctgcaaagcagcggcctgtactctctgagcagcgtggtcacagtgcctagctctagcctgggcacccagacctacatctgcaatgtgaaccacaagcctagcaacaccaaggtggacaagagagtggaacccaagagctgtgaagtgaaaaccgactccaccgaccacgtgaagcccaaagagacagagaacaccaagcagcccagcaagagctgccacaagcccaaggccatcgtgcacaccgagaaagtgaacatgatgagcctgaccgtgctgggcctgcggatgctgttcgccaaaaccgtggccgtgaacttcctgctgaccgccaagctgttcttcctc

SEQ ID NO: 7542 - DNA, 2706 bp, Artificial Sequence
  Synthetic Polynucloetide
atggccttaccagtgaccgccttgctcctgccgctggccttgctgctccacgccgccaggccggaagtgcagctggttgaatctggcggaggactggttcagcctggcggatctctgagactgtcttgtgccgccagcggcttcagcttcagcgacttttggatgagctgggtccgacaggcccctggcaaaggacttgaatgggtcgccacaatcagccaggccggcagcgagaaggactacgtggactctgtgaagggcagattcaccatcagccgggacaacgccaagaagtccctgtacctccagatgaacagcctgagagccgaggacaccgccgtgtactattgtgcctctggcgtgtacagcttcgactacagaggccagggcaccctggtcacagtctcttctggtaccggcggaggcggatctggcggcggaggtagcggtggcggaggatctgaattcagctacgtgctgacacagcctccatccgtgtctgtggctccaggacagaccgccagaatcacatgcggcggcaacaacatcggcagcaagagcgtgcactggtatcagcagccacctggacaggctccagtggtggtggtgtacgacgacagcgatagacctagcggcatccccgagagattcagcggcagcaattccggcaataccgccacactgaccatcagcagagtggaagctggcgacgaggccgtgtactactgccaagtgtgggacagcagcagcgatcacgtggtgtttggcggcggaacaaagctgacagtgcttctcgagggacagcctaaggccaatcctaccgtgacactgttccctccaagcagcgaagaactccaggccaacaaggccacacttgtgtgcctgatctccgacttctaccctggggctgtgacagtggcttggaaggccgatggatctcctgtgaaagccggcgtggaaaccaccaagccatccaagcagagcaacaacaaatacgccgccagctcctacctgagcctgacacctgagcagtggaagtcccacagatcctacagctgccaagtgacccacgaaggcagcaccgtggaaaagacagtggcccctacagagtgcagcggcagagccgattgcggctttaccagcgagagctaccagcagggcgtgctgagcgccaccatcctgtacgagatcctgctgggcaaggccaccctgtacgccgtgctggtgtctgccctggtgctgatggctatggtcaagcggaaggacagccggggacgcgccaagagaagcggatctggcgtgaagcagaccctgaatttcgacctgctgaagctggctggcgacgtggaatccaacccaggccctactagtatggactggatttggcgcatccttttccttgtcggcgctgctaccggcgcgcattccgggccccagctccagctgcaagagtctggacctggcctggtcaagcctagcgagacactgagcctgacctgtaccgtgtccggcgatagcatcagcagcggcgattactactggggctggatcagacagcctcctggcaaaggactggaatggatcggccacatctactacagcggcgtgacctactacaaccccagcctgaagtccagagtgaccatcagcgtggacaccagccggaaccagttctccctgaagctgtctagcgtgacagccgccgataccgccgtgtactactgcaccagagaggacagcagcaactggcggagtagaggccagggaacactggtcacagttagctctggatccggcggaggcggaagtggaggcggaggatctggcggcggaggctctttcgaacaactccagctgcaagagtctggccctggcctggtcaagcctagcgaaacactgagcctgacctgtaccgtgtctggcggctctatcagctccggcagctatatctggggctggatcagacaacctcctggcaaaggactggaatggatcggctccatctactacagcggcatcacctactacaaccccagcctgaagtccagagtgaccatctccgtggacaccagcaagaaccagttctccctgaagctgagcagcgtgacagccgccgataccgccgtgtattattgtgccagacatgacggcgctgtggccggcctgtttgattattggggacagggcaccctggtcaccgtgtcatctgctacgcgtgcctctacaaagggaccctccgtgtttcctctggctcccagcagcaagtctacaagcggaggaacagccgctctgggctgcctggtcaaggattactttcccgagcctgtgaccgtgtcctggaatagcggagcactgacaagcggcgtgcacacctttccagccgtgctgcaaagcagcggcctgtactctctgagcagcgtggtcacagtgcctagctctagcctgggcacccagacctacatctgcaatgtgaaccacaagcctagcaacaccaaggtggacaagagagtggaacccaagagctgtatccccgaggacacattcttcccaagccccgagagcagctgcgacgtgaagctggtggaaaagagcttcgagacagacaccaacctgaacttccagaacctgagcgtgatcggcttcagaatcctgctgctgaaagtggccggctttaacctgctgatgaccctgcggctgtggtccagc

SEQ ID NO: 7543 - DNA, 2277 bp, Artificial Sequence
  Synthetic Polynucloetide
atggccttaccagtgaccgccttgctcctgccgctggccttgctgctccacgccgccaggccggaagtgcaggttttggagtctggcggaggactggttcagcctggcggatctctgagactgtcttgtgccgccagcggcttcaccttcagcaactttgccatgagctgggtccgacaggcccctggcaaaggacttgaatgggtgtccacaatcagcggcagcgccggcacaacagattacgccgattctgtgaagggcagattcaccatcagccgggacaacagcaagaaaaccctgtacctccagatgaacagcctgcgcgtggaagataccgccgtgtactactgtgccgatggcagaggccccttcttcgattatcgcggccagggcacactggtcaccgtttcttctggtaccggcggaggcggatctggcggcggaggtagcggtggcggaggatctgaattcagctacgtgctgacacagcctccatccgtgtctgtggctccaggacagaccgccagaatcacatgcggcggcaacaacatcggcagcaagagcgtgcactggtatcagcagccacctggacaggctccagtggtggtggtgtacgacgacagcgatagacctagcggcatccccgagagattcagcggcagcaattccggcaataccgccacactgaccatcagcagagtggaagctggcgacgaggccgtgtactactgccaagtgtgggacagcagcagcgatcacgtggtgtttggcggcggaacaaagctgacagtgcttctcgaggacctgaagaacgtgttcccacctgaggtggccgtgttcgagcctagcgaggccgagatcagccacacccagaaagccaccctcgtgtgcctggctaccggcttctaccccgaccatgtggaactgtcttggtgggtcaacggcaaagaggtgcacagcggcgtgtgtaccgacccccagccactgaaagaacagcccgccctgaacgacagccggtactgcctgagcagcagactgagagtgtccgccaccttctggcagaacccccggaaccacttcagatgccaggtgcagttctacggcctgagcgagaacgacgagtggacccaggacagagccaagcccgtgacccagatcgtgtctgccgaagcctggggcagagccgattgcggctttaccagcgagagctaccagcagggcgtgctgagcgccaccatcctgtacgagatcctgctgggcaaggccaccctgtacgccgtgctggtgtctgccctggtgctgatggctatggtcaagcggaaggacagccggggaagggccaagcgatctggatctggagcaacaaacttctcactactcaaacaagcaggtgacgtggaggagaatcccgggcctactagtatggactggatttggcgcatccttttccttgtcggcgctgctaccggcgcgcattccttcgaacaactccagctgcaagagtctggccctggcctggtcaagcctagcgaaacactgagcctgacctgtaccgtgtctggcggctctatcagctccggcagctatatctggggctggatcagacaacctcctggcaaaggactggaatggatcggctccatctactacagcggcatcacctactacaaccccagcctgaagtccagagtgaccatctccgtggacaccagcaagaaccagttctccctgaagctgagcagcgtgacagccgccgataccgccgtgtattattgtgccagacatgacggcgctgtggccggcctgtttgattattggggacagggcaccctggtcaccgtgtcatctgctacgcgtatccagaaccctgatcctgccgtgtaccagctgcgggatagcaagagcagcgacaagagcgtgtgtctgttcaccgacttcgacagccagaccaacgtgtcccagagcaaggactccgacgtgtacatcaccgataagtgcgtgctggacatgcggagcatggacttcaagagcaactccgccgtggcctggtccaacaagtccgatttcgcctgcgccaacgccttcaacaacagcattatccccgaggacacattcttcccaagccccgagagcagctgcgacgtgaagctggtggaaaagagcttcgagacagacaccaacctgaacttccagaacctgagcgtgatcggcttcagaatcctgctgctgaaagtggccggctttaacctgctgatgaccctgcggctgtggtccagc

SEQ ID NO: 7544 - DNA, 2280 bp, Artificial Sequence
  Synthetic Polynucloetide
atggccttaccagtgaccgccttgctcctgccgctggccttgctgctccacgccgccaggccgagctacgtgctgacacagcctccatccgtgtctgtggctccaggacagaccgccagaatcacatgcggcggcaacaacatcggcagcaagagcgtgcactggtatcagcagccacctggacaggctccagtggtggtggtgtacgacgacagcgatagacctagcggcatccccgagagattcagcggcagcaattccggcaataccgccacactgaccatcagcagagtggaagctggcgacgaggccgtgtactactgccaagtgtgggacagcagcagcgatcacgtggtgtttggcggcggaacaaagctgacagtgcttctcgaggacctgaagaacgtgttcccacctgaggtggccgtgttcgagcctagcgaggccgagatcagccacacccagaaagccaccctcgtgtgcctggctaccggcttctaccccgaccatgtggaactgtcttggtgggtcaacggcaaagaggtgcacagcggcgtgtgtaccgacccccagccactgaaagaacagcccgccctgaacgacagccggtactgcctgagcagcagactgagagtgtccgccaccttctggcagaacccccggaaccacttcagatgccaggtgcagttctacggcctgagcgagaacgacgagtggacccaggacagagccaagcccgtgacccagatcgtgtctgccgaagcctggggcagagccgattgcggctttaccagcgagagctaccagcagggcgtgctgagcgccaccatcctgtacgagatcctgctgggcaaggccaccctgtacgccgtgctggtgtctgccctggtgctgatggctatggtcaagcggaaggacagccggggaagggccaagcgatctggatctggagcaacaaacttctcactactcaaacaagcaggtgacgtggaggagaatcccgggcctactagtatggactggatttggcgcatccttttccttgtcggcgctgctaccggcgcccattccgggcccgaagtgcagctggttgaatctggcggaggactggttcaggctggcggatctctgagactgtcttgtgccgccagcggcagaacctttagcatgggctggtttagacaggcccctggcaaagagagagagttcgtcgccgccatcacatactctggcggcagcccttactacgccgactctgtgaagggcagattcaccatcagccgggacaacgccaagaacaccgtgtacctccagatgaacagcctgaagcctgaggacaccgccgtgtactactgcgccgccaatccaacatacggcagcgactggaacgccgagaattggggccagggaacccaagtgacagtgtctagcggatccggcggcggaggatctggcggaggcggatctgggggcggaggctctttcgaacaactccagctgcaagagtctggccctggcctggtcaagcctagcgaaacactgagcctgacctgtaccgtgtctggcggctctatcagctccggcagctatatctggggctggatcagacaacctcctggcaaaggactggaatggatcggctccatctactacagcggcatcacctactacaaccccagcctgaagtccagagtgaccatctccgtggacaccagcaagaaccagttctccctgaagctgagcagcgtgacagccgccgataccgccgtgtattattgtgccagacatgacggcgctgtggccggcctgtttgattattggggacagggcaccctggtcaccgtgtcatctgctacgcgtatccagaaccctgatcctgccgtgtaccagctgcgggatagcaagagcagcgacaagagcgtgtgtctgttcaccgacttcgacagccagaccaacgtgtcccagagcaaggactccgacgtgtacatcaccgataagtgcgtgctggacatgcggagcatggacttcaagagcaactccgccgtggcctggtccaacaagtccgatttcgcctgcgccaacgccttcaacaacagcattatccccgaggacacattcttcccaagccccgagagcagctgcgacgtgaagctggtggaaaagagcttcgagacagacaccaacctgaacttccagaacctgagcgtgatcggcttcagaatcctgctgctgaaagtggccggctttaacctgctgatgaccctgcggctgtggtccagc

SEQ ID NO: 7545 - DNA, 2661 bp, Artificial Sequence
  Synthetic Polynucloetide
atggccttaccagtgaccgccttgctcctgccgctggccttgctgctccacgccgccaggccgagctacgtgctgacacagcctccatccgtgtctgtggctccaggacagaccgccagaatcacatgcggcggcaacaacatcggcagcaagagcgtgcactggtatcagcagccacctggacaggctccagtggtggtggtgtacgacgacagcgatagacctagcggcatccccgagagattcagcggcagcaattccggcaataccgccacactgaccatcagcagagtggaagctggcgacgaggccgtgtactactgccaagtgtgggacagcagcagcgatcacgtggtgtttggcggcggaacaaagctgacagtgcttctcgaggacctgaagaacgtgttcccacctgaggtggccgtgttcgagcctagcgaggccgagatcagccacacccagaaagccaccctcgtgtgcctggctaccggcttctaccccgaccatgtggaactgtcttggtgggtcaacggcaaagaggtgcacagcggcgtgtgtaccgacccccagccactgaaagaacagcccgccctgaacgacagccggtactgcctgagcagcagactgagagtgtccgccaccttctggcagaacccccggaaccacttcagatgccaggtgcagttctacggcctgagcgagaacgacgagtggacccaggacagagccaagcccgtgacccagatcgtgtctgccgaagcctggggcagagccgattgcggctttaccagcgagagctaccagcagggcgtgctgagcgccaccatcctgtacgagatcctgctgggcaaggccaccctgtacgccgtgctggtgtctgccctggtgctgatggctatggtcaagcggaaggacagccggggaagggccaagcgatctggatctggagcaacaaacttctcactactcaaacaagcaggtgacgtggaggagaatcccgggcctactagtatggactggatttggcgcatccttttccttgtcggcgctgctaccggcgcccattcccaactgcaactgcaagagtctggccctggcctggtcaagccttctgaaaccctgagcctgacctgtaccgtgtccggcggctctatcagcagcggcgattactactggggctggatcagacagcctccaggcaagggactcgaatggatcggcagcatcagctacagcggctccacctactacaacccaagcctgaagtccagagtgaccatcagcgtggacaccagcagaaaccagttctccctgaagctgagcagcgtgacagccgccgatacagccgtgtattattgcaccagagaggacagcagcaactggcggagtagaggacagggcacactggtcacagtgtcctcttctggaggcggtggaagcggtggaggaggatctgaagtgcagctggttgaatctggcggaggactggttcaggctggcggatctctgagactgtcttgtgccgccagcggcagaacctttagcatgggctggtttagacaggcccctggcaaagagagagagttcgtcgccgccatcacatactctggcggcagcccttactacgccgactctgtgaagggcagattcaccatcagccgggacaacgccaagaacaccgtgtacctccagatgaacagcctgaagcctgaggacaccgccgtgtactactgcgccgccaatccaacatacggcagcgactggaacgccgagaattggggccagggaacccaagtgacagtgtctagcggatccggcggcggaggatctggcggaggcggatctgggggcggaggctctttcgaacaactccagctgcaagagtctggccctggcctggtcaagcctagcgaaacactgagcctgacctgtaccgtgtctggcggctctatcagctccggcagctatatctggggctggatcagacaacctcctggcaaaggactggaatggatcggctccatctactacagcggcatcacctactacaaccccagcctgaagtccagagtgaccatctccgtggacaccagcaagaaccagttctccctgaagctgagcagcgtgacagccgccgataccgccgtgtattattgtgccagacatgacggcgctgtggccggcctgtttgattattggggacagggcaccctggtcaccgtgtcatctgctacgcgtatccagaaccctgatcctgccgtgtaccagctgcgggatagcaagagcagcgacaagagcgtgtgtctgttcaccgacttcgacagccagaccaacgtgtcccagagcaaggactccgacgtgtacatcaccgataagtgcgtgctggacatgcggagcatggacttcaagagcaactccgccgtggcctggtccaacaagtccgatttcgcctgcgccaacgccttcaacaacagcattatccccgaggacacattcttcccaagccccgagagcagctgcgacgtgaagctggtggaaaagagcttcgagacagacaccaacctgaacttccagaacctgagcgtgatcggcttcagaatcctgctgctgaaagtggccggctttaacctgctgatgaccctgcggctgtggtccagc

SEQ ID NO: 7546 - DNA, 2688 bp, Artificial Sequence
  Synthetic Polynucloetide
atggccttaccagtgaccgccttgctcctgccgctggccttgctgctccacgccgccaggccggaagtgcaggttttggagtctggcggaggactggttcagcctggcggatctctgagactgtcttgtgccgccagcggcttcaccttcagcaactttgccatgagctgggtccgacaggcccctggcaaaggacttgaatgggtgtccacaatcagcggcagcgccggcacaacagattacgccgattctgtgaagggcagattcaccatcagccgggacaacagcaagaaaaccctgtacctccagatgaacagcctgcgcgtggaagataccgccgtgtactactgtgccgatggcagaggccccttcttcgattatcgcggccagggcacactggtcaccgtttcttctggtaccggcggaggcggatctggcggcggaggtagcggtggcggaggatctgaattcagctacgtgctgacacagcctccatccgtgtctgtggctccaggacagaccgccagaatcacatgcggcggcaacaacatcggcagcaagagcgtgcactggtatcagcagccacctggacaggctccagtggtggtggtgtacgacgacagcgatagacctagcggcatccccgagagattcagcggcagcaattccggcaataccgccacactgaccatcagcagagtggaagctggcgacgaggccgtgtactactgccaagtgtgggacagcagcagcgatcacgtggtgtttggcggcggaacaaagctgacagtgcttctcgaggacctgaagaacgtgttcccacctgaggtggccgtgttcgagcctagcgaggccgagatcagccacacccagaaagccaccctcgtgtgcctggctaccggcttctaccccgaccatgtggaactgtcttggtgggtcaacggcaaagaggtgcacagcggcgtgtgtaccgacccccagccactgaaagaacagcccgccctgaacgacagccggtactgcctgagcagcagactgagagtgtccgccaccttctggcagaacccccggaaccacttcagatgccaggtgcagttctacggcctgagcgagaacgacgagtggacccaggacagagccaagcccgtgacccagatcgtgtctgccgaagcctggggcagagccgattgcggctttaccagcgagagctaccagcagggcgtgctgagcgccaccatcctgtacgagatcctgctgggcaaggccaccctgtacgccgtgctggtgtctgccctggtgctgatggctatggtcaagcggaaggacagccggggaagggccaagcgatctggatctggagcaacaaacttctcactactcaaacaagcaggtgacgtggaggagaatcccgggcctactagtatggactggatttggcgcatccttttccttgtcggcgctgctaccggcgcccattccgggcccgaagtgcagctggttgaatctggcggaggactggttcaggctggcggatctctgagactgtcttgtgccgccagcggcagaacctttagcatgggctggtttagacaggcccctggcaaagagagagagttcgtcgccgccatcacatacagcggcggcagcccttactacgcctcttctgtcagaggccggttcaccatcagccgggacaacgccaagaacaccgtgtacctccagatgaacagcctgaagccagaggacaccgccgtgtactactgtgccgccaatccaacctacggcagcgactggaatgccgagaattggggccagggcacccaagtgacagtgtctagtggatccggcggcggaggatctggcggaggcggatctgggggcggaggctctttcgaacaactccagctgcaagagtctggccctggcctggtcaagcctagcgaaacactgagcctgacctgtaccgtgtctggcggctctatcagctccggcagctatatctggggctggatcagacaacctcctggcaaaggactggaatggatcggctccatctactacagcggcatcacctactacaaccccagcctgaagtccagagtgaccatctccgtggacaccagcaagaaccagttctccctgaagctgagcagcgtgacagccgccgataccgccgtgtattattgtgccagacatgacggcgctgtggccggcctgtttgattattggggacagggcaccctggtcaccgtgtcatctgctacgcgtatccagaaccctgatcctgccgtgtaccagctgcgggatagcaagagcagcgacaagagcgtgtgtctgttcaccgacttcgacagccagaccaacgtgtcccagagcaaggactccgacgtgtacatcaccgataagtgcgtgctggacatgcggagcatggacttcaagagcaactccgccgtggcctggtccaacaagtccgatttcgcctgcgccaacgccttcaacaacagcattatccccgaggacacattcttcccaagccccgagagcagctgcgacgtgaagctggtggaaaagagcttcgagacagacaccaacctgaacttccagaacctgagcgtgatcggcttcagaatcctgctgctgaaagtggccggctttaacctgctgatgaccctgcggctgtggtccagc

SEQ ID NO: 7547 - DNA, 2184 bp, Artificial Sequence
  Synthetic Polynucloetide
atggccttaccagtgaccgccttgctcctgccgctggccttgctgctccacgccgccaggccgagctacgtgctgacacagcctccatccgtgtctgtggctccaggacagaccgccagaatcacatgcggcggcaacaacatcggcagcaagagcgtgcactggtatcagcagccacctggacaggctccagtggtggtggtgtacgacgacagcgatagacctagcggcatccccgagagattcagcggcagcaattccggcaataccgccacactgaccatcagcagagtggaagctggcgacgaggccgtgtactactgccaagtgtgggacagcagcagcgatcacgtggtgtttggcggcggaacaaagctgacagtgcttggcggaggcggaagtggaggcggaggatctggcggcggaggctctcaactccagctgcaagagtctggccctggcctggtcaagcctagcgaaacactgagcctgacctgtaccgtgtctggcggctctatcagctccggcagctatttctggggctggatcagacaacctcctggcaaaggactggaatggatcggctccatctactacagcggcatcacctactacaaccccagcctgaagtccagagtgaccatctccgtggacaccagcaagaaccagttctccctgaagctgagcagcgtgacagccgccgataccgccgtgtattattgtgccagacatgacggcgctatggccggcctgtttgattattggggacagggcaccctggtcaccgtgtcatctgctacgcgtgagcagaaactgatctcggaagaggatctggcgaagcccaccacgacgccagcgccgcgaccaccaacaccggcgcccaccatcgcgtcgcagcccctgtccctgcgcccagaggcgtgccggccagcggcggggggcgcagtgcacacgagggggctggacttcgcctgtgacatctacatctgggcgcccttggccgggacttgtggggtccttctcctgtcactggttatcaccctttactgcaaacggggcagaaagaaactcctgtatatattcaaacaaccatttatgagaccagtacaaactactcaagaggaagatggctgtagctgccgatttccagaagaagaagaaggaggatgtgaactgagagtgaagttcagcaggagcgcagacgcccccgcgtaccagcagggccagaaccagctctataacgagctgaatctaggacgaagagaggagtacgatgttttggacaagagacgtggccgggaccctgagatggggggaaagccgagaaggaagaaccctcaggaaggcctgtacaatgaactgcagaaagataagatggcggaggcctacagtgagattgggatgaaaggcgagcgccggaggggcaaggggcacgatggcctttaccagggtctcagtacagccaccaaggacacctacgacgcccttcacatgcaggccctgccccctcgctctagtggctccggcgagggcagaggaagtctactaacctgcggagatgtggaagaaaatcctggcccacatatgaccgagtacaagcccacggtgcgcctcgccacccgcgacgacgtccccagggccgtacgcaccctcgccgccgcgttcgccgactaccccgccacgcgccacaccgtcgatccggaccgccacatcgagcgggtcaccgagctgcaagaactcttcctcacgcgcgtcgggctcgacatcggcaaggtgtgggtcgcggacgacggcgccgcggtggcggtctggaccacgccggagagcgtcgaagcgggggcggtgttcgccgagatcggcccgcgcatggccgagttgagcggttcccggctggccgcgcagcaacagatggaaggcctcctggcgccgcaccggcccaaggagcccgcgtggttcctggccaccgtcggcgtctcgcccgaccaccagggcaagggtctgggcagcgccgtcgtgctccccggagtggaggcggccgagcgcgccggggtgcccgccttcctggagacctccgcgccccgcaacctccccttctacgagcggctcggcttcaccgtcaccgccgacgtcgaggtgcccgaaggaccgcgcacctggtgcatgacccgcaagcccggtgcctga

SEQ ID NO: 7548 - DNA, 2166 bp, Artificial Sequence
  Synthetic Polynucloetide
atggccttaccagtgaccgccttgctcctgccgctggccttgctgctccacgccgccaggccgagctacgtgctgacacagcctccatccgtgtctgtggctccaggacagaccgccagaatcacatgcggcggcaacaacatcggcagcaagagcgtgcactggtatcagcagccacctggacaggctccagtggtggtggtgtacgacgacagcgatagacctagcggcatccccgagagattcagcggcagcaattccggcaataccgccacactgaccatcagcagagtggaagctggcgacgaggccgtgtactactgccaagtgtgggacagcagcagcgatcacgtggtgtttggcggcggaacaaagctgacagtgcttggcggaggcggaagtggaggcggaggatctggcggcggaggctctcaactccagctgcaagagtctggccctggcctggtcaagcctagcgaaacactgagcctgacctgtaccgtgtctggcggctctatcagctccggcagctatttctggggctggatcagacaacctcctggcaaaggactggaatggatcggctccatctactacagcggcatcacctactacaaccccagcctgaagtccagagtgaccatctccgtggacaccagcaagaaccagttctccctgaagctgagcagcgtgacagccgccgataccgccgtgtattattgtgccagacatgacggcgctatggccggcctgtttgattattggggacagggcaccctggtcaccgtgtcatctgctacgcgtgagcagaaactgatctcggaagaggatctgaaaattgaagttatgtatcctcctccttacctagacaatgagaagagcaatggaaccattatccatgtgaaagggaaacacctttgtccaagtcccctatttcccggaccttctaagcccttttgggtgctggtggtggttgggggagtcctggcttgctatagcttgctagtaacagtggcctttattattttctgggtgaggagtaagaggagcaggctcctgcacagtgactacatgaacatgactccacgccgccccggacccacccgcaagcattaccagccctatgccccaccacgcgacttcgcagcctatcgctccagagtgaagttcagcaggagcgcagacgcccccgcgtaccagcagggccagaaccagctctataacgagctcaatctaggacgaagagaggagtacgatgttttggacaagagacgtggccgggaccctgagatggggggaaagccgagaaggaagaaccctcaggaaggcctgtacaatgaactgcagaaagataagatggcggaggcctacagtgagattgggatgaaaggcgagcgccggaggggcaaggggcacgatggcctttaccagggtctcagtacagccaccaaggacacctacgacgcccttcacatgcaggccctgccccctcgctctagtggctccggcgagggcagaggaagtctactaacctgcggagatgtggaagaaaatcctggcccacatatgaccgagtacaagcccacggtgcgcctcgccacccgcgacgacgtccccagggccgtacgcaccctcgccgccgcgttcgccgactaccccgccacgcgccacaccgtcgatccggaccgccacatcgagcgggtcaccgagctgcaagaactcttcctcacgcgcgtcgggctcgacatcggcaaggtgtgggtcgcggacgacggcgccgcggtggcggtctggaccacgccggagagcgtcgaagcgggggcggtgttcgccgagatcggcccgcgcatggccgagttgagcggttcccggctggccgcgcagcaacagatggaaggcctcctggcgccgcaccggcccaaggagcccgcgtggttcctggccaccgtcggcgtctcgcccgaccaccagggcaagggtctgggcagcgccgtcgtgctccccggagtggaggcggccgagcgcgccggggtgcccgccttcctggagacctccgcgccccgcaacctccccttctacgagcggctcggcttcaccgtcaccgccgacgtcgaggtgcccgaaggaccgcgcacctggtgcatgacccgcaagcccggtgcctga

SEQ ID NO: 7549 - DNA, 1494 bp, Artificial Sequence
  Synthetic Polynucloetide
atggccttaccagtgaccgccttgctcctgccgctggccttgctgctccacgccgccaggccgagctacgtgctgacacagcctccatccgtgtctgtggctccaggacagaccgccagaatcacatgcggcggcaacaacatcggcagcaagagcgtgcactggtatcagcagccacctggacaggctccagtggtggtggtgtacgacgacagcgatagacctagcggcatccccgagagattcagcggcagcaattccggcaataccgccacactgaccatcagcagagtggaagctggcgacgaggccgtgtactactgccaagtgtgggacagcagcagcgatcacgtggtgtttggcggcggaacaaagctgacagtgcttggcggaggcggaagtggaggcggaggatctggcggcggaggctctcaactccagctgcaagagtctggccctggcctggtcaagcctagcgaaacactgagcctgacctgtaccgtgtctggcggctctatcagctccggcagctatttctggggctggatcagacaacctcctggcaaaggactggaatggatcggctccatctactacagcggcatcacctactacaaccccagcctgaagtccagagtgaccatctccgtggacaccagcaagaaccagttctccctgaagctgagcagcgtgacagccgccgataccgccgtgtattattgtgccagacatgacggcgctatggccggcctgtttgattattggggacagggcaccctggtcaccgtgtcatctgctacgcgtgagcagaaactgatctcggaagaggatctgaaaattgaagttatgtatcctcctccttacctagacaatgagaagagcaatggaaccattatccatgtgaaagggaaacacctttgtccaagtcccctatttcccggaccttctaagcccttttgggtgctggtggtggttgggggagtcctggcttgctatagcttgctagtaacagtggcctttattattttctgggtgaggagtaagaggagcaggctcctgcacagtgactacatgaacatgactccacgccgccccggacccacccgcaagcattaccagccctatgccccaccacgcgacttcgcagcctatcgctccagagtgaagttcagcaggagcgcagacgcccccgcgtaccagcagggccagaaccagctctataacgagctcaatctaggacgaagagaggagtacgatgttttggacaagagacgtggccgggaccctgagatggggggaaagccgagaaggaagaaccctcaggaaggcctgtacaatgaactgcagaaagataagatggcggaggcctacagtgagattgggatgaaaggcgagcgccggaggggcaaggggcacgatggcctttaccagggtctcagtacagccaccaaggacacctacgacgcccttcacatgcaggccctgccccctcgc

SEQ ID NO: 7550 - DNA, 1515 bp, Artificial Sequence
  Synthetic Polynucloetide
atggccttaccagtgaccgccttgctcctgccgctggccttgctgctccacgccgccaggccgagctacgtgctgacacagcctccatccgtgtctgtggctccaggacagaccgccagaatcacatgcggcggcaacaacatcggcagcaagagcgtgcactggtatcagcagccacctggacaggctccagtggtggtggtgtacgacgacagcgatagacctagcggcatccccgagagattcagcggcagcaattccggcaataccgccacactgaccatcagcagagtggaagctggcgacgaggccgtgtactactgccaagtgtgggacagcagcagcgatcacgtggtgtttggcggcggaacaaagctgacagtgcttggcggaggcggaagtggaggcggaggatctggcggcggaggctctcaactccagctgcaagagtctggccctggcctggtcaagcctagcgaaacactgagcctgacctgtaccgtgtctggcggctctatcagctccggcagctatttctggggctggatcagacaacctcctggcaaaggactggaatggatcggctccatctactacagcggcatcacctactacaaccccagcctgaagtccagagtgaccatctccgtggacaccagcaagaaccagttctccctgaagctgagcagcgtgacagccgccgataccgccgtgtattattgtgccagacatgacggcgctatggccggcctgtttgattattggggacagggcaccctggtcaccgtgtcatctgctacgcgtgagcagaaactgatctcggaagaggatctggcgaagcccaccacgacgccagcgccgcgaccaccaacaccggcgcccaccatcgcgtcgcagcccctgtccctgcgcccagaggcgtgccggccagcggcggggggcgcagtgcacacgagggggctggacttcgcctgtgacatctacatctgggcgcccttggccgggacttgtggggtccttctcctgtcactggttatcaccctttactgcaaacggggcagaaagaaactcctgtatatattcaaacaaccatttatgagaccagtacaaactactcaagaggaagatggctgtagctgccgatttccagaagaagaagaaggaggatgtgaactgagagtgaagttcagcaggagcgcagacgcccccgcgtaccagcagggccagaaccagctctataacgagctgaatctaggacgaagagaggagtacgatgttttggacaagagacgtggccgggaccctgagatggggggaaagccgagaaggaagaaccctcaggaaggcctgtacaatgaactgcagaaagataagatggcggaggcctacagtgagattgggatgaaaggcgagcgccggaggggcaaggggcacgatggcctttaccagggtctcagtacagccaccaaggacacctacgacgcccttcacatgcaggccctgccccctcgctga

SEQ ID NO: 7551 - DNA, 1515 bp, Artificial Sequence
  Synthetic Polynucloetide
atggccttaccagtgaccgccttgctcctgccgctggccttgctgctccacgccgccaggccgcaactccagctgcaagagtctggccctggcctggtcaagcctagcgaaacactgagcctgacctgtaccgtgtctggcggctctatcagctccggcagctatttctggggctggatcagacaacctcctggcaaaggactggaatggatcggctccatctactacagcggcatcacctactacaaccccagcctgaagtccagagtgaccatctccgtggacaccagcaagaaccagttctccctgaagctgagcagcgtgacagccgccgataccgccgtgtattattgtgccagacatgacggcgctatggccggcctgtttgattattggggacagggcaccctggtcaccgtgtcatctgctggcggaggcggaagtggaggcggaggatctggcggcggaggctctagctacgtgctgacacagcctccatccgtgtctgtggctccaggacagaccgccagaatcacatgcggcggcaacaacatcggcagcaagagcgtgcactggtatcagcagccacctggacaggctccagtggtggtggtgtacgacgacagcgatagacctagcggcatccccgagagattcagcggcagcaattccggcaataccgccacactgaccatcagcagagtggaagctggcgacgaggccgtgtactactgccaagtgtgggacagcagcagcgatcacgtggtgtttggcggcggaacaaagctgacagtgcttacgcgtgagcagaaactgatctcggaagaggatctggcgaagcccaccacgacgccagcgccgcgaccaccaacaccggcgcccaccatcgcgtcgcagcccctgtccctgcgcccagaggcgtgccggccagcggcggggggcgcagtgcacacgagggggctggacttcgcctgtgacatctacatctgggcgcccttggccgggacttgtggggtccttctcctgtcactggttatcaccctttactgcaaacggggcagaaagaaactcctgtatatattcaaacaaccatttatgagaccagtacaaactactcaagaggaagatggctgtagctgccgatttccagaagaagaagaaggaggatgtgaactgagagtgaagttcagcaggagcgcagacgcccccgcgtaccagcagggccagaaccagctctataacgagctgaatctaggacgaagagaggagtacgatgttttggacaagagacgtggccgggaccctgagatggggggaaagccgagaaggaagaaccctcaggaaggcctgtacaatgaactgcagaaagataagatggcggaggcctacagtgagattgggatgaaaggcgagcgccggaggggcaaggggcacgatggcctttaccagggtctcagtacagccaccaaggacacctacgacgcccttcacatgcaggccctgccccctcgctga

SEQ ID NO: 7552 - DNA, 2754 bp, Artificial Sequence
  Synthetic Polynucloetide
atggccttaccagtgaccgccttgctcctgccgctggccttgctgctccacgccgccaggccgagctacgtgctgacacagcctccatccgtgtctgtggctccaggacagaccgccagaatcacatgcggcggcaacaacatcggcagcaagagcgtgcactggtatcagcagccacctggacaggctccagtggtggtggtgtacgacgacagcgatagacctagcggcatccccgagagattcagcggcagcaattccggcaataccgccacactgaccatcagcagagtggaagctggcgacgaggccgtgtactactgccaagtgtgggacagcagcagcgatcacgtggtgtttggcggcggaacaaagctgacagtgcttggcggaggcggaagtggaggcggaggatctggcggcggaggctctcaactccagctgcaagagtctggccctggcctggtcaagcctagcgaaacactgagcctgacctgtaccgtgtctggcggctctatcagctccggcagctatttctggggctggatcagacaacctcctggcaaaggactggaatggatcggctccatctactacagcggcatcacctactacaaccccagcctgaagtccagagtgaccatctccgtggacaccagcaagaaccagttctccctgaagctgagcagcgtgacagccgccgataccgccgtgtattattgtgccagacatgacggcgctatggccggcctgtttgattattggggacagggcaccctggtcaccgtgtcatctgctacgcgtgagcagaaactgatctcggaagaggatctggcgaagcccaccacgacgccagcgccgcgaccaccaacaccggcgcccaccatcgcgtcgcagcccctgtccctgcgcccagaggcgtgccggccagcggcggggggcgcagtgcacacgagggggctggacttcgcctgtgacatctacatctgggcgcccttggccgggacttgtggggtccttctcctgtcactggttatcaccctttactgcgggcgcgccagagtgaagttcagcaggagcgcagacgcccccgcgtaccagcagggccagaaccagctctataacgagctgaatctaggacgaagagaggagtacgatgttttggacaagagacgtggccgggaccctgagatggggggaaagccgagaaggaagaaccctcaggaaggcctgtacaatgaactgcagaaagataagatggcggaggcctacagtgagattgggatgaaaggcgagcgccggaggggcaaggggcacgatggcctttaccagggtctcagtacagccaccaaggacacctacgacgcccttcacatgcaggccctgccccctcgctctagaggatctggagcaacaaacttctcactactcaaacaagcaggtgacgtggaggagaatcccgggcctgggatccacatggccacttacgaggttctctgtgaggtggcgcggaaactgggcacggatgacagggaagtggtattgttcctcctaaacgtgttcatacctcaacccacactggcccaattaattggagctcttagagctttaaaggaggagggcaggttaacgtttcccctgttagcggaatgtctgtttcgtgcaggtcgcagagacctcttgcgcgacctgcttcacttagacccgcgttttttagagcgccacctagcgggcacaatgagttatttcagcccttatcagctcactgttctccacgtagacggggagctgtgtgcgagggatattaggtctttgatatttttaagcaaggacactatagggtctcgcagcacaccacagacattcttacactgggtgtactgtatggaaaacttagacctactgggtcccactgacgtggatgccctaatgtcaatgcttagatctttgtcaagagtagacctacagcgccaagtgcaaaccctaatgggccttcacctttccggcccatcacactcccaacactatcgccatacaccactcgagaccgatttctacgactacaaggacgacgatgacaagactagtggctccggcgagggcagaggaagtctactaacctgcggagatgtggaagaaaatcctggcccacatatgaccgagtacaagcccacggtgcgcctcgccacccgcgacgacgtccccagggccgtacgcaccctcgccgccgcgttcgccgactaccccgccacgcgccacaccgtcgatccggaccgccacatcgagcgggtcaccgagctgcaagaactcttcctcacgcgcgtcgggctcgacatcggcaaggtgtgggtcgcggacgacggcgccgcggtggcggtctggaccacgccggagagcgtcgaagcgggggcggtgttcgccgagatcggcccgcgcatggccgagttgagcggttcccggctggccgcgcagcaacagatggaaggcctcctggcgccgcaccggcccaaggagcccgcgtggttcctggccaccgtcggcgtctcgcccgaccaccagggcaagggtctgggcagcgccgtcgtgctccccggagtggaggcggccgagcgcgccggggtgcccgccttcctggagacctccgcgccccgcaacctccccttctacgagcggctcggcttcaccgtcaccgccgacgtcgaggtgcccgaaggaccgcgcacctggtgcatgacccgcaagcccggtgcctga

SEQ ID NO: 7553 - DNA, 2574 bp, Artificial Sequence
  Synthetic Polynucloetide
atggccttaccagtgaccgccttgctcctgccgctggccttgctgctccacgccgccaggccgagctacgtgctgacacagcctccatccgtgtctgtggctccaggacagaccgccagaatcacatgcggcggcaacaacatcggcagcaagagcgtgcactggtatcagcagccacctggacaggctccagtggtggtggtgtacgacgacagcgatagacctagcggcatccccgagagattcagcggcagcaattccggcaataccgccacactgaccatcagcagagtggaagctggcgacgaggccgtgtactactgccaagtgtgggacagcagcagcgatcacgtggtgtttggcggcggaacaaagctgacagtgcttctcgagatccagaaccctgatcctgccgtgtaccagctgcgggatagcaagagcagcgacaagagcgtgtgtctgttcaccgacttcgacagccagaccaacgtgtcccagagcaaggactccgacgtgtacatcaccgataagtgcgtgctggacatgcggagcatggacttcaagagcaactccgccgtggcctggtccaacaagtccgatttcgcctgcgccaacgccttcaacaacagcattatccccgaggacacattcttcccaagcagcgacgtgccctgcgacgtgaagctggtggaaaagagcttcgagacagacaccaacctgaacttccagaacctgagcgtgatcggcttcagaatcctgctgctgaaagtggccggctttaacctgctgatgaccctgcggctgtggtccagccgcgccaagagaagcggatctggcgtgaagcagaccctgaatttcgacctgctgaagctggctggcgacgtggaatccaacccaggccctactagtatggactggatttggcgcatccttttccttgtcggcgctgctaccggcgcgcattccttcgaacaactccagctgcaagagtctggccctggcctggtcaagcctagcgaaacactgagcctgacctgtaccgtgtctggcggctctatcagctccggcagctatttctggggctggatcagacaacctcctggcaaaggactggaatggatcggctccatctactacagcggcatcacctactacaaccccagcctgaagtccagagtgaccatctccgtggacaccagcaagaaccagttctccctgaagctgagcagcgtgacagccgccgataccgccgtgtattattgtgccagacatgacggcgctatggccggcctgtttgattattggggacagggcaccctggtcaccgtgtcatctgctacgcgtgaggacctgaagaacgtgttcccacctgaggtggccgtgttcgagcctagcaaggccgagatcgcccacacccagaaagccaccctcgtgtgcctggctaccggcttctaccccgaccatgtggaactgtcttggtgggtcaacggcaaagaggtgcacagcggcgtgtgtaccgacccccagccactgaaagaacagcccgccctgaacgacagccggtactgcctgagcagcagactgagagtgtccgccaccttctggcagaacccccggaaccacttcagatgccaggtgcagttctacggcctgagcgagaacgacgagtggacccaggacagagccaagcccgtgacccagatcgtgtctgccgaagcctggggcagagccgattgcggcatcaccagcgccagctaccaccagggcgtgctgagcgccaccatcctgtacgagatcctgctgggcaaggccaccctgtacgccgtgctggtgtctgccctggtgctgatggctatggtcaagcggaaggacagccggggaagggccaagcgatctggatctggagcaacaaacttctcactactcaaacaagcaggtgacgtggaggagaatcccgggccttctagaggccatatgaccgagtacaagcccacggtgcgcctcgccacccgcgacgacgtccccagggccgtacgcaccctcgccgccgcgttcgccgactaccccgccacgcgccacaccgtcgatccggaccgccacatcgagcgggtcaccgagctgcaagaactcttcctcacgcgcgtcgggctcgacatcggcaaggtgtgggtcgcggacgacggcgccgcggtggcggtctggaccacgccggagagcgtcgaagcgggggcggtgttcgccgagatcggcccgcgcatggccgagttgagcggttcccggctggccgcgcagcaacagatggaaggcctcctggcgccgcaccggcccaaggagcccgcgtggttcctggccaccgtcggcgtctcgcccgaccaccagggcaagggtctgggcagcgccgtcgtgctccccggagtggaggcggccgagcgcgccggggtgcccgccttcctggagacctccgcgccccgcaacctccccttctacgagcggctcggcttcaccgtcaccgccgacgtcgaggtgcccgaaggaccgcgcacctggtgcatgacccgcaagcccggtgcctga

SEQ ID NO: 7554 - DNA, 2571 bp, Artificial Sequence
  Synthetic Polynucloetide
atggccttaccagtgaccgccttgctcctgccgctggccttgctgctccacgccgccaggccgagctacgtgctgacacagcctccatccgtgtctgtggctccaggacagaccgccagaatcacatgcggcggcaacaacatcggcagcaagagcgtgcactggtatcagcagccacctggacaggctccagtggtggtggtgtacgacgacagcgatagacctagcggcatccccgagagattcagcggcagcaattccggcaataccgccacactgaccatcagcagagtggaagctggcgacgaggccgtgtactactgccaagtgtgggacagcagcagcgatcacgtggtgtttggcggcggaacaaagctgacagtgcttctcgaggacctgaagaacgtgttcccacctgaggtggccgtgttcgagcctagcaaggccgagatcgcccacacccagaaagccaccctcgtgtgcctggctaccggcttctaccccgaccatgtggaactgtcttggtgggtcaacggcaaagaggtgcacagcggcgtgtgtaccgacccccagccactgaaagaacagcccgccctgaacgacagccggtactgcctgagcagcagactgagagtgtccgccaccttctggcagaacccccggaaccacttcagatgccaggtgcagttctacggcctgagcgagaacgacgagtggacccaggacagagccaagcccgtgacccagatcgtgtctgccgaagcctggggcagagccgattgcggcatcaccagcgccagctaccaccagggcgtgctgagcgccaccatcctgtacgagatcctgctgggcaaggccaccctgtacgccgtgctggtgtctgccctggtgctgatggctatggtcaagcggaaggacagccggggaagggccaagcgatctggatctggagcaacaaacttctcactactcaaacaagcaggtgacgtggaggagaatcccgggcctactagtatggactggatttggcgcatccttttccttgtcggcgctgctaccggcgcgcattccttcgaacaactccagctgcaagagtctggccctggcctggtcaagcctagcgaaacactgagcctgacctgtaccgtgtctggcggctctatcagctccggcagctatttctggggctggatcagacaacctcctggcaaaggactggaatggatcggctccatctactacagcggcatcacctactacaaccccagcctgaagtccagagtgaccatctccgtggacaccagcaagaaccagttctccctgaagctgagcagcgtgacagccgccgataccgccgtgtattattgtgccagacatgacggcgctatggccggcctgtttgattattggggacagggcaccctggtcaccgtgtcatctgctacgcgtatccagaaccctgatcctgccgtgtaccagctgcgggatagcaagagcagcgacaagagcgtgtgtctgttcaccgacttcgacagccagaccaacgtgtcccagagcaaggactccgacgtgtacatcaccgataagtgcgtgctggacatgcggagcatggacttcaagagcaactccgccgtggcctggtccaacaagtccgatttcgcctgcgccaacgccttcaacaacagcattatccccgaggacacattcttcccaagcagcgacgtgccctgcgacgtgaagctggtggaaaagagcttcgagacagacaccaacctgaacttccagaacctgagcgtgatcggcttcagaatcctgctgctgaaagtggccggctttaacctgctgatgaccctgcggctgtggtccagccgcgccaagagaagcggatctggcgtgaagcagaccctgaatttcgacctgctgaagctggctggcgacgtggaatccaacccaggcccttctagaggccatatgaccgagtacaagcccacggtgcgcctcgccacccgcgacgacgtccccagggccgtacgcaccctcgccgccgcgttcgccgactaccccgccacgcgccacaccgtcgatccggaccgccacatcgagcgggtcaccgagctgcaagaactcttcctcacgcgcgtcgggctcgacatcggcaaggtgtgggtcgcggacgacggcgccgcggtggcggtctggaccacgccggagagcgtcgaagcgggggcggtgttcgccgagatcggcccgcgcatggccgagttgagcggttcccggctggccgcgcagcaacagatggaaggcctcctggcgccgcaccggcccaaggagcccgcgtggttcctggccaccgtcggcgtctcgcccgaccaccagggcaagggtctgggcagcgccgtcgtgctccccggagtggaggcggccgagcgcgccggggtgcccgccttcctggagacctccgcgccccgcaacctccccttctacgagcggctcggcttcaccgtcaccgccgacgtcgaggtgcccgaaggaccgcgcacctggtgcatgacccgcaagcccggtgcctga

SEQ ID NO: 7555 - DNA, 1869 bp, Artificial Sequence
  Synthetic Polynucloetide
atggccttaccagtgaccgccttgctcctgccgctggccttgctgctccacgccgccaggccgagctacgtgctgacacagcctccatccgtgtctgtggctccaggacagaccgccagaatcacatgcggcggcaacaacatcggcagcaagagcgtgcactggtatcagcagccacctggacaggctccagtggtggtggtgtacgacgacagcgatagacctagcggcatccccgagagattcagcggcagcaattccggcaataccgccacactgaccatcagcagagtggaagctggcgacgaggccgtgtactactgccaagtgtgggacagcagcagcgatcacgtggtgtttggcggcggaacaaagctgacagtgcttctcgaggacctgaagaacgtgttcccacctgaggtggccgtgttcgagcctagcgaggccgagatcagccacacccagaaagccaccctcgtgtgcctggctaccggcttctaccccgaccatgtggaactgtcttggtgggtcaacggcaaagaggtgcacagcggcgtgtgtaccgacccccagccactgaaagaacagcccgccctgaacgacagccggtactgcctgagcagcagactgagagtgtccgccaccttctggcagaacccccggaaccacttcagatgccaggtgcagttctacggcctgagcgagaacgacgagtggacccaggacagagccaagcccgtgacccagatcgtgtctgccgaagcctggggcagagccgattgcggctttaccagcgagagctaccagcagggcgtgctgagcgccaccatcctgtacgagatcctgctgggcaaggccaccctgtacgccgtgctggtgtctgccctggtgctgatggctatggtcaagcggaaggacagccggggaagggccaagcgatctggatctggagcaacaaacttctcactactcaaacaagcaggtgacgtggaggagaatcccgggcctactagtatggactggatttggcgcatccttttccttgtcggcgctgctaccggcgcgcattccttcgaacaactccagctgcaagagtctggccctggcctggtcaagcctagcgaaacactgagcctgacctgtaccgtgtctggcggctctatcagctccggcagctatttctggggctggatcagacaacctcctggcaaaggactggaatggatcggctccatctactacagcggcatcacctactacaaccccagcctgaagtccagagtgaccatctccgtggacaccagcaagaaccagttctccctgaagctgagcagcgtgacagccgccgataccgccgtgtattattgtgccagacatgacggcgctatggccggcctgtttgattattggggacagggcaccctggtcaccgtgtcatctgctacgcgtatccagaaccctgatcctgccgtgtaccagctgcgggatagcaagagcagcgacaagagcgtgtgtctgttcaccgacttcgacagccagaccaacgtgtcccagagcaaggactccgacgtgtacatcaccgataagtgcgtgctggacatgcggagcatggacttcaagagcaactccgccgtggcctggtccaacaagtccgatttcgcctgcgccaacgccttcaacaacagcattatccccgaggacacattcttcccaagccccgagagcagctgcgacgtgaagctggtggaaaagagcttcgagacagacaccaacctgaacttccagaacctgagcgtgatcggcttcagaatcctgctgctgaaagtggccggctttaacctgctgatgaccctgcggctgtggtccagc

SEQ ID NO: 7556 - DNA, 2544 bp, Artificial Sequence
  Synthetic Polynucloetide
atggccttaccagtgaccgccttgctcctgccgctggccttgctgctccacgccgccaggccgagctacgtgctgacacagcctccatccgtgtctgtggctccaggacagaccgccagaatcacatgcggcggcaacaacatcggcagcaagagcgtgcactggtatcagcagccacctggacaggctccagtggtggtggtgtacgacgacagcgatagacctagcggcatccccgagagattcagcggcagcaattccggcaataccgccacactgaccatcagcagagtggaagctggcgacgaggccgtgtactactgccaagtgtgggacagcagcagcgatcacgtggtgtttggcggcggaacaaagctgacagtgcttctcgaggacctgaagaacgtgttcccacctgaggtggccgtgttcgagcctagcgaggccgagatcagccacacccagaaagccaccctcgtgtgcctggctaccggcttctaccccgaccatgtggaactgtcttggtgggtcaacggcaaagaggtgcacagcggcgtgtgtaccgacccccagccactgaaagaacagcccgccctgaacgacagccggtactgcctgagcagcagactgagagtgtccgccaccttctggcagaacccccggaaccacttcagatgccaggtgcagttctacggcctgagcgagaacgacgagtggacccaggacagagccaagcccgtgacccagatcgtgtctgccgaagcctggggcagagccgattgcggctttaccagcgagagctaccagcagggcgtgctgagcgccaccatcctgtacgagatcctgctgggcaaggccaccctgtacgccgtgctggtgtctgccctggtgctgatggctatggtcaagcggaaggacagccggggaagggccaagcgatctggatctggagcaacaaacttctcactactcaaacaagcaggtgacgtggaggagaatcccgggcctactagtatggactggatttggcgcatccttttccttgtcggcgctgctaccggcgcgcattccttcgaacaactccagctgcaagagtctggccctggcctggtcaagcctagcgaaacactgagcctgacctgtaccgtgtctggcggctctatcagctccggcagctatttctggggctggatcagacaacctcctggcaaaggactggaatggatcggctccatctactacagcggcatcacctactacaaccccagcctgaagtccagagtgaccatctccgtggacaccagcaagaaccagttctccctgaagctgagcagcgtgacagccgccgataccgccgtgtattattgtgccagacatgacggcgctatggccggcctgtttgattattggggacagggcaccctggtcaccgtgtcatctgctacgcgtatccagaaccctgatcctgccgtgtaccagctgcgggatagcaagagcagcgacaagagcgtgtgtctgttcaccgacttcgacagccagaccaacgtgtcccagagcaaggactccgacgtgtacatcaccgataagtgcgtgctggacatgcggagcatggacttcaagagcaactccgccgtggcctggtccaacaagtccgatttcgcctgcgccaacgccttcaacaacagcattatccccgaggacacattcttcccaagccccgagagcagctgcgacgtgaagctggtggaaaagagcttcgagacagacaccaacctgaacttccagaacctgagcgtgatcggcttcagaatcctgctgctgaaagtggccggctttaacctgctgatgaccctgcggctgtggtccagccgcgccaagagaagcggatctggcgtgaagcagaccctgaatttcgacctgctgaagctggctggcgacgtggaatccaacccaggcccttctagaggcgggatccacaccatggctacctacgaggtgctgtgcgaggtggcaagaaagctgggcaccgacgacagagaagtggtgctgttcctgctgaacgtgttcatccctcagcctacactggcccagctgatcggtgcactgagagccctgaaagaggaaggccggctgacctttcctctgctggccgaatgcctgttcagagccggaagaagggatctgctgcgggacctgctgcatctggaccccagatttctggaaagacacctggccggcaccatgagctacttcagcccttaccagctgaccgtgctgcacgttgacggcgaactgtgcgccagagatattcggagcctgatcttcctgagcaaggacaccatcggcagccggtctacccctcagacatttctgcactgggtgtactgcatggaaaacctggacctgctcggccccacagatgtggatgccctgatgtccatgctgagaagcctgagcagagtggacctccagagacaggtgcagacactgatgggactgcacctgagcggacctagccacagccagcactacagacacacccct

SEQ ID NO: 7557 - DNA, 1881 bp, Artificial Sequence
  Synthetic Polynucloetide
atggccttaccagtgaccgccttgctcctgccgctggccttgctgctccacgccgccaggccgagctacgtgctgacacagcctccatccgtgtctgtggctccaggacagaccgccagaatcacatgcggcggcaacaacatcggcagcaagagcgtgcactggtatcagcagccacctggacaggctccagtggtggtggtgtacgacgacagcgatagacctagcggcatccccgagagattcagcggcagcaattccggcaataccgccacactgaccatcagcagagtggaagctggcgacgaggccgtgtactactgccaagtgtgggacagcagcagcgatcacgtggtgtttggcggcggaacaaagctgacagtgcttctcgagatccagaaccctgatcctgccgtgtaccagctgcgggatagcaagagcagcgacaagagcgtgtgtctgttcaccgacttcgacagccagaccaacgtgtcccagagcaaggactccgacgtgtacatcaccgataagtgcgtgctggacatgcggagcatggacttcaagagcaactccgccgtggcctggtccaacaagtccgatttcgcctgcgccaacgccttcaacaacagcattatccccgaggacacattcttcccaagccccgagagcagctgcgacgtgaagctggtggaaaagagcttcgagacagacaccaacctgaacttccagaacctgagcgtgatcggcttcagaatcctgctgctgaaagtggccggctttaacctgctgatgaccctgcggctgtggtccagccgcgccaagagaagcggatctggcgtgaagcagaccctgaatttcgacctgctgaagctggctggcgacgtggaatccaacccaggccctactagtatggactggatttggcgcatccttttccttgtcggcgctgctaccggcgcgcattccttcgaacaactccagctgcaagagtctggccctggcctggtcaagcctagcgaaacactgagcctgacctgtaccgtgtctggcggctctatcagctccggcagctatttctggggctggatcagacaacctcctggcaaaggactggaatggatcggctccatctactacagcggcatcacctactacaaccccagcctgaagtccagagtgaccatctccgtggacaccagcaagaaccagttctccctgaagctgagcagcgtgacagccgccgataccgccgtgtattattgtgccagacatgacggcgctatggccggcctgtttgattattggggacagggcaccctggtcaccgtgtcatctgctacgcgtgaggacctgaagaacgtgttcccacctgaggtggccgtgttcgagcctagcgaggccgagatcagccacacccagaaagccaccctcgtgtgcctggctaccggcttctaccccgaccatgtggaactgtcttggtgggtcaacggcaaagaggtgcacagcggcgtgtgtaccgacccccagccactgaaagaacagcccgccctgaacgacagccggtactgcctgagcagcagactgagagtgtccgccaccttctggcagaacccccggaaccacttcagatgccaggtgcagttctacggcctgagcgagaacgacgagtggacccaggacagagccaagcccgtgacccagatcgtgtctgccgaagcctggggcagagccgattgcggctttaccagcgagagctaccagcagggcgtgctgagcgccaccatcctgtacgagatcctgctgggcaaggccaccctgtacgccgtgctggtgtctgccctggtgctgatggctatggtcaagcggaaggacagccgggga

SEQ ID NO: 7558 - DNA, 2547 bp, Artificial Sequence
  Synthetic Polynucloetide
atggccttaccagtgaccgccttgctcctgccgctggccttgctgctccacgccgccaggccgagctacgtgctgacacagcctccatccgtgtctgtggctccaggacagaccgccagaatcacatgcggcggcaacaacatcggcagcaagagcgtgcactggtatcagcagccacctggacaggctccagtggtggtggtgtacgacgacagcgatagacctagcggcatccccgagagattcagcggcagcaattccggcaataccgccacactgaccatcagcagagtggaagctggcgacgaggccgtgtactactgccaagtgtgggacagcagcagcgatcacgtggtgtttggcggcggaacaaagctgacagtgcttctcgagatccagaaccctgatcctgccgtgtaccagctgcgggatagcaagagcagcgacaagagcgtgtgtctgttcaccgacttcgacagccagaccaacgtgtcccagagcaaggactccgacgtgtacatcaccgataagtgcgtgctggacatgcggagcatggacttcaagagcaactccgccgtggcctggtccaacaagtccgatttcgcctgcgccaacgccttcaacaacagcattatccccgaggacacattcttcccaagccccgagagcagctgcgacgtgaagctggtggaaaagagcttcgagacagacaccaacctgaacttccagaacctgagcgtgatcggcttcagaatcctgctgctgaaagtggccggctttaacctgctgatgaccctgcggctgtggtccagccgcgccaagagaagcggatctggcgtgaagcagaccctgaatttcgacctgctgaagctggctggcgacgtggaatccaacccaggccctactagtatggactggatttggcgcatccttttccttgtcggcgctgctaccggcgcgcattccttcgaacaactccagctgcaagagtctggccctggcctggtcaagcctagcgaaacactgagcctgacctgtaccgtgtctggcggctctatcagctccggcagctatttctggggctggatcagacaacctcctggcaaaggactggaatggatcggctccatctactacagcggcatcacctactacaaccccagcctgaagtccagagtgaccatctccgtggacaccagcaagaaccagttctccctgaagctgagcagcgtgacagccgccgataccgccgtgtattattgtgccagacatgacggcgctatggccggcctgtttgattattggggacagggcaccctggtcaccgtgtcatctgctacgcgtgaggacctgaagaacgtgttcccacctgaggtggccgtgttcgagcctagcgaggccgagatcagccacacccagaaagccaccctcgtgtgcctggctaccggcttctaccccgaccatgtggaactgtcttggtgggtcaacggcaaagaggtgcacagcggcgtgtgtaccgacccccagccactgaaagaacagcccgccctgaacgacagccggtactgcctgagcagcagactgagagtgtccgccaccttctggcagaacccccggaaccacttcagatgccaggtgcagttctacggcctgagcgagaacgacgagtggacccaggacagagccaagcccgtgacccagatcgtgtctgccgaagcctggggcagagccgattgcggctttaccagcgagagctaccagcagggcgtgctgagcgccaccatcctgtacgagatcctgctgggcaaggccaccctgtacgccgtgctggtgtctgccctggtgctgatggctatggtcaagcggaaggacagccggggaagggccaagcgatctggatctggagcaacaaacttctcactactcaaacaagcaggtgacgtggaggagaatcccgggccttctagaggcgggatccacaccatggctacctacgaggtgctgtgcgaggtggcaagaaagctgggcaccgacgacagagaagtggtgctgttcctgctgaacgtgttcatccctcagcctacactggcccagctgatcggtgcactgagagccctgaaagaggaaggccggctgacctttcctctgctggccgaatgcctgttcagagccggaagaagggatctgctgcgggacctgctgcatctggaccccagatttctggaaagacacctggccggcaccatgagctacttcagcccttaccagctgaccgtgctgcacgttgacggcgaactgtgcgccagagatattcggagcctgatcttcctgagcaaggacaccatcggcagccggtctacccctcagacatttctgcactgggtgtactgcatggaaaacctggacctgctcggccccacagatgtggatgccctgatgtccatgctgagaagcctgagcagagtggacctccagagacaggtgcagacactgatgggactgcacctgagcggacctagccacagccagcactacagacacacccct

SEQ ID NO: 7559 - DNA, 2706 bp, Artificial Sequence
  Synthetic Polynucloetide
atggccttaccagtgaccgccttgctcctgccgctggccttgctgctccacgccgccaggccgctcgaggggaaaccaattcccaaccctcttctgggactggattcaaccggcagcggcgaggacctgaagaacgtgttcccacctgaggtggccgtgttcgagcctagcaaggccgagatcgcccacacccagaaagccaccctcgtgtgcctggctaccggcttctaccccgaccatgtggaactgtcttggtgggtcaacggcaaagaggtgcacagcggcgtgtgtaccgacccccagccactgaaagaacagcccgccctgaacgacagccggtactgcctgagcagcagactgagagtgtccgccaccttctggcagaacccccggaaccacttcagatgccaggtgcagttctacggcctgagcgagaacgacgagtggacccaggacagagccaagcccgtgacccagatcgtgtctgccgaagcctggggcagagccgattgcggcatcaccagcgccagctaccaccagggcgtgctgagcgccaccatcctgtacgagatcctgctgggcaaggccaccctgtacgccgtgctggtgtctgccctggtgctgatggctatggtcaagcggaaggacagccggggaagggccaagcgatctggatctggagcaacaaacttctcactactcaaacaagcaggtgacgtggaggagaatcccgggcctactagcatggccttaccagtgaccgccttgctcctgccgctggccttgctgctccacgccgccaggccgagctacgtgctgacacagcctccatccgtgtctgtggctccaggacagaccgccagaatcacatgcggcggcaacaacatcggcagcaagagcgtgcactggtatcagcagccacctggacaggctccagtggtggtggtgtacgacgacagcgatagacctagcggcatccccgagagattcagcggcagcaattccggcaataccgccacactgaccatcagcagagtggaagctggcgacgaggccgtgtactactgccaagtgtgggacagcagcagcgatcacgtggtgtttggcggcggaacaaagctgacagtgcttggcggaggcggaagtggaggcggaggatctggcggcggaggctctcaactccagctgcaagagtctggccctggcctggtcaagcctagcgaaacactgagcctgacctgtaccgtgtctggcggctctatcagctccggcagctatttctggggctggatcagacaacctcctggcaaaggactggaatggatcggctccatctactacagcggcatcacctactacaaccccagcctgaagtccagagtgaccatctccgtggacaccagcaagaaccagttctccctgaagctgagcagcgtgacagccgccgataccgccgtgtattattgtgccagacatgacggcgctatggccggcctgtttgattattggggacagggcaccctggtcaccgtgtcatctgctacgcgtgagcagaaactgatctcggaagaggatgggagcggcatccagaaccctgatcctgccgtgtaccagctgcgggatagcaagagcagcgacaagagcgtgtgtctgttcaccgacttcgacagccagaccaacgtgtcccagagcaaggactccgacgtgtacatcaccgataagtgcgtgctggacatgcggagcatggacttcaagagcaactccgccgtggcctggtccaacaagtccgatttcgcctgcgccaacgccttcaacaacagcattatccccgaggacacattcttcccaagcagcgacgtgccctgcgacgtgaagctggtggaaaagagcttcgagacagacaccaacctgaacttccagaacctgagcgtgatcggcttcagaatcctgctgctgaaagtggccggctttaacctgctgatgaccctgcggctgtggtccagccgcgccaagagaagcggatctggcgtgaagcagaccctgaatttcgacctgctgaagctggctggcgacgtggaatccaacccaggcccttctagaggccatatgaccgagtacaagcccacggtgcgcctcgccacccgcgacgacgtccccagggccgtacgcaccctcgccgccgcgttcgccgactaccccgccacgcgccacaccgtcgatccggaccgccacatcgagcgggtcaccgagctgcaagaactcttcctcacgcgcgtcgggctcgacatcggcaaggtgtgggtcgcggacgacggcgccgcggtggcggtctggaccacgccggagagcgtcgaagcgggggcggtgttcgccgagatcggcccgcgcatggccgagttgagcggttcccggctggccgcgcagcaacagatggaaggcctcctggcgccgcaccggcccaaggagcccgcgtggttcctggccaccgtcggcgtctcgcccgaccaccagggcaagggtctgggcagcgccgtcgtgctccccggagtggaggcggccgagcgcgccggggtgcccgccttcctggagacctccgcgccccgcaacctccccttctacgagcggctcggcttcaccgtcaccgccgacgtcgaggtgcccgaaggaccgcgcacctggtgcatgacccgcaagcccggtgcctga

SEQ ID NO: 7560 - DNA, 2709 bp, Artificial Sequence
  Synthetic Polynucloetide
atggccttaccagtgaccgccttgctcctgccgctggccttgctgctccacgccgccaggccgctcgagcagaaactgatctcggaagaggatctgggctccggcgatcgccctgatcctgccgtgtaccagctgcgggatagcaagagcagcgacaagagcgtgtgtctgttcaccgacttcgacagccagaccaacgtgtcccagagcaaggactccgacgtgtacatcaccgataagtgcgtgctggacatgcggagcatggacttcaagagcaactccgccgtggcctggtccaacaagtccgatttcgcctgcgccaacgccttcaacaacagcattatccccgaggacacattcttcccaagccccgagagcagctgcgacgtgaagctggtggaaaagagcttcgagacagacaccaacctgaacttccagaacctgagcgtgatcggcttcagaatcctgctgctgaaagtggccggctttaacctgctgatgaccctgcggctgtggtccagctctagtcgcgccaagagaagcggatctggcgtgaagcagaccctgaatttcgacctgctgaagctggctggcgacgtggaatccaacccaggccccactagcatggccttaccagtgaccgccttgctcctgccgctggccttgctgctccacgccgccaggccgagctacgtgctgacacagcctccatccgtgtctgtggctccaggacagaccgccagaatcacatgcggcggcaacaacatcggcagcaagagcgtgcactggtatcagcagccacctggacaggctccagtggtggtggtgtacgacgacagcgatagacctagcggcatccccgagagattcagcggcagcaattccggcaataccgccacactgaccatcagcagagtggaagctggcgacgaggccgtgtactactgccaagtgtgggacagcagcagcgatcacgtggtgtttggcggcggaacaaagctgacagtgcttggcggaggcggaagtggaggcggaggatctggcggcggaggctctcaactccagctgcaagagtctggccctggcctggtcaagcctagcgaaacactgagcctgacctgtaccgtgtctggcggctctatcagctccggcagctatttctggggctggatcagacaacctcctggcaaaggactggaatggatcggctccatctactacagcggcatcacctactacaaccccagcctgaagtccagagtgaccatctccgtggacaccagcaagaaccagttctccctgaagctgagcagcgtgacagccgccgataccgccgtgtattattgtgccagacatgacggcgctatggccggcctgtttgattattggggacagggcaccctggtcaccgtgtcatctgctacgcgtgggaaaccaattcccaaccctcttctgggactggattcaaccggcagcggcgaggacctgaagaacgtgttcccacctgaggtggccgtgttcgagcctagcgaggccgagatcagccacacccagaaagccaccctcgtgtgcctggctaccggcttctaccccgaccatgtggaactgtcttggtgggtcaacggcaaagaggtgcacagcggcgtgtgtaccgacccccagccactgaaagaacagcccgccctgaacgacagccggtactgcctgagcagcagactgagagtgtccgccaccttctggcagaacccccggaaccacttcagatgccaggtgcagttctacggcctgagcgagaacgacgagtggacccaggacagagccaagcccgtgacccagatcgtgtctgccgaagcctggggcagagccgattgcggctttaccagcgagagctaccagcagggcgtgctgagcgccaccatcctgtacgagatcctgctgggcaaggccaccctgtacgccgtgctggtgtctgccctggtgctgatggctatggtcaagcggaaggacagccggggaagggccaagcgatctggatctggagcaacaaacttctcactactcaaacaagcaggtgacgtggaggagaatcccgggccttctagaggccatatgaccgagtacaagcccacggtgcgcctcgccacccgcgacgacgtccccagggccgtacgcaccctcgccgccgcgttcgccgactaccccgccacgcgccacaccgtcgatccggaccgccacatcgagcgggtcaccgagctgcaagaactcttcctcacgcgcgtcgggctcgacatcggcaaggtgtgggtcgcggacgacggcgccgcggtggcggtctggaccacgccggagagcgtcgaagcgggggcggtgttcgccgagatcggcccgcgcatggccgagttgagcggttcccggctggccgcgcagcaacagatggaaggcctcctggcgccgcaccggcccaaggagcccgcgtggttcctggccaccgtcggcgtctcgcccgaccaccagggcaagggtctgggcagcgccgtcgtgctccccggagtggaggcggccgagcgcgccggggtgcccgccttcctggagacctccgcgccccgcaacctccccttctacgagcggctcggcttcaccgtcaccgccgacgtcgaggtgcccgaaggaccgcgcacctggtgcatgacccgcaagcccggtgcctga

SEQ ID NO: 7561 - DNA, 2571 bp, Artificial Sequence
  Synthetic Polynucloetide
atggccttaccagtgaccgccttgctcctgccgctggccttgctgctccacgccgccaggccgagctacgtgctgacacagcctccatccgtgtctgtggctccaggacagaccgccagaatcacatgcggcggcaacaacatcggcagcaagagcgtgcactggtatcagcagccacctggacaggctccagtggtggtggtgtacgacgacagcgatagacctagcggcatccccgagagattcagcggcagcaattccggcaataccgccacactgaccatcagcagagtggaagctggcgacgaggccgtgtactactgccaagtgtgggacagcagcagcgatcacgtggtgtttggcggcggaacaaagctgacagtgcttctcgaggacctgaagaacgtgttcccacctgaggtggccgtgttcgagcctagcgaggccgagatcagccacacccagaaagccaccctcgtgtgcctggctaccggcttctaccccgaccatgtggaactgtcttggtgggtcaacggcaaagaggtgcacagcggcgtgtctaccgacccccagccactgaaagaacagcccgccctgaacgacagccggtactgcctgagcagcagactgagagtgtccgccaccttctggcagaacccccggaaccacttcagatgccaggtgcagttctacggcctgagcgagaacgacgagtggacccaggacagagccaagcccgtgacccagatcgtgtctgccgaagcctggggcagagccgattgcggctttaccagcgagagctaccagcagggcgtgctgagcgccaccatcctgtacgagatcctgctgggcaaggccaccctgtacgccgtgctggtgtctgccctggtgctgatggctatggtcaagcggaaggacagccggggaagggccaagcgatctggatctggagcaacaaacttctcactactcaaacaagcaggtgacgtggaggagaatcccgggcctactagtatggactggatttggcgcatccttttccttgtcggcgctgctaccggcgcgcattccttcgaacaactccagctgcaagagtctggccctggcctggtcaagcctagcgaaacactgagcctgacctgtaccgtgtctggcggctctatcagctccggcagctatttctggggctggatcagacaacctcctggcaaaggactggaatggatcggctccatctactacagcggcatcacctactacaaccccagcctgaagtccagagtgaccatctccgtggacaccagcaagaaccagttctccctgaagctgagcagcgtgacagccgccgataccgccgtgtattattgtgccagacatgacggcgctatggccggcctgtttgattattggggacagggcaccctggtcaccgtgtcatctgctacgcgtatccagaaccctgatcctgccgtgtaccagctgcgggatagcaagagcagcgacaagagcgtgtgtctgttcaccgacttcgacagccagaccaacgtgtcccagagcaaggactccgacgtgtacatcaccgataagaccgtgctggacatgcggagcatggacttcaagagcaactccgccgtggcctggtccaacaagtccgatttcgcctgcgccaacgccttcaacaacagcattatccccgaggacacattcttcccaagccccgagagcagctgcgacgtgaagctggtggaaaagagcttcgagacagacaccaacctgaacttccagaacctgagcgtgatcggcttcagaatcctgctgctgaaagtggccggctttaacctgctgatgaccctgcggctgtggtccagccgcgccaagagaagcggatctggcgtgaagcagaccctgaatttcgacctgctgaagctggctggcgacgtggaatccaacccaggcccttctagaggccatatgaccgagtacaagcccacggtgcgcctcgccacccgcgacgacgtccccagggccgtacgcaccctcgccgccgcgttcgccgactaccccgccacgcgccacaccgtcgatccggaccgccacatcgagcgggtcaccgagctgcaagaactcttcctcacgcgcgtcgggctcgacatcggcaaggtgtgggtcgcggacgacggcgccgcggtggcggtctggaccacgccggagagcgtcgaagcgggggcggtgttcgccgagatcggcccgcgcatggccgagttgagcggttcccggctggccgcgcagcaacagatggaaggcctcctggcgccgcaccggcccaaggagcccgcgtggttcctggccaccgtcggcgtctcgcccgaccaccagggcaagggtctgggcagcgccgtcgtgctccccggagtggaggcggccgagcgcgccggggtgcccgccttcctggagacctccgcgccccgcaacctccccttctacgagcggctcggcttcaccgtcaccgccgacgtcgaggtgcccgaaggaccgcgcacctggtgcatgacccgcaagcccggtgcctga

SEQ ID NO: 7562 - DNA, 2817 bp, Artificial Sequence
  Synthetic Polynucloetide
atggccttaccagtgaccgccttgctcctgccgctggccttgctgctccacgccgccaggccgagctacgtgctgacacagcctccatccgtgtctgtggctccaggacagaccgccagaatcacatgcggcggcaacaacatcggcagcaagagcgtgcactggtatcagcagccacctggacaggctccagtggtggtggtgtacgacgacagcgatagacctagcggcatccccgagagattcagcggcagcaattccggcaataccgccacactgaccatcagcagagtggaagctggcgacgaggccgtgtactactgccaagtgtgggacagcagcagcgatcacgtggtgtttggcggcggaacaaagctgacagtgcttctcgaggacctgaagaacgtgttcccacctgaggtggccgtgttcgagcctagcgaggccgagatcagccacacccagaaagccaccctcgtgtgcctggctaccggcttctaccccgaccatgtggaactgtcttggtgggtcaacggcaaagaggtgcacagcggcgtgtctaccgacccccagccactgaaagaacagcccgccctgaacgacagccggtactgcctgagcagcagactgagagtgtccgccaccttctggcagaacccccggaaccacttcagatgccaggtgcagttctacggcctgagcgagaacgacgagtggacccaggacagagccaagcccgtgacccagatcgtgtctgccgaagcctggggcagagccgattgcggctttaccagcgagagctaccagcagggcgtgctgagcgccaccatcctgtacgagatcctgctgggcaaggccaccctgtacgccgtgctggtgtctgccctggtgctgatggctatggtcaagcggaaggacagccggggaagggccaagcgatctggatctggagcaacaaacttctcactactcaaacaagcaggtgacgtggaggagaatcccgggcctactagtatggactggatttggcgcatccttttccttgtcggcgctgctaccggcgcgcattccttcgaacaactccagctgcaagagtctggccctggcctggtcaagcctagcgaaacactgagcctgacctgtaccgtgtctggcggctctatcagctccggcagctatttctggggctggatcagacaacctcctggcaaaggactggaatggatcggctccatctactacagcggcatcacctactacaaccccagcctgaagtccagagtgaccatctccgtggacaccagcaagaaccagttctccctgaagctgagcagcgtgacagccgccgataccgccgtgtattattgtgccagacatgacggcgctatggccggcctgtttgattattggggacagggcaccctggtcaccgtgtcatctgctacgcgtgagcagaaactgatctcggaagaggatgggagcggcaccccattcccttctctggcccctcccatcatgctgctggtggacggcaagcagcagatggtggtcgtgtgcctggtgctggatgtggccccacctggactggacagccccatctggtttagcgccggcaatggctctgccctggacgcctttacctacggcccaagccctgccaccgatggcacctggacaaatctggcccacctgagcctgcccagcgaggaactggcttcttgggagcctctcgtgtgccacacaggacctggcgctgagggacacagcagatccacccagcctatgcacctgtctggcgaggccagcaccgccagaacctgtcctcaggaacctctgagaggcacccctggcggagcactgtggctgggagtgctgagactgctgctgttcaagctgctgctgtttgacctgctgctgacctgctcctgtctgtgcgatcctgccggccctctgccttctcctgccaccaccacaagactgagagccctgggcagccacagactgcaccctgccacagagacaggcggcagagaggccacaagcagccctagaccccagcccagagacagaagatggggcgataccccccctggcagaaagcctggatctccagtccgcgccaagagaagcggatctggcgtgaagcagaccctgaatttcgacctgctgaagctggctggcgacgtggaatccaacccaggcccttctagaggccatatgaccgagtacaagcccacggtgcgcctcgccacccgcgacgacgtccccagggccgtacgcaccctcgccgccgcgttcgccgactaccccgccacgcgccacaccgtcgatccggaccgccacatcgagcgggtcaccgagctgcaagaactcttcctcacgcgcgtcgggctcgacatcggcaaggtgtgggtcgcggacgacggcgccgcggtggcggtctggaccacgccggagagcgtcgaagcgggggcggtgttcgccgagatcggcccgcgcatggccgagttgagcggttcccggctggccgcgcagcaacagatggaaggcctcctggcgccgcaccggcccaaggagcccgcgtggttcctggccaccgtcggcgtctcgcccgaccaccagggcaagggtctgggcagcgccgtcgtgctccccggagtggaggcggccgagcgcgccggggtgcccgccttcctggagacctccgcgccccgcaacctccccttctacgagcggctcggcttcaccgtcaccgccgacgtcgaggtgcccgaaggaccgcgcacctggtgcatgacccgcaagcccggtgcctga

SEQ ID NO: 7563 - DNA, 2871 bp, Artificial Sequence
  Synthetic Polynucloetide
atggccttaccagtgaccgccttgctcctgccgctggccttgctgctccacgccgccaggccgctcgaggacctgaagaacgtgttcccacctgaggtggccgtgttcgagcctagcgaggccgagatcagccacacccagaaagccaccctcgtgtgcctggctaccggcttctaccccgaccatgtggaactgtcttggtgggtcaacggcaaagaggtgcacagcggcgtgtctaccgacccccagccactgaaagaacagcccgccctgaacgacagccggtactgcctgagcagcagactgagagtgtccgccaccttctggcagaacccccggaaccacttcagatgccaggtgcagttctacggcctgagcgagaacgacgagtggacccaggacagagccaagcccgtgacccagatcgtgtctgccgaagcctggggcagagccgattgcggctttaccagcgagagctaccagcagggcgtgctgagcgccaccatcctgtacgagatcctgctgggcaaggccaccctgtacgccgtgctggtgtctgccctggtgctgatggctatggtcaagcggaaggacagccggggaagggccaagcgatctggatctggagcaacaaacttctcactactcaaacaagcaggtgacgtggaggagaatcccgggcctactagcatggccttaccagtgaccgccttgctcctgccgctggccttgctgctccacgccgccaggccgagctacgtgctgacacagcctccatccgtgtctgtggctccaggacagaccgccagaatcacatgcggcggcaacaacatcggcagcaagagcgtgcactggtatcagcagccacctggacaggctccagtggtggtggtgtacgacgacagcgatagacctagcggcatccccgagagattcagcggcagcaattccggcaataccgccacactgaccatcagcagagtggaagctggcgacgaggccgtgtactactgccaagtgtgggacagcagcagcgatcacgtggtgtttggcggcggaacaaagctgacagtgcttggcggaggcggaagtggaggcggaggatctggcggcggaggctctcaactccagctgcaagagtctggccctggcctggtcaagcctagcgaaacactgagcctgacctgtaccgtgtctggcggctctatcagctccggcagctatttctggggctggatcagacaacctcctggcaaaggactggaatggatcggctccatctactacagcggcatcacctactacaaccccagcctgaagtccagagtgaccatctccgtggacaccagcaagaaccagttctccctgaagctgagcagcgtgacagccgccgataccgccgtgtattattgtgccagacatgacggcgctatggccggcctgtttgattattggggacagggcaccctggtcaccgtgtcatctgctacgcgtgagcagaaactgatctcggaagaggatctggggagcggcaccccattcccttctctggcccctcccatcatgctgctggtggacggcaagcagcagatggtggtcgtgtgcctggtgctggatgtggccccacctggactggacagccccatctggtttagcgccggcaatggctctgccctggacgcctttacctacggcccaagccctgccaccgatggcacctggacaaatctggcccacctgagcctgcccagcgaggaactggcttcttgggagcctctcgtgtgccacacaggacctggcgctgagggacacagcagatccacccagcctatgcacctgtctggcgaggccagcaccgccagaacctgtcctcaggaacctctgagaggcacccctggcggagcactgtggctgggagtgctgagactgctgctgttcaagctgctgctgtttgacctgctgctgacctgctcctgtctgtgcgatcctgccggccctctgccttctcctgccaccaccacaagactgagagccctgggcagccacagactgcaccctgccacagagacaggcggcagagaggccacaagcagccctagaccccagcccagagacagaagatggggcgataccccccctggcagaaagcctggatctccagtccgcgccaagagaagcggatctggcgtgaagcagaccctgaatttcgacctgctgaagctggctggcgacgtggaatccaacccaggcccttctagatctagaggccatatgaccgagtacaagcccacggtgcgcctcgccacccgcgacgacgtccccagggccgtacgcaccctcgccgccgcgttcgccgactaccccgccacgcgccacaccgtcgatccggaccgccacatcgagcgggtcaccgagctgcaagaactcttcctcacgcgcgtcgggctcgacatcggcaaggtgtgggtcgcggacgacggcgccgcggtggcggtctggaccacgccggagagcgtcgaagcgggggcggtgttcgccgagatcggcccgcgcatggccgagttgagcggttcccggctggccgcgcagcaacagatggaaggcctcctggcgccgcaccggcccaaggagcccgcgtggttcctggccaccgtcggcgtctcgcccgaccaccagggcaagggtctgggcagcgccgtcgtgctccccggagtggaggcggccgagcgcgccggggtgcccgccttcctggagacctccgcgccccgcaacctccccttctacgagcggctcggcttcaccgtcaccgccgacgtcgaggtgcccgaaggaccgcgcacctggtgcatgacccgcaagcccggtgcctga

SEQ ID NO: 7564 - DNA, 2682 bp, Artificial Sequence
  Synthetic Polynucloetide
atggccttaccagtgaccgccttgctcctgccgctggccttgctgctccacgccgccaggccgagctacgtgctgacacagcctccatccgtgtctgtggctccaggacagaccgccagaatcacatgcggcggcaacaacatcggcagcaagagcgtgcactggtatcagcagccacctggacaggctccagtggtggtggtgtacgacgacagcgatagacctagcggcatccccgagagattcagcggcagcaattccggcaataccgccacactgaccatcagcagagtggaagctggcgacgaggccgtgtactactgccaagtgtgggacagcagcagcgatcacgtggtgtttggcggcggaacaaagctgacagtgcttctcgaggggaaaccaattcccaaccctcttctgggactggattcaaccggcagcggcgacaagcagctggacgccgacgtgtcccccaagcctaccatcttcctgccctctatcgccgagacaaagctccagaaggccggcacctacctgtgcctgctggaaaagttcttcccagatgtgattaagatccactggcaggaaaagaagtccaacaccatcctgggcagccaggaaggcaacaccatgaagaccaacgacacctacatgaagttcagctggctgaccgtgcccgagaagtccctggacaaagaacacagatgcatcgtgcggcacgaaaacaacaagaacggcgtggaccaggaaatcatcttcccacccatcaagaccgatgtgattacaatggaccccaaggacaactgctccaaggacgccaacgataccctgctgctccagctgaccaacaccagcgcctactacatgtacttgttgctgctgctgaagtccgtggtgtacttcgccatcatcacatgctgcctgctgcggagaaccgccttctgctgcaacggcgagaagtctagggccaagcgatctggatctggagcaacaaacttctcactactcaaacaagcaggtgacgtggaggagaatcccgggcctactagtatggactggatttggcgcatccttttccttgtcggcgctgctaccggcgcgcattccttcgaacaactccagctgcaagagtctggccctggcctggtcaagcctagcgaaacactgagcctgacctgtaccgtgtctggcggctctatcagctccggcagctatttctggggctggatcagacaacctcctggcaaaggactggaatggatcggctccatctactacagcggcatcacctactacaaccccagcctgaagtccagagtgaccatctccgtggacaccagcaagaaccagttctccctgaagctgagcagcgtgacagccgccgataccgccgtgtattattgtgccagacatgacggcgctatggccggcctgtttgattattggggacagggcaccctggtcaccgtgtcatctgctacgcgtgagcagaaactgatctcggaagaggatgggagcggcagccagcctcacaccaagcccagcgtgttcgtgatgaagaacggcaccaacgtggcctgcctcgtgaaagagttctaccccaaggacatcaggatcaacctggtgtccagcaagaagatcaccgagttcgaccccgccatcgtgatctcccccagcggcaagtacaacgccgtgaagctggggaagtacgaggacagcaacagcgtgacctgctccgtgcagcacgacaacaagaccgtgcacagcaccgactttgaagtgaaaaccgactccaccgaccacgtgaagcccaaagagacagagaacaccaagcagcccagcaagagctgccacaagcccaaggccatcgtgcacaccgagaaagtgaacatgatgagcctgaccgtgctgggcctgcggatgctgttcgccaaaaccgtggccgtgaacttcctgctgaccgccaagctgttcttcctccgcgccaagagaagcggatctggcgtgaagcagaccctgaatttcgacctgctgaagctggctggcgacgtggaatccaacccaggcccttctagaggccatatgaccgagtacaagcccacggtgcgcctcgccacccgcgacgacgtccccagggccgtacgcaccctcgccgccgcgttcgccgactaccccgccacgcgccacaccgtcgatccggaccgccacatcgagcgggtcaccgagctgcaagaactcttcctcacgcgcgtcgggctcgacatcggcaaggtgtgggtcgcggacgacggcgccgcggtggcggtctggaccacgccggagagcgtcgaagcgggggcggtgttcgccgagatcggcccgcgcatggccgagttgagcggttcccggctggccgcgcagcaacagatggaaggcctcctggcgccgcaccggcccaaggagcccgcgtggttcctggccaccgtcggcgtctcgcccgaccaccagggcaagggtctgggcagcgccgtcgtgctccccggagtggaggcggccgagcgcgccggggtgcccgccttcctggagacctccgcgccccgcaacctccccttctacgagcggctcggcttcaccgtcaccgccgacgtcgaggtgcccgaaggaccgcgcacctggtgcatgacccgcaagcccggtgcctga

SEQ ID NO: 7565 - DNA, 1893 bp, Artificial Sequence
  Synthetic Polynucloetide
atggccttaccagtgaccgccttgctcctgccgctggccttgctgctccacgccgccaggccgagctacgtgctgacacagcctccatccgtgtctgtggctccaggacagaccgccagaatcacatgcggcggcaacaacatcggcagcaagagcgtgcactggtatcagcagccacctggacaggctccagtggtggtggtgtacgacgacagcgatagacctagcggcatccccgagagattcagcggcagcaattccggcaataccgccacactgaccatcagcagagtggaagctggcgacgaggccgtgtactactgccaagtgtgggacagcagcagcgatcacgtggtgtttggcggcggaacaaagctgacagtgcttctcgagagccagcctcacaccaagcccagcgtgttcgtgatgaagaacggcaccaacgtggcctgcctcgtgaaagagttctaccccaaggacatcaggatcaacctggtgtccagcaagaagatcaccgagttcgaccccgccatcgtgatctcccccagcggcaagtacaacgccgtgaagctggggaagtacgaggacagcaacagcgtgacctgctccgtgcagcacgacaacaagaccgtgcacagcaccgactttgaagtgaaaaccgactccaccgaccacgtgaagcccaaagagacagagaacaccaagcagcccagcaagagctgccacaagcccaaggccatcgtgcacaccgagaaagtgaacatgatgagcctgaccgtgctgggcctgcggatgctgttcgccaaaaccgtggccgtgaacttcctgctgaccgccaagctgttcttcctcagggccaagcgatctggatctggagcaacaaacttctcactactcaaacaagcaggtgacgtggaggagaatcccgggcctactagtatggactggatttggcgcatccttttccttgtcggcgctgctaccggcgcgcattccttcgaacaactccagctgcaagagtctggccctggcctggtcaagcctagcgaaacactgagcctgacctgtaccgtgtctggcggctctatcagctccggcagctatttctggggctggatcagacaacctcctggcaaaggactggaatggatcggctccatctactacagcggcatcacctactacaaccccagcctgaagtccagagtgaccatctccgtggacaccagcaagaaccagttctccctgaagctgagcagcgtgacagccgccgataccgccgtgtattattgtgccagacatgacggcgctatggccggcctgtttgattattggggacagggcaccctggtcaccgtgtcatctgctacgcgtgacaagcagctggacgccgacgtgtcccccaagcctaccatcttcctgccctctatcgccgagacaaagctccagaaggccggcacctacctgtgcctgctggaaaagttcttcccagatgtgattaagatccactggcaggaaaagaagtccaacaccatcctgggcagccaggaaggcaacaccatgaagaccaacgacacctacatgaagttcagctggctgaccgtgcccgagaagtccctggacaaagaacacagatgcatcgtgcggcacgaaaacaacaagaacggcgtggaccaggaaatcatcttcccacccatcaagaccgatgtgattacaatggaccccaaggacaactgctccaaggacgccaacgataccctgctgctccagctgaccaacaccagcgcctactacatgtacttgttgctgctgctgaagtccgtggtgtacttcgccatcatcacatgctgcctgctgcggagaaccgccttctgctgcaacggcgagaagtct

SEQ ID NO: 7566 - DNA, 2727 bp, Artificial Sequence
  Synthetic Polynucloetide
atggccttaccagtgaccgccttgctcctgccgctggccttgctgctccacgccgccaggccgctcgaggggaaaccaattcccaaccctcttctgggactggattcaaccggcagcggcgacaagcagctggacgccgacgtgtcccccaagcctaccatcttcctgccctctatcgccgagacaaagctccagaaggccggcacctacctgtgcctgctggaaaagttcttcccagatgtgattaagatccactggcaggaaaagaagtccaacaccatcctgggcagccaggaaggcaacaccatgaagaccaacgacacctacatgaagttcagctggctgaccgtgcccgagaagtccctggacaaagaacacagatgcatcgtgcggcacgaaaacaacaagaacggcgtggaccaggaaatcatcttcccacccatcaagaccgatgtgattacaatggaccccaaggacaactgctccaaggacgccaacgataccctgctgctccagctgaccaacaccagcgcctactacatgtacttgttgctgctgctgaagtccgtggtgtacttcgccatcatcacatgctgcctgctgcggagaaccgccttctgctgcaacggcgagaagtctagggccaagcgatctggatctggagcaacaaacttctcactactcaaacaagcaggtgacgtggaggagaatcccgggcctactagcatggccttaccagtgaccgccttgctcctgccgctggccttgctgctccacgccgccaggccgagctacgtgctgacacagcctccatccgtgtctgtggctccaggacagaccgccagaatcacatgcggcggcaacaacatcggcagcaagagcgtgcactggtatcagcagccacctggacaggctccagtggtggtggtgtacgacgacagcgatagacctagcggcatccccgagagattcagcggcagcaattccggcaataccgccacactgaccatcagcagagtggaagctggcgacgaggccgtgtactactgccaagtgtgggacagcagcagcgatcacgtggtgtttggcggcggaacaaagctgacagtgcttggcggaggcggaagtggaggcggaggatctggcggcggaggctctcaactccagctgcaagagtctggccctggcctggtcaagcctagcgaaacactgagcctgacctgtaccgtgtctggcggctctatcagctccggcagctatttctggggctggatcagacaacctcctggcaaaggactggaatggatcggctccatctactacagcggcatcacctactacaaccccagcctgaagtccagagtgaccatctccgtggacaccagcaagaaccagttctccctgaagctgagcagcgtgacagccgccgataccgccgtgtattattgtgccagacatgacggcgctatggccggcctgtttgattattggggacagggcaccctggtcaccgtgtcatctgctacgcgtgagcagaaactgatctcggaagaggatgggagcggcagccagcctcacaccaagcccagcgtgttcgtgatgaagaacggcaccaacgtggcctgcctcgtgaaagagttctaccccaaggacatcaggatcaacctggtgtccagcaagaagatcaccgagttcgaccccgccatcgtgatctcccccagcggcaagtacaacgccgtgaagctggggaagtacgaggacagcaacagcgtgacctgctccgtgcagcacgacaacaagaccgtgcacagcaccgactttgaagtgaaaaccgactccaccgaccacgtgaagcccaaagagacagagaacaccaagcagcccagcaagagctgccacaagcccaaggccatcgtgcacaccgagaaagtgaacatgatgagcctgaccgtgctgggcctgcggatgctgttcgccaaaaccgtggccgtgaacttcctgctgaccgccaagctgttcttcctccgcgccaagagaagcggatctggcgtgaagcagaccctgaatttcgacctgctgaagctggctggcgacgtggaatccaacccaggcccttctagaggccatatgaccgagtacaagcccacggtgcgcctcgccacccgcgacgacgtccccagggccgtacgcaccctcgccgccgcgttcgccgactaccccgccacgcgccacaccgtcgatccggaccgccacatcgagcgggtcaccgagctgcaagaactcttcctcacgcgcgtcgggctcgacatcggcaaggtgtgggtcgcggacgacggcgccgcggtggcggtctggaccacgccggagagcgtcgaagcgggggcggtgttcgccgagatcggcccgcgcatggccgagttgagcggttcccggctggccgcgcagcaacagatggaaggcctcctggcgccgcaccggcccaaggagcccgcgtggttcctggccaccgtcggcgtctcgcccgaccaccagggcaagggtctgggcagcgccgtcgtgctccccggagtggaggcggccgagcgcgccggggtgcccgccttcctggagacctccgcgccccgcaacctccccttctacgagcggctcggcttcaccgtcaccgccgacgtcgaggtgcccgaaggaccgcgcacctggtgcatgacccgcaagcccggtgcctga

SEQ ID NO: 7567 - DNA, 3102 bp, Artificial Sequence
  Synthetic Polynucloetide
atggccttaccagtgaccgccttgctcctgccgctggccttgctgctccacgccgccaggccgagctacgtgctgacacagcctccatccgtgtctgtggctccaggacagaccgccagaatcacatgcggcggcaacaacatcggcagcaagagcgtgcactggtatcagcagccacctggacaggctccagtggtggtggtgtacgacgacagcgatagacctagcggcatccccgagagattcagcggcagcaattccggcaataccgccacactgaccatcagcagagtggaagctggcgacgaggccgtgtactactgccaagtgtgggacagcagcagcgatcacgtggtgtttggcggcggaacaaagctgacagtgcttggacagcctaaggccaatcctaccgtgacactgttccctccaagcagcgaagaactccaggccaacaaggccacacttgtgtgcctgatctccgacttctaccctggggctgtgacagtggcttggaaggccgatggatctcctgtgaaagccggcgtggaaaccaccaagccatccaagcagagcaacaacaaatacgccgccagctcctacctgagcctgacacctgagcagtggaagtcccacagatcctacagctgccaagtgacccacgaaggcagcaccgtggaaaagacagtggcccctacagagtgcagcggatcccagagcttcggcctgctggaccccaagctgtgctacctgctggatggcatcctgttcatctacggcgtgatcctgaccgccctgttcctgagagtgaagttcagcagaagcgccgacgcccctgcctaccagcagggacagaaccaactgtacaacgagctgaacctgggcagacgggaagagtacgacgtgctggacaagcggagaggcagggaccctgagatgggcggaaagccccagcggagaaagaacccccaggaaggactgtataacgaactccagaaagacaagatggccgaagcctacagcgagatcggcatgaagggcgagcggagaagaggcaagggccacgatggcctgtaccagggcctgagcaccgccaccaaggacacctatgacgccctgcacatgcaggccctgcctccaagaagggccaagcgatctggatctggagcaacaaacttctcactactcaaacaagcaggtgacgtggaggagaatcccgggcctactagtatggactggatttggcgcatccttttccttgtcggcgctgctaccggcgcgcattccttcgaacaactccagctgcaagagtctggccctggcctggtcaagcctagcgaaacactgagcctgacctgtaccgtgtctggcggctctatcagctccggcagctatttctggggctggatcagacaacctcctggcaaaggactggaatggatcggctccatctactacagcggcatcacctactacaaccccagcctgaagtccagagtgaccatctccgtggacaccagcaagaaccagttctccctgaagctgagcagcgtgacagccgccgataccgccgtgtattattgtgccagacatgacggcgctatggccggcctgtttgattattggggacagggcaccctggtcaccgtgtcatctgctgcctctacaaagggaccctccgtgtttcctctggctcccagcagcaagtctacaagcggaggaacagccgctctgggctgcctggtcaaggattactttcccgagcctgtgaccgtgtcctggaatagcggagcactgacaagcggcgtgcacacctttccagccgtgctgcaaagcagcggcctgtactctctgagcagcgtggtcacagtgcctagctctagcctgggcacccagacctacatctgcaatgtgaaccacaagcctagcaacaccaaggtggacaagagagtggaacccaagagctgtggtacccagagttttgggttgttggaccctaaattgtgctatctgttggacggaatcctgttcatttacggagtgatcctgaccgcattgttcctgcgggttaagttttccagatccgcagacgcacccgcttaccaacaagggcagaaccaactctacaatgaacttaatttggggcggagggaagagtacgacgttctggacaaaaggaggggacgagatcccgagatgggcggaaagcctcagcgaaggaagaatccgcaagaggggctttataacgaactccagaaagataaaatggcagaagcctatagtgagattgggatgaagggagaaaggaggaggggtaaaggtcacgatgggttgtaccaaggattgagcacagccactaaagatacctatgatgcgctccacatgcaggccctgccgccaagacgcgccaagagaagcggatctggcgtgaagcagaccctgaatttcgacctgctgaagctggctggcgacgtggaatccaacccaggcccttctagaggccatatgaccgagtacaagcccacggtgcgcctcgccacccgcgacgacgtccccagggccgtacgcaccctcgccgccgcgttcgccgactaccccgccacgcgccacaccgtcgatccggaccgccacatcgagcgggtcaccgagctgcaagaactcttcctcacgcgcgtcgggctcgacatcggcaaggtgtgggtcgcggacgacggcgccgcggtggcggtctggaccacgccggagagcgtcgaagcgggggcggtgttcgccgagatcggcccgcgcatggccgagttgagcggttcccggctggccgcgcagcaacagatggaaggcctcctggcgccgcaccggcccaaggagcccgcgtggttcctggccaccgtcggcgtctcgcccgaccaccagggcaagggtctgggcagcgccgtcgtgctccccggagtggaggcggccgagcgcgccggggtgcccgccttcctggagacctccgcgccccgcaacctccccttctacgagcggctcggcttcaccgtcaccgccgacgtcgaggtgcccgaaggaccgcgcacctggtgcatgacccgcaagcccggtgcctga

SEQ ID NO: 7568 - DNA, 2457 bp, Artificial Sequence
  Synthetic Polynucloetide
atggccttaccagtgaccgccttgctcctgccgctggccttgctgctccacgccgccaggccgagctacgtgctgacacagcctccatccgtgtctgtggctccaggacagaccgccagaatcacatgcggcggcaacaacatcggcagcaagagcgtgcactggtatcagcagccacctggacaggctccagtggtggtggtgtacgacgacagcgatagacctagcggcatccccgagagattcagcggcagcaattccggcaataccgccacactgaccatcagcagagtggaagctggcgacgaggccgtgtactactgccaagtgtgggacagcagcagcgatcacgtggtgtttggcggcggaacaaagctgacagtgcttctcgaggacctgaagaacgtgttcccacctgaggtggccgtgttcgagcctagcgaggccgagatcagccacacccagaaagccaccctcgtgtgcctggctaccggcttctaccccgaccatgtggaactgtcttggtgggtcaacggcaaagaggtgcacagcggcgtgtctaccgacccccagccactgaaagaacagcccgccctgaacgacagccggtactgcctgagcagcagactgagagtgtccgccaccttctggcagaacccccggaaccacttcagatgccaggtgcagttctacggcctgagcgagaacgacgagtggacccaggacagagccaagcccgtgacccagatcgtgtctgccgaagcctggggcagagccgattgcggatcccagagcttcggcctgctggaccccaagctgtgctacctgctggatggcatcctgttcatctacggcgtgatcctgaccgccctgttcctgagagtgaagttcagcagaagcgccgacgcccctgcctaccagcagggacagaaccaactgtacaacgagctgaacctgggcagacgggaagagtacgacgtgctggacaagcggagaggcagggaccctgagatgggcggaaagccccagcggagaaagaacccccaggaaggactgtataacgaactccagaaagacaagatggccgaagcctacagcgagatcggcatgaagggcgagcggagaagaggcaagggccacgatggcctgtaccagggcctgagcaccgccaccaaggacacctatgacgccctgcacatgcaggccctgcctccaagaagggccaagcgatctggatctggagcaacaaacttctcactactcaaacaagcaggtgacgtggaggagaatcccgggcctactagtatggactggatttggcgcatccttttccttgtcggcgctgctaccggcgcgcattccttcgaacaactccagctgcaagagtctggccctggcctggtcaagcctagcgaaacactgagcctgacctgtaccgtgtctggcggctctatcagctccggcagctatttctggggctggatcagacaacctcctggcaaaggactggaatggatcggctccatctactacagcggcatcacctactacaaccccagcctgaagtccagagtgaccatctccgtggacaccagcaagaaccagttctccctgaagctgagcagcgtgacagccgccgataccgccgtgtattattgtgccagacatgacggcgctatggccggcctgtttgattattggggacagggcaccctggtcaccgtgtcatctgctacgcgtatccagaaccctgatcctgccgtgtaccagctgcgggatagcaagagcagcgacaagagcgtgtgtctgttcaccgacttcgacagccagaccaacgtgtcccagagcaaggactccgacgtgtacatcaccgataagaccgtgctggacatgcggagcatggacttcaagagcaactccgccgtggcctggtccaacaagtccgatttcgcctgcgccaacgccttcaacaacagcattatccccgaggacacattcttcccaagccccgagagcagctgcggtacccagagttttgggttgttggaccctaaattgtgctatctgttggacggaatcctgttcatttacggagtgatcctgaccgcattgttcctgcgggttaagttttccagatccgcagacgcacccgcttaccaacaagggcagaaccaactctacaatgaacttaatttggggcggagggaagagtacgacgttctggacaaaaggaggggacgagatcccgagatgggcggaaagcctcagcgaaggaagaatccgcaagaggggctttataacgaactccagaaagataaaatggcagaagcctatagtgagattgggatgaagggagaaaggaggaggggtaaaggtcacgatgggttgtaccaaggattgagcacagccactaaagatacctatgatgcgctccacatgcaggccctgccgccaaga

SEQ ID NO: 7569 - DNA, 2457 bp, Artificial Sequence
  Synthetic Polynucloetide
atggccttaccagtgaccgccttgctcctgccgctggccttgctgctccacgccgccaggccgagctacgtgctgacacagcctccatccgtgtctgtggctccaggacagaccgccagaatcacatgcggcggcaacaacatcggcagcaagagcgtgcactggtatcagcagccacctggacaggctccagtggtggtggtgtacgacgacagcgatagacctagcggcatccccgagagattcagcggcagcaattccggcaataccgccacactgaccatcagcagagtggaagctggcgacgaggccgtgtactactgccaagtgtgggacagcagcagcgatcacgtggtgtttggcggcggaacaaagctgacagtgcttctcgaggacctgaagaacgtgttcccacctgaggtggccgtgttcgagcctagcaaggccgagatcgcccacacccagaaagccaccctcgtgtgcctggctaccggcttctaccccgaccatgtggaactgtcttggtgggtcaacggcaaagaggtgcacagcggcgtgtgtaccgacccccagccactgaaagaacagcccgccctgaacgacagccggtactgcctgagcagcagactgagagtgtccgccaccttctggcagaacccccggaaccacttcagatgccaggtgcagttctacggcctgagcgagaacgacgagtggacccaggacagagccaagcccgtgacccagatcgtgtctgccgaagcctggggcagagccgattgcggatcccagagcttcggcctgctggaccccaagctgtgctacctgctggatggcatcctgttcatctacggcgtgatcctgaccgccctgttcctgagagtgaagttcagcagaagcgccgacgcccctgcctaccagcagggacagaaccaactgtacaacgagctgaacctgggcagacgggaagagtacgacgtgctggacaagcggagaggcagggaccctgagatgggcggaaagccccagcggagaaagaacccccaggaaggactgtataacgaactccagaaagacaagatggccgaagcctacagcgagatcggcatgaagggcgagcggagaagaggcaagggccacgatggcctgtaccagggcctgagcaccgccaccaaggacacctatgacgccctgcacatgcaggccctgcctccaagaagggccaagcgatctggatctggagcaacaaacttctcactactcaaacaagcaggtgacgtggaggagaatcccgggcctactagtatggactggatttggcgcatccttttccttgtcggcgctgctaccggcgcgcattccttcgaacaactccagctgcaagagtctggccctggcctggtcaagcctagcgaaacactgagcctgacctgtaccgtgtctggcggctctatcagctccggcagctatttctggggctggatcagacaacctcctggcaaaggactggaatggatcggctccatctactacagcggcatcacctactacaaccccagcctgaagtccagagtgaccatctccgtggacaccagcaagaaccagttctccctgaagctgagcagcgtgacagccgccgataccgccgtgtattattgtgccagacatgacggcgctatggccggcctgtttgattattggggacagggcaccctggtcaccgtgtcatctgctacgcgtatccagaaccctgatcctgccgtgtaccagctgcgggatagcaagagcagcgacaagagcgtgtgtctgttcaccgacttcgacagccagaccaacgtgtcccagagcaaggactccgacgtgtacatcaccgataagtgcgtgctggacatgcggagcatggacttcaagagcaactccgccgtggcctggtccaacaagtccgatttcgcctgcgccaacgccttcaacaacagcattatccccgaggacacattcttcccaagcagcgacgtgccctgcggtacccagagttttgggttgttggaccctaaattgtgctatctgttggacggaatcctgttcatttacggagtgatcctgaccgcattgttcctgcgggttaagttttccagatccgcagacgcacccgcttaccaacaagggcagaaccaactctacaatgaacttaatttggggcggagggaagagtacgacgttctggacaaaaggaggggacgagatcccgagatgggcggaaagcctcagcgaaggaagaatccgcaagaggggctttataacgaactccagaaagataaaatggcagaagcctatagtgagattgggatgaagggagaaaggaggaggggtaaaggtcacgatgggttgtaccaaggattgagcacagccactaaagatacctatgatgcgctccacatgcaggccctgccgccaaga

SEQ ID NO: 7570 - DNA, 2670 bp, Artificial Sequence
  Synthetic Polynucloetide
atggccttaccagtgaccgccttgctcctgccgctggccttgctgctccacgccgccaggccgagctacgtgctgacacagcctccatccgtgtctgtggctccaggacagaccgccagaatcacatgcggcggcaacaacatcggcagcaagagcgtgcactggtatcagcagccacctggacaggctccagtggtggtggtgtacgacgacagcgatagacctagcggcatccccgagagattcagcggcagcaattccggcaataccgccacactgaccatcagcagagtggaagctggcgacgaggccgtgtactactgccaagtgtgggacagcagcagcgatcacgtggtgtttggcggcggaacaaagctgacagtgcttctcgaggggaaaccaattcccaaccctcttctgggactggattcaaccggcagcggcgaggacctgaagaacgtgttcccacctgaggtggccgtgttcgagcctagcgaggccgagatcagccacacccagaaagccaccctcgtgtgcctggctaccggcttctaccccgaccatgtggaactgtcttggtgggtcaacggcaaagaggtgcacagcggcgtgtctaccgacccccagccactgaaagaacagcccgccctgaacgacagccggtactgcctgagcagcagactgagagtgtccgccaccttctggcagaacccccggaaccacttcagatgccaggtgcagttctacggcctgagcgagaacgacgagtggacccaggacagagccaagcccgtgacccagatcgtgtctgccgaagcctggggcagagccgattgcggatcccagagcttcggcctgctggaccccaagctgtgctacctgctggatggcatcctgttcatctacggcgtgatcctgaccgccctgttcctgagagtgaagttcagcagaagcgccgacgcccctgcctaccagcagggacagaaccaactgtacaacgagctgaacctgggcagacgggaagagtacgacgtgctggacaagcggagaggcagggaccctgagatgggcggaaagccccagcggagaaagaacccccaggaaggactgtataacgaactccagaaagacaagatggccgaagcctacagcgagatcggcatgaagggcgagcggagaagaggcaagggccacgatggcctgtaccagggcctgagcaccgccaccaaggacacctatgacgccctgcacatgcaggccctgcctccaagaagggccaagcgatctggatctggagcaacaaacttctcactactcaaacaagcaggtgacgtggaggagaatcccgggcctactagtatggactggatttggcgcatccttttccttgtcggcgctgctaccggcgcgcattccttcgaacaactccagctgcaagagtctggccctggcctggtcaagcctagcgaaacactgagcctgacctgtaccgtgtctggcggctctatcagctccggcagctatttctggggctggatcagacaacctcctggcaaaggactggaatggatcggctccatctactacagcggcatcacctactacaaccccagcctgaagtccagagtgaccatctccgtggacaccagcaagaaccagttctccctgaagctgagcagcgtgacagccgccgataccgccgtgtattattgtgccagacatgacggcgctatggccggcctgtttgattattggggacagggcaccctggtcaccgtgtcatctgctacgcgtgagcagaaactgatctcggaagaggatgggagcggcatccagaaccctgatcctgccgtgtaccagctgcgggatagcaagagcagcgacaagagcgtgtgtctgttcaccgacttcgacagccagaccaacgtgtcccagagcaaggactccgacgtgtacatcaccgataagaccgtgctggacatgcggagcatggacttcaagagcaactccgccgtggcctggtccaacaagtccgatttcgcctgcgccaacgccttcaacaacagcattatccccgaggacacattcttcccaagccccgagagcagctgcggtacccagagttttgggttgttggaccctaaattgtgctatctgttggacggaatcctgttcatttacggagtgatcctgaccgcattgttcctgaggagcaagcggtcacggctgctccacagcgattacatgaatatgacaccacgaagaccgggtcctactcgcaaacactaccaaccctacgcacctccccgcgactttgcagcgtaccgatctcgggttaagttttccagatccgcagacgcacccgcttaccaacaagggcagaaccaactctacaatgaacttaatttggggcggagggaagagtacgacgttctggacaaaaggaggggacgagatcccgagatgggcggaaagcctcagcgaaggaagaatccgcaagaggggctttataacgaactccagaaagataaaatggcagaagcctatagtgagattgggatgaagggagaaaggaggaggggtaaaggtcacgatgggttgtaccaaggattgagcacagccactaaagatacctatgatgcgctccacatgcaggccctgccgccaaga

SEQ ID NO: 7571 - DNA, 2793 bp, Artificial Sequence
  Synthetic Polynucloetide
atggccttaccagtgaccgccttgctcctgccgctggccttgctgctccacgccgccaggccgagctacgtgctgacacagcctccatccgtgtctgtggctccaggacagaccgccagaatcacatgcggcggcaacaacatcggcagcaagagcgtgcactggtatcagcagccacctggacaggctccagtggtggtggtgtacgacgacagcgatagacctagcggcatccccgagagattcagcggcagcaattccggcaataccgccacactgaccatcagcagagtggaagctggcgacgaggccgtgtactactgccaagtgtgggacagcagcagcgatcacgtggtgtttggcggcggaacaaagctgacagtgcttctcgaggggaaaccaattcccaaccctcttctgggactggattcaaccggcagcggcgaggacctgaagaacgtgttcccacctgaggtggccgtgttcgagcctagcgaggccgagatcagccacacccagaaagccaccctcgtgtgcctggctaccggcttctaccccgaccatgtggaactgtcttggtgggtcaacggcaaagaggtgcacagcggcgtgtctaccgacccccagccactgaaagaacagcccgccctgaacgacagccggtactgcctgagcagcagactgagagtgtccgccaccttctggcagaacccccggaaccacttcagatgccaggtgcagttctacggcctgagcgagaacgacgagtggacccaggacagagccaagcccgtgacccagatcgtgtctgccgaagcctggggcagagccgattgcggatcccagagcttcggcctgctggaccccaagctgtgctacctgctggatggcatcctgttcatctacggcgtgatcctgaccgccctgttcctgaggagtaagaggagcaggctcctgcacagtgactacatgaacatgactccacgccgccccggacccacccgcaagcattaccagccctatgccccaccacgcgacttcgcagcctatcgctccagagtgaagttcagcagaagcgccgacgcccctgcctaccagcagggacagaaccaactgtacaacgagctgaacctgggcagacgggaagagtacgacgtgctggacaagcggagaggcagggaccctgagatgggcggaaagccccagcggagaaagaacccccaggaaggactgtataacgaactccagaaagacaagatggccgaagcctacagcgagatcggcatgaagggcgagcggagaagaggcaagggccacgatggcctgtaccagggcctgagcaccgccaccaaggacacctatgacgccctgcacatgcaggccctgcctccaagaagggccaagcgatctggatctggagcaacaaacttctcactactcaaacaagcaggtgacgtggaggagaatcccgggcctactagtatggactggatttggcgcatccttttccttgtcggcgctgctaccggcgcgcattccttcgaacaactccagctgcaagagtctggccctggcctggtcaagcctagcgaaacactgagcctgacctgtaccgtgtctggcggctctatcagctccggcagctatttctggggctggatcagacaacctcctggcaaaggactggaatggatcggctccatctactacagcggcatcacctactacaaccccagcctgaagtccagagtgaccatctccgtggacaccagcaagaaccagttctccctgaagctgagcagcgtgacagccgccgataccgccgtgtattattgtgccagacatgacggcgctatggccggcctgtttgattattggggacagggcaccctggtcaccgtgtcatctgctacgcgtgagcagaaactgatctcggaagaggatgggagcggcatccagaaccctgatcctgccgtgtaccagctgcgggatagcaagagcagcgacaagagcgtgtgtctgttcaccgacttcgacagccagaccaacgtgtcccagagcaaggactccgacgtgtacatcaccgataagaccgtgctggacatgcggagcatggacttcaagagcaactccgccgtggcctggtccaacaagtccgatttcgcctgcgccaacgccttcaacaacagcattatccccgaggacacattcttcccaagccccgagagcagctgcggtacccagagttttgggttgttggaccctaaattgtgctatctgttggacggaatcctgttcatttacggagtgatcctgaccgcattgttcctgaggagcaagcggtcacggctgctccacagcgattacatgaatatgacaccacgaagaccgggtcctactcgcaaacactaccaaccctacgcacctccccgcgactttgcagcgtaccgatctcgggttaagttttccagatccgcagacgcacccgcttaccaacaagggcagaaccaactctacaatgaacttaatttggggcggagggaagagtacgacgttctggacaaaaggaggggacgagatcccgagatgggcggaaagcctcagcgaaggaagaatccgcaagaggggctttataacgaactccagaaagataaaatggcagaagcctatagtgagattgggatgaagggagaaaggaggaggggtaaaggtcacgatgggttgtaccaaggattgagcacagccactaaagatacctatgatgcgctccacatgcaggccctgccgccaaga

SEQ ID NO: 7572 - DNA, 2676 bp, Artificial Sequence
  Synthetic Polynucloetide
atggccttaccagtgaccgccttgctcctgccgctggccttgctgctccacgccgccaggccgagctacgtgctgacacagcctccatccgtgtctgtggctccaggacagaccgccagaatcacatgcggcggcaacaacatcggcagcaagagcgtgcactggtatcagcagccacctggacaggctccagtggtggtggtgtacgacgacagcgatagacctagcggcatccccgagagattcagcggcagcaattccggcaataccgccacactgaccatcagcagagtggaagctggcgacgaggccgtgtactactgccaagtgtgggacagcagcagcgatcacgtggtgtttggcggcggaacaaagctgacagtgcttctcgaggggaaaccaattcccaaccctcttctgggactggattcaaccggcagcggcgaggacctgaagaacgtgttcccacctgaggtggccgtgttcgagcctagcgaggccgagatcagccacacccagaaagccaccctcgtgtgcctggctaccggcttctaccccgaccatgtggaactgtcttggtgggtcaacggcaaagaggtgcacagcggcgtgtctaccgacccccagccactgaaagaacagcccgccctgaacgacagccggtactgcctgagcagcagactgagagtgtccgccaccttctggcagaacccccggaaccacttcagatgccaggtgcagttctacggcctgagcgagaacgacgagtggacccaggacagagccaagcccgtgacccagatcgtgtctgccgaagcctggggcagagccgattgcggatcccagagcttcggcctgctggaccccaagctgtgctacctgctggatggcatcctgttcatctacggcgtgatcctgaccgccctgttcctgagagtgaagttcagcagaagcgccgacgcccctgcctaccagcagggacagaaccaactgtacaacgagctgaacctgggcagacgggaagagtacgacgtgctggacaagcggagaggcagggaccctgagatgggcggaaagccccagcggagaaagaacccccaggaaggactgtataacgaactccagaaagacaagatggccgaagcctacagcgagatcggcatgaagggcgagcggagaagaggcaagggccacgatggcctgtaccagggcctgagcaccgccaccaaggacacctatgacgccctgcacatgcaggccctgcctccaagaagggccaagcgatctggatctggagcaacaaacttctcactactcaaacaagcaggtgacgtggaggagaatcccgggcctactagtatggactggatttggcgcatccttttccttgtcggcgctgctaccggcgcgcattccttcgaacaactccagctgcaagagtctggccctggcctggtcaagcctagcgaaacactgagcctgacctgtaccgtgtctggcggctctatcagctccggcagctatttctggggctggatcagacaacctcctggcaaaggactggaatggatcggctccatctactacagcggcatcacctactacaaccccagcctgaagtccagagtgaccatctccgtggacaccagcaagaaccagttctccctgaagctgagcagcgtgacagccgccgataccgccgtgtattattgtgccagacatgacggcgctatggccggcctgtttgattattggggacagggcaccctggtcaccgtgtcatctgctacgcgtgagcagaaactgatctcggaagaggatctggggagcggcatccagaaccctgatcctgccgtgtaccagctgcgggatagcaagagcagcgacaagagcgtgtgtctgttcaccgacttcgacagccagaccaacgtgtcccagagcaaggactccgacgtgtacatcaccgataagaccgtgctggacatgcggagcatggacttcaagagcaactccgccgtggcctggtccaacaagtccgatttcgcctgcgccaacgccttcaacaacagcattatccccgaggacacattcttcccaagccccgagagcagctgcggtacccagagttttgggttgttggaccctaaattgtgctatctgttggacggaatcctgttcatttacggagtgatcctgaccgcattgttcctgaagagaggccggaagaagctgctgtacatcttcaagcagcctttcatgcggcccgtgcagaccacccaggaagaggacggctgctcctgccggttccccgaggaagaagaaggcggctgcgagctgcgggttaagttttccagatccgcagacgcacccgcttaccaacaagggcagaaccaactctacaatgaacttaatttggggcggagggaagagtacgacgttctggacaaaaggaggggacgagatcccgagatgggcggaaagcctcagcgaaggaagaatccgcaagaggggctttataacgaactccagaaagataaaatggcagaagcctatagtgagattgggatgaagggagaaaggaggaggggtaaaggtcacgatgggttgtaccaaggattgagcacagccactaaagatacctatgatgcgctccacatgcaggccctgccgccaaga

SEQ ID NO: 7573 - DNA, 2802 bp, Artificial Sequence
  Synthetic Polynucloetide
atggccttaccagtgaccgccttgctcctgccgctggccttgctgctccacgccgccaggccgagctacgtgctgacacagcctccatccgtgtctgtggctccaggacagaccgccagaatcacatgcggcggcaacaacatcggcagcaagagcgtgcactggtatcagcagccacctggacaggctccagtggtggtggtgtacgacgacagcgatagacctagcggcatccccgagagattcagcggcagcaattccggcaataccgccacactgaccatcagcagagtggaagctggcgacgaggccgtgtactactgccaagtgtgggacagcagcagcgatcacgtggtgtttggcggcggaacaaagctgacagtgcttctcgaggggaaaccaattcccaaccctcttctgggactggattcaaccggcagcggcgaggacctgaagaacgtgttcccacctgaggtggccgtgttcgagcctagcgaggccgagatcagccacacccagaaagccaccctcgtgtgcctggctaccggcttctaccccgaccatgtggaactgtcttggtgggtcaacggcaaagaggtgcacagcggcgtgtctaccgacccccagccactgaaagaacagcccgccctgaacgacagccggtactgcctgagcagcagactgagagtgtccgccaccttctggcagaacccccggaaccacttcagatgccaggtgcagttctacggcctgagcgagaacgacgagtggacccaggacagagccaagcccgtgacccagatcgtgtctgccgaagcctggggcagagccgattgcggatcccagagcttcggcctgctggaccccaagctgtgctacctgctggatggcatcctgttcatctacggcgtgatcctgaccgccctgttcctgaaacggggcagaaagaaactcctgtatatattcaaacaaccatttatgagaccagtacaaactactcaagaggaagatggctgtagctgccgatttccagaagaagaagaaggaggatgtgaactgagagtgaagttcagcagaagcgccgacgcccctgcctaccagcagggacagaaccaactgtacaacgagctgaacctgggcagacgggaagagtacgacgtgctggacaagcggagaggcagggaccctgagatgggcggaaagccccagcggagaaagaacccccaggaaggactgtataacgaactccagaaagacaagatggccgaagcctacagcgagatcggcatgaagggcgagcggagaagaggcaagggccacgatggcctgtaccagggcctgagcaccgccaccaaggacacctatgacgccctgcacatgcaggccctgcctccaagaagggccaagcgatctggatctggagcaacaaacttctcactactcaaacaagcaggtgacgtggaggagaatcccgggcctactagtatggactggatttggcgcatccttttccttgtcggcgctgctaccggcgcgcattccttcgaacaactccagctgcaagagtctggccctggcctggtcaagcctagcgaaacactgagcctgacctgtaccgtgtctggcggctctatcagctccggcagctatttctggggctggatcagacaacctcctggcaaaggactggaatggatcggctccatctactacagcggcatcacctactacaaccccagcctgaagtccagagtgaccatctccgtggacaccagcaagaaccagttctccctgaagctgagcagcgtgacagccgccgataccgccgtgtattattgtgccagacatgacggcgctatggccggcctgtttgattattggggacagggcaccctggtcaccgtgtcatctgctacgcgtgagcagaaactgatctcggaagaggatctggggagcggcatccagaaccctgatcctgccgtgtaccagctgcgggatagcaagagcagcgacaagagcgtgtgtctgttcaccgacttcgacagccagaccaacgtgtcccagagcaaggactccgacgtgtacatcaccgataagaccgtgctggacatgcggagcatggacttcaagagcaactccgccgtggcctggtccaacaagtccgatttcgcctgcgccaacgccttcaacaacagcattatccccgaggacacattcttcccaagccccgagagcagctgcggtacccagagttttgggttgttggaccctaaattgtgctatctgttggacggaatcctgttcatttacggagtgatcctgaccgcattgttcctgaagagaggccggaagaagctgctgtacatcttcaagcagcctttcatgcggcccgtgcagaccacccaggaagaggacggctgctcctgccggttccccgaggaagaagaaggcggctgcgagctgcgggttaagttttccagatccgcagacgcacccgcttaccaacaagggcagaaccaactctacaatgaacttaatttggggcggagggaagagtacgacgttctggacaaaaggaggggacgagatcccgagatgggcggaaagcctcagcgaaggaagaatccgcaagaggggctttataacgaactccagaaagataaaatggcagaagcctatagtgagattgggatgaagggagaaaggaggaggggtaaaggtcacgatgggttgtaccaaggattgagcacagccactaaagatacctatgatgcgctccacatgcaggccctgccgccaaga

SEQ ID NO: 7574 - DNA, 2475 bp, Artificial Sequence
  Synthetic Polynucloetide
atggccttaccagtgaccgccttgctcctgccgctggccttgctgctccacgccgccaggccgagctacgtgctgacacagcctccatccgtgtctgtggctccaggacagaccgccagaatcacatgcggcggcaacaacatcggcagcaagagcgtgcactggtatcagcagccacctggacaggctccagtggtggtggtgtacgacgacagcgatagacctagcggcatccccgagagattcagcggcagcaattccggcaataccgccacactgaccatcagcagagtggaagctggcgacgaggccgtgtactactgccaagtgtgggacagcagcagcgatcacgtggtgtttggcggcggaacaaagctgacagtgcttctcgagcagagcttcggcctgctggaccccaagctgtgctacctgctggatggcatcctgttcatctacggcgtgatcctgaccgccctgttcctgagagtgaagttcagcagaagcgccgacgcccctgcctaccagcagggacagaaccaactgtacaacgagctgaacctgggcagacgggaagagtacgacgtgctggacaagcggagaggcagggaccctgagatgggcggaaagccccagcggagaaagaacccccaggaaggactgtataacgaactccagaaagacaagatggccgaagcctacagcgagatcggcatgaagggcgagcggagaagaggcaagggccacgatggcctgtaccagggcctgagcaccgccaccaaggacacctatgacgccctgcacatgcaggccctgcctccaagaagggccaagcgatctggatctggagcaacaaacttctcactactcaaacaagcaggtgacgtggaggagaatcccgggcctactagtatggactggatttggcgcatccttttccttgtcggcgctgctaccggcgcgcattccttcgaacaactccagctgcaagagtctggccctggcctggtcaagcctagcgaaacactgagcctgacctgtaccgtgtctggcggctctatcagctccggcagctatttctggggctggatcagacaacctcctggcaaaggactggaatggatcggctccatctactacagcggcatcacctactacaaccccagcctgaagtccagagtgaccatctccgtggacaccagcaagaaccagttctccctgaagctgagcagcgtgacagccgccgataccgccgtgtattattgtgccagacatgacggcgctatggccggcctgtttgattattggggacagggcaccctggtcaccgtgtcatctgctacgcgtcagagttttgggttgttggaccctaaattgtgctatctgttggacggaatcctgttcatttacggagtgatcctgaccgcattgttcctgcgggttaagttttccagatccgcagacgcacccgcttaccaacaagggcagaaccaactctacaatgaacttaatttggggcggagggaagagtacgacgttctggacaaaaggaggggacgagatcccgagatgggcggaaagcctcagcgaaggaagaatccgcaagaggggctttataacgaactccagaaagataaaatggcagaagcctatagtgagattgggatgaagggagaaaggaggaggggtaaaggtcacgatgggttgtaccaaggattgagcacagccactaaagatacctatgatgcgctccacatgcaggccctgccgccaagacgcgccaagagaagcggatctggcgtgaagcagaccctgaatttcgacctgctgaagctggctggcgacgtggaatccaacccaggcccttctagaggccatatgaccgagtacaagcccacggtgcgcctcgccacccgcgacgacgtccccagggccgtacgcaccctcgccgccgcgttcgccgactaccccgccacgcgccacaccgtcgatccggaccgccacatcgagcgggtcaccgagctgcaagaactcttcctcacgcgcgtcgggctcgacatcggcaaggtgtgggtcgcggacgacggcgccgcggtggcggtctggaccacgccggagagcgtcgaagcgggggcggtgttcgccgagatcggcccgcgcatggccgagttgagcggttcccggctggccgcgcagcaacagatggaaggcctcctggcgccgcaccggcccaaggagcccgcgtggttcctggccaccgtcggcgtctcgcccgaccaccagggcaagggtctgggcagcgccgtcgtgctccccggagtggaggcggccgagcgcgccggggtgcccgccttcctggagacctccgcgccccgcaacctccccttctacgagcggctcggcttcaccgtcaccgccgacgtcgaggtgcccgaaggaccgcgcacctggtgcatgacccgcaagcccggtgcctga

SEQ ID NO: 7575 - DNA, 1947 bp, Artificial Sequence
  Synthetic Polynucloetide
atggccttaccagtgaccgccttgctcctgccgctggccttgctgctccacgccgccaggccgagctacgtgctgacacagcctccatccgtgtctgtggctccaggacagaccgccagaatcacatgcggcggcaacaacatcggcagcaagagcgtgcactggtatcagcagccacctggacaggctccagtggtggtggtgtacgacgacagcgatagacctagcggcatccccgagagattcagcggcagcaattccggcaataccgccacactgaccatcagcagagtggaagctggcgacgaggccgtgtactactgccaagtgtgggacagcagcagcgatcacgtggtgtttggcggcggaacaaagctgacagtgcttctcgagggacagcctaaggccaatcctaccgtgacactgttccctccaagcagcgaagaactccaggccaacaaggccacacttgtgtgcctgatctccgacttctaccctggggctgtgacagtggcttggaaggccgatggatctcctgtgaaagccggcgtggaaaccaccaagccatccaagcagagcaacaacaaatacgccgccagctcctacctgagcctgacacctgagcagtggaagtcccacagatcctacagctgccaagtgacccacgaaggcagcaccgtggaaaagacagtggcccctacagagtgcagccccatcaagaccgatgtgattacaatggaccccaaggacaactgctccaaggacgccaacgataccctgctgctccagctgaccaacaccagcgcctactacatgtacttgttgctgctgctgaagtccgtggtgtacttcgccatcatcacatgctgcctgctgcggagaaccgccttctgctgcaacggcgagaagtctagggccaagcgatctggatctggagcaacaaacttctcactactcaaacaagcaggtgacgtggaggagaatcccgggcctactagtatggactggatttggcgcatccttttccttgtcggcgctgctaccggcgcgcattccttcgaacaactccagctgcaagagtctggccctggcctggtcaagcctagcgaaacactgagcctgacctgtaccgtgtctggcggctctatcagctccggcagctatttctggggctggatcagacaacctcctggcaaaggactggaatggatcggctccatctactacagcggcatcacctactacaaccccagcctgaagtccagagtgaccatctccgtggacaccagcaagaaccagttctccctgaagctgagcagcgtgacagccgccgataccgccgtgtattattgtgccagacatgacggcgctatggccggcctgtttgattattggggacagggcaccctggtcaccgtgtcatctgctacgcgtgcctctacaaagggaccctccgtgtttcctctggctcccagcagcaagtctacaagcggaggaacagccgctctgggctgcctggtcaaggattactttcccgagcctgtgaccgtgtcctggaatagcggagcactgacaagcggcgtgcacacctttccagccgtgctgcaaagcagcggcctgtactctctgagcagcgtggtcacagtgcctagctctagcctgggcacccagacctacatctgcaatgtgaaccacaagcctagcaacaccaaggtggacaagagagtggaacccaagagctgtgaagtgaaaaccgactccaccgaccacgtgaagcccaaagagacagagaacaccaagcagcccagcaagagctgccacaagcccaaggccatcgtgcacaccgagaaagtgaacatgatgagcctgaccgtgctgggcctgcggatgctgttcgccaaaaccgtggccgtgaacttcctgctgaccgccaagctgttcttcctc

SEQ ID NO: 7576 - DNA, 1881 bp, Artificial Sequence
  Synthetic Polynucloetide
atggccttaccagtgaccgccttgctcctgccgctggccttgctgctccacgccgccaggccgagctacgtgctgacacagcctccatccgtgtctgtggctccaggacagaccgccagaatcacatgcggcggcaacaacatcggcagcaagagcgtgcactggtatcagcagccacctggacaggctccagtggtggtggtgtacgacgacagcgatagacctagcggcatccccgagagattcagcggcagcaattccggcaataccgccacactgaccatcagcagagtggaagctggcgacgaggccgtgtactactgccaagtgtgggacagcagcagcgatcacgtggtgtttggcggcggaacaaagctgacagtgcttctcgagggacagcctaaggccaatcctaccgtgacactgttccctccaagcagcgaagaactccaggccaacaaggccacacttgtgtgcctgatctccgacttctaccctggggctgtgacagtggcttggaaggccgatggatctcctgtgaaagccggcgtggaaaccaccaagccatccaagcagagcaacaacaaatacgccgccagctcctacctgagcctgacacctgagcagtggaagtcccacagatcctacagctgccaagtgacccacgaaggcagcaccgtggaaaagacagtggcccctacagagtgcagcggcagagccgattgcggcatcaccagcgccagctaccaccagggcgtgctgagcgccaccatcctgtacgagatcctgctgggcaaggccaccctgtacgccgtgctggtgtctgccctggtgctgatggctatggtcaagcggaaggacagccggggaagggccaagcgatctggatctggagcaacaaacttctcactactcaaacaagcaggtgacgtggaggagaatcccgggcctactagtatggactggatttggcgcatccttttccttgtcggcgctgctaccggcgcgcattccttcgaacaactccagctgcaagagtctggccctggcctggtcaagcctagcgaaacactgagcctgacctgtaccgtgtctggcggctctatcagctccggcagctatttctggggctggatcagacaacctcctggcaaaggactggaatggatcggctccatctactacagcggcatcacctactacaaccccagcctgaagtccagagtgaccatctccgtggacaccagcaagaaccagttctccctgaagctgagcagcgtgacagccgccgataccgccgtgtattattgtgccagacatgacggcgctatggccggcctgtttgattattggggacagggcaccctggtcaccgtgtcatctgctacgcgtgcctctacaaagggaccctccgtgtttcctctggctcccagcagcaagtctacaagcggaggaacagccgctctgggctgcctggtcaaggattactttcccgagcctgtgaccgtgtcctggaatagcggagcactgacaagcggcgtgcacacctttccagccgtgctgcaaagcagcggcctgtactctctgagcagcgtggtcacagtgcctagctctagcctgggcacccagacctacatctgcaatgtgaaccacaagcctagcaacaccaaggtggacaagagagtggaacccaagagctgtatccccgaggacacattcttcccaagcagcgacgtgccctgcgacgtgaagctggtggaaaagagcttcgagacagacaccaacctgaacttccagaacctgagcgtgatcggcttcagaatcctgctgctgaaagtggccggctttaacctgctgatgaccctgcggctgtggtccagc

SEQ ID NO: 7577 - DNA, 1881 bp, Artificial Sequence
  Synthetic Polynucloetide
atggccttaccagtgaccgccttgctcctgccgctggccttgctgctccacgccgccaggccgagctacgtgctgacacagcctccatccgtgtctgtggctccaggacagaccgccagaatcacatgcggcggcaacaacatcggcagcaagagcgtgcactggtatcagcagccacctggacaggctccagtggtggtggtgtacgacgacagcgatagacctagcggcatccccgagagattcagcggcagcaattccggcaataccgccacactgaccatcagcagagtggaagctggcgacgaggccgtgtactactgccaagtgtgggacagcagcagcgatcacgtggtgtttggcggcggaacaaagctgacagtgcttctcgagggacagcctaaggccaatcctaccgtgacactgttccctccaagcagcgaagaactccaggccaacaaggccacacttgtgtgcctgatctccgacttctaccctggggctgtgacagtggcttggaaggccgatggatctcctgtgaaagccggcgtggaaaccaccaagccatccaagcagagcaacaacaaatacgccgccagctcctacctgagcctgacacctgagcagtggaagtcccacagatcctacagctgccaagtgacccacgaaggcagcaccgtggaaaagacagtggcccctacagagtgcagcggcagagccgattgcggctttaccagcgagagctaccagcagggcgtgctgagcgccaccatcctgtacgagatcctgctgggcaaggccaccctgtacgccgtgctggtgtctgccctggtgctgatggctatggtcaagcggaaggacagccggggaagggccaagcgatctggatctggagcaacaaacttctcactactcaaacaagcaggtgacgtggaggagaatcccgggcctactagtatggactggatttggcgcatccttttccttgtcggcgctgctaccggcgcgcattccttcgaacaactccagctgcaagagtctggccctggcctggtcaagcctagcgaaacactgagcctgacctgtaccgtgtctggcggctctatcagctccggcagctatttctggggctggatcagacaacctcctggcaaaggactggaatggatcggctccatctactacagcggcatcacctactacaaccccagcctgaagtccagagtgaccatctccgtggacaccagcaagaaccagttctccctgaagctgagcagcgtgacagccgccgataccgccgtgtattattgtgccagacatgacggcgctatggccggcctgtttgattattggggacagggcaccctggtcaccgtgtcatctgctacgcgtgcctctacaaagggaccctccgtgtttcctctggctcccagcagcaagtctacaagcggaggaacagccgctctgggctgcctggtcaaggattactttcccgagcctgtgaccgtgtcctggaatagcggagcactgacaagcggcgtgcacacctttccagccgtgctgcaaagcagcggcctgtactctctgagcagcgtggtcacagtgcctagctctagcctgggcacccagacctacatctgcaatgtgaaccacaagcctagcaacaccaaggtggacaagagagtggaacccaagagctgtatccccgaggacacattcttcccaagccccgagagcagctgcgacgtgaagctggtggaaaagagcttcgagacagacaccaacctgaacttccagaacctgagcgtgatcggcttcagaatcctgctgctgaaagtggccggctttaacctgctgatgaccctgcggctgtggtccagc

SEQ ID NO: 7578 - DNA, 1359 bp, Artificial Sequence
  Synthetic Polynucloetide
atggccttaccagtgaccgccttgctcctgccgctggccttgctgctccacgccgccaggccgagctacgtgctgacacagcctccatccgtgtctgtggctccaggacagaccgccagaatcacatgcggcggcaacaacatcggcagcaagagcgtgcactggtatcagcagccacctggacaggctccagtggtggtggtgtacgacgacagcgatagacctagcggcatccccgagagattcagcggcagcaattccggcaataccgccacactgaccatcagcagagtggaagctggcgacgaggccgtgtactactgccaagtgtgggacagcagcagcgatcacgtggtgtttggcggcggaacaaagctgacagtgcttggcggaggcggaagtggaggcggaggatctggcggcggaggctctcaactccagctgcaagagtctggccctggcctggtcaagcctagcgaaacactgagcctgacctgtaccgtgtctggcggctctatcagctccggcagctatttctggggctggatcagacaacctcctggcaaaggactggaatggatcggctccatctactacagcggcatcacctactacaaccccagcctgaagtccagagtgaccatctccgtggacaccagcaagaaccagttctccctgaagctgagcagcgtgacagccgccgataccgccgtgtattattgtgccagacatgacggcgctatggccggcctgtttgattattggggacagggcaccctggtcaccgtgtcatctgctacgcgtgacggtaacgaggagatgggaggaatcactcaaaccccttacaaagtctcaatttcaggaacaactgttatccttacatgtccccagtatcctggcagcgagatcctttggcagcataacgacaagaatatagggggagatgaagacgataagaatatcggatctgacgaggatcacttgagcctgaaagagttctccgagcttgaacaaagcggatattatgtgtgctatccgcgcgggtcaaagccggaagacgctaacttttacctttatctccgagccagagtgtgcgaaaattgcatggaaatggacgttatgtccgttgctacaatagttatcgtagatatatgcatcacgggtggactgcttctgctggtttattattggtccaagaatagaaaggccaaagctaaacccgtgaccagaggcgctggcgcaggcggaaggcaaaggggacaaaacaaagaacggccaccaccagtgccaaatccagattatgagcctattcggaaaggacagagggacctgtactctggcctgaatcagagaagaatc

SEQ ID NO: 7579 - DNA, 1254 bp, Artificial Sequence
  Synthetic Polynucloetide
atggccttaccagtgaccgccttgctcctgccgctggccttgctgctccacgccgccaggccgagctacgtgctgacacagcctccatccgtgtctgtggctccaggacagaccgccagaatcacatgcggcggcaacaacatcggcagcaagagcgtgcactggtatcagcagccacctggacaggctccagtggtggtggtgtacgacgacagcgatagacctagcggcatccccgagagattcagcggcagcaattccggcaataccgccacactgaccatcagcagagtggaagctggcgacgaggccgtgtactactgccaagtgtgggacagcagcagcgatcacgtggtgtttggcggcggaacaaagctgacagtgcttggcggaggcggaagtggaggcggaggatctggcggcggaggctctcaactccagctgcaagagtctggccctggcctggtcaagcctagcgaaacactgagcctgacctgtaccgtgtctggcggctctatcagctccggcagctatttctggggctggatcagacaacctcctggcaaaggactggaatggatcggctccatctactacagcggcatcacctactacaaccccagcctgaagtccagagtgaccatctccgtggacaccagcaagaaccagttctccctgaagctgagcagcgtgacagccgccgataccgccgtgtattattgtgccagacatgacggcgctatggccggcctgtttgattattggggacagggcaccctggtcaccgtgtcatctgctacgcgtttcaagatccccatcgaggaactggaagatcgggtgttcgtgaactgcaacacctctatcacctgggtggaaggcaccgtgggaacactgctgagcgacatcaccagactggacctcggcaagcggattctggaccctcggggcatctacagatgcaacggcaccgacatctacaaggacaaagaaagcaccgtgcaggtccactacagaatgtgccagtcctgcgtggaactggaccctgctacagtggccggcatcatcgtgaccgatgtgatcgctactctgctgctggctctgggagtgttctgcttcgccggacacgaaacaggcagactgtctggcgctgccgatacacaggccctgctgagaaacgaccaagtgtatcagcccctgcgcgacagagatgatgcccagtattctcacctcggcggcaactgggctagaaacaag

SEQ ID NO: 7580 - DNA, 1284 bp, Artificial Sequence
  Synthetic Polynucloetide
atggccttaccagtgaccgccttgctcctgccgctggccttgctgctccacgccgccaggccgagctacgtgctgacacagcctccatccgtgtctgtggctccaggacagaccgccagaatcacatgcggcggcaacaacatcggcagcaagagcgtgcactggtatcagcagccacctggacaggctccagtggtggtggtgtacgacgacagcgatagacctagcggcatccccgagagattcagcggcagcaattccggcaataccgccacactgaccatcagcagagtggaagctggcgacgaggccgtgtactactgccaagtgtgggacagcagcagcgatcacgtggtgtttggcggcggaacaaagctgacagtgcttggcggaggcggaagtggaggcggaggatctggcggcggaggctctcaactccagctgcaagagtctggccctggcctggtcaagcctagcgaaacactgagcctgacctgtaccgtgtctggcggctctatcagctccggcagctatttctggggctggatcagacaacctcctggcaaaggactggaatggatcggctccatctactacagcggcatcacctactacaaccccagcctgaagtccagagtgaccatctccgtggacaccagcaagaaccagttctccctgaagctgagcagcgtgacagccgccgataccgccgtgtattattgtgccagacatgacggcgctatggccggcctgtttgattattggggacagggcaccctggtcaccgtgtcatctgctacgcgtcagagcatcaagggcaaccacctggtcaaggtgtacgactaccaagaggacggcagcgtgctgctgacatgtgatgccgaggccaagaacatcacctggtttaaggacggcaagatgatcggcttcctgaccgaggacaagaagaagtggaacctgggcagcaacgctaaggaccccagaggcatgtatcagtgcaagggcagccagaacaagagcaagcccctccaggtgtactaccggatgtgccagaactgcatcgagctgaacgccgctaccatcagcggctttctgttcgccgagatcgtgtccatcttcgtgctggccgtgggcgtgtactttatcgctggacaggatggcgtgcggcagagcagagcttccgataagcaaaccctgctgcctaacgaccagctgtaccagcctctgaaggacagagaggacgaccagtacagccacctccagggcaatcagctgagaagaaac

SEQ ID NO: 7581 - DNA, 1233 bp, Artificial Sequence
  Synthetic Polynucloetide
atggccttaccagtgaccgccttgctcctgccgctggccttgctgctccacgccgccaggccgagctacgtgctgacacagcctccatccgtgtctgtggctccaggacagaccgccagaatcacatgcggcggcaacaacatcggcagcaagagcgtgcactggtatcagcagccacctggacaggctccagtggtggtggtgtacgacgacagcgatagacctagcggcatccccgagagattcagcggcagcaattccggcaataccgccacactgaccatcagcagagtggaagctggcgacgaggccgtgtactactgccaagtgtgggacagcagcagcgatcacgtggtgtttggcggcggaacaaagctgacagtgcttggcggaggcggaagtggaggcggaggatctggcggcggaggctctcaactccagctgcaagagtctggccctggcctggtcaagcctagcgaaacactgagcctgacctgtaccgtgtctggcggctctatcagctccggcagctatttctggggctggatcagacaacctcctggcaaaggactggaatggatcggctccatctactacagcggcatcacctactacaaccccagcctgaagtccagagtgaccatctccgtggacaccagcaagaaccagttctccctgaagctgagcagcgtgacagccgccgataccgccgtgtattattgtgccagacatgacggcgctatggccggcctgtttgattattggggacagggcaccctggtcaccgtgtcatctgctacgcgtcagagttttgggttgttggaccctaaattgtgctatctgttggacggaatcctgttcatttacggagtgatcctgaccgcattgttcctgcgggttaagttttccagatccgcagacgcacccgcttaccaacaagggcagaaccaactctacaatgaacttaatttggggcggagggaagagtacgacgttctggacaaaaggaggggacgagatcccgagatgggcggaaagcctcagcgaaggaagaatccgcaagaggggctttataacgaactccagaaagataaaatggcagaagcctatagtgagattgggatgaagggagaaaggaggaggggtaaaggtcacgatgggttgtaccaaggattgagcacagccactaaagatacctatgatgcgctccacatgcaggccctgccgccaaga

SEQ ID NO: 7582 - DNA, 1359 bp, Artificial Sequence
  Synthetic Polynucloetide
atggccttaccagtgaccgccttgctcctgccgctggccttgctgctccacgccgccaggccgcaactccagctgcaagagtctggccctggcctggtcaagcctagcgaaacactgagcctgacctgtaccgtgtctggcggctctatcagctccggcagctatttctggggctggatcagacaacctcctggcaaaggactggaatggatcggctccatctactacagcggcatcacctactacaaccccagcctgaagtccagagtgaccatctccgtggacaccagcaagaaccagttctccctgaagctgagcagcgtgacagccgccgataccgccgtgtattattgtgccagacatgacggcgctatggccggcctgtttgattattggggacagggcaccctggtcaccgtgtcatctgctggcggaggcggaagtggaggcggaggatctggcggcggaggctctagctacgtgctgacacagcctccatccgtgtctgtggctccaggacagaccgccagaatcacatgcggcggcaacaacatcggcagcaagagcgtgcactggtatcagcagccacctggacaggctccagtggtggtggtgtacgacgacagcgatagacctagcggcatccccgagagattcagcggcagcaattccggcaataccgccacactgaccatcagcagagtggaagctggcgacgaggccgtgtactactgccaagtgtgggacagcagcagcgatcacgtggtgtttggcggcggaacaaagctgacagtgcttacgcgtgacggtaacgaggagatgggaggaatcactcaaaccccttacaaagtctcaatttcaggaacaactgttatccttacatgtccccagtatcctggcagcgagatcctttggcagcataacgacaagaatatagggggagatgaagacgataagaatatcggatctgacgaggatcacttgagcctgaaagagttctccgagcttgaacaaagcggatattatgtgtgctatccgcgcgggtcaaagccggaagacgctaacttttacctttatctccgagccagagtgtgcgaaaattgcatggaaatggacgttatgtccgttgctacaatagttatcgtagatatatgcatcacgggtggactgcttctgctggtttattattggtccaagaatagaaaggccaaagctaaacccgtgaccagaggcgctggcgcaggcggaaggcaaaggggacaaaacaaagaacggccaccaccagtgccaaatccagattatgagcctattcggaaaggacagagggacctgtactctggcctgaatcagagaagaatc

SEQ ID NO: 7583 - DNA, 1254 bp, Artificial Sequence
  Synthetic Polynucloetide
atggccttaccagtgaccgccttgctcctgccgctggccttgctgctccacgccgccaggccgcaactccagctgcaagagtctggccctggcctggtcaagcctagcgaaacactgagcctgacctgtaccgtgtctggcggctctatcagctccggcagctatttctggggctggatcagacaacctcctggcaaaggactggaatggatcggctccatctactacagcggcatcacctactacaaccccagcctgaagtccagagtgaccatctccgtggacaccagcaagaaccagttctccctgaagctgagcagcgtgacagccgccgataccgccgtgtattattgtgccagacatgacggcgctatggccggcctgtttgattattggggacagggcaccctggtcaccgtgtcatctgctggcggaggcggaagtggaggcggaggatctggcggcggaggctctagctacgtgctgacacagcctccatccgtgtctgtggctccaggacagaccgccagaatcacatgcggcggcaacaacatcggcagcaagagcgtgcactggtatcagcagccacctggacaggctccagtggtggtggtgtacgacgacagcgatagacctagcggcatccccgagagattcagcggcagcaattccggcaataccgccacactgaccatcagcagagtggaagctggcgacgaggccgtgtactactgccaagtgtgggacagcagcagcgatcacgtggtgtttggcggcggaacaaagctgacagtgcttacgcgtttcaagatccccatcgaggaactggaagatcgggtgttcgtgaactgcaacacctctatcacctgggtggaaggcaccgtgggaacactgctgagcgacatcaccagactggacctcggcaagcggattctggaccctcggggcatctacagatgcaacggcaccgacatctacaaggacaaagaaagcaccgtgcaggtccactacagaatgtgccagtcctgcgtggaactggaccctgctacagtggccggcatcatcgtgaccgatgtgatcgctactctgctgctggctctgggagtgttctgcttcgccggacacgaaacaggcagactgtctggcgctgccgatacacaggccctgctgagaaacgaccaagtgtatcagcccctgcgcgacagagatgatgcccagtattctcacctcggcggcaactgggctagaaacaag

SEQ ID NO: 7584 - DNA, 1284 bp, Artificial Sequence
  Synthetic Polynucloetide
atggccttaccagtgaccgccttgctcctgccgctggccttgctgctccacgccgccaggccgcaactccagctgcaagagtctggccctggcctggtcaagcctagcgaaacactgagcctgacctgtaccgtgtctggcggctctatcagctccggcagctatttctggggctggatcagacaacctcctggcaaaggactggaatggatcggctccatctactacagcggcatcacctactacaaccccagcctgaagtccagagtgaccatctccgtggacaccagcaagaaccagttctccctgaagctgagcagcgtgacagccgccgataccgccgtgtattattgtgccagacatgacggcgctatggccggcctgtttgattattggggacagggcaccctggtcaccgtgtcatctgctggcggaggcggaagtggaggcggaggatctggcggcggaggctctagctacgtgctgacacagcctccatccgtgtctgtggctccaggacagaccgccagaatcacatgcggcggcaacaacatcggcagcaagagcgtgcactggtatcagcagccacctggacaggctccagtggtggtggtgtacgacgacagcgatagacctagcggcatccccgagagattcagcggcagcaattccggcaataccgccacactgaccatcagcagagtggaagctggcgacgaggccgtgtactactgccaagtgtgggacagcagcagcgatcacgtggtgtttggcggcggaacaaagctgacagtgcttacgcgtcagagcatcaagggcaaccacctggtcaaggtgtacgactaccaagaggacggcagcgtgctgctgacatgtgatgccgaggccaagaacatcacctggtttaaggacggcaagatgatcggcttcctgaccgaggacaagaagaagtggaacctgggcagcaacgctaaggaccccagaggcatgtatcagtgcaagggcagccagaacaagagcaagcccctccaggtgtactaccggatgtgccagaactgcatcgagctgaacgccgctaccatcagcggctttctgttcgccgagatcgtgtccatcttcgtgctggccgtgggcgtgtactttatcgctggacaggatggcgtgcggcagagcagagcttccgataagcaaaccctgctgcctaacgaccagctgtaccagcctctgaaggacagagaggacgaccagtacagccacctccagggcaatcagctgagaagaaac

SEQ ID NO: 7585 - DNA, 1233 bp, Artificial Sequence
  Synthetic Polynucloetide
atggccttaccagtgaccgccttgctcctgccgctggccttgctgctccacgccgccaggccgcaactccagctgcaagagtctggccctggcctggtcaagcctagcgaaacactgagcctgacctgtaccgtgtctggcggctctatcagctccggcagctatttctggggctggatcagacaacctcctggcaaaggactggaatggatcggctccatctactacagcggcatcacctactacaaccccagcctgaagtccagagtgaccatctccgtggacaccagcaagaaccagttctccctgaagctgagcagcgtgacagccgccgataccgccgtgtattattgtgccagacatgacggcgctatggccggcctgtttgattattggggacagggcaccctggtcaccgtgtcatctgctggcggaggcggaagtggaggcggaggatctggcggcggaggctctagctacgtgctgacacagcctccatccgtgtctgtggctccaggacagaccgccagaatcacatgcggcggcaacaacatcggcagcaagagcgtgcactggtatcagcagccacctggacaggctccagtggtggtggtgtacgacgacagcgatagacctagcggcatccccgagagattcagcggcagcaattccggcaataccgccacactgaccatcagcagagtggaagctggcgacgaggccgtgtactactgccaagtgtgggacagcagcagcgatcacgtggtgtttggcggcggaacaaagctgacagtgcttacgcgtcagagttttgggttgttggaccctaaattgtgctatctgttggacggaatcctgttcatttacggagtgatcctgaccgcattgttcctgcgggttaagttttccagatccgcagacgcacccgcttaccaacaagggcagaaccaactctacaatgaacttaatttggggcggagggaagagtacgacgttctggacaaaaggaggggacgagatcccgagatgggcggaaagcctcagcgaaggaagaatccgcaagaggggctttataacgaactccagaaagataaaatggcagaagcctatagtgagattgggatgaagggagaaaggaggaggggtaaaggtcacgatgggttgtaccaaggattgagcacagccactaaagatacctatgatgcgctccacatgcaggccctgccgccaaga

SEQ ID NO: 7586 - DNA, 1935 bp, Artificial Sequence
  Synthetic Polynucloetide
atggccttaccagtgaccgccttgctcctgccgctggccttgctgctccacgccgccaggccgagctacgtgctgacacagcctccatccgtgtctgtggctccaggacagaccgccagaatcacatgcggcggcaacaacatcggcagcaagagcgtgcactggtatcagcagccacctggacaggctccagtggtggtggtgtacgacgacagcgatagacctagcggcatccccgagagattcagcggcagcaattccggcaataccgccacactgaccatcagcagagtggaagctggcgacgaggccgtgtactactgccaagtgtgggacagcagcagcgatcacgtggtgtttggcggcggaacaaagctgacagtgcttggcggaggcggaagtggaggcggaggatctggcggcggaggctctcaactccagctgcaagagtctggccctggcctggtcaagcctagcgaaacactgagcctgacctgtaccgtgtctggcggctctatcagctccggcagctatttctggggctggatcagacaacctcctggcaaaggactggaatggatcggctccatctactacagcggcatcacctactacaaccccagcctgaagtccagagtgaccatctccgtggacaccagcaagaaccagttctccctgaagctgagcagcgtgacagccgccgataccgccgtgtattattgtgccagacatgacggcgctatggccggcctgtttgattattggggacagggcaccctggtcaccgtgtcatctgctacgcgtgggagcggcatccagaaccctgatcctgccgtgtaccagctgcgggatagcaagagcagcgacaagagcgtgtgtctgttcaccgacttcgacagccagaccaacgtgtcccagagcaaggactccgacgtgtacatcaccgataagaccgtgctggacatgcggagcatggacttcaagagcaactccgccgtggcctggtccaacaagtccgatttcgcctgcgccaacgccttcaacaacagcattatccccgaggacacattcttcccaagccccgagagcagctgcgacgtgaagctggtggaaaagagcttcgagacagacaccaacctgaacttccagaacctgagcgtgatcggcttcagaatcctgctgctgaaagtggccggctttaacctgctgatgaccctgcggctgtggtccagccgcgccaagagaagcggatctggcgtgaagcagaccctgaatttcgacctgctgaagctggctggcgacgtggaatccaacccaggcccttctagaggccatatgaccgagtacaagcccacggtgcgcctcgccacccgcgacgacgtccccagggccgtacgcaccctcgccgccgcgttcgccgactaccccgccacgcgccacaccgtcgatccggaccgccacatcgagcgggtcaccgagctgcaagaactcttcctcacgcgcgtcgggctcgacatcggcaaggtgtgggtcgcggacgacggcgccgcggtggcggtctggaccacgccggagagcgtcgaagcgggggcggtgttcgccgagatcggcccgcgcatggccgagttgagcggttcccggctggccgcgcagcaacagatggaaggcctcctggcgccgcaccggcccaaggagcccgcgtggttcctggccaccgtcggcgtctcgcccgaccaccagggcaagggtctgggcagcgccgtcgtgctccccggagtggaggcggccgagcgcgccggggtgcccgccttcctggagacctccgcgccccgcaacctccccttctacgagcggctcggcttcaccgtcaccgccgacgtcgaggtgcccgaaggaccgcgcacctggtgcatgacccgcaagcccggtgcctga

SEQ ID NO: 7587 - DNA, 2031 bp, Artificial Sequence
  Synthetic Polynucloetide
atggccttaccagtgaccgccttgctcctgccgctggccttgctgctccacgccgccaggccgagctacgtgctgacacagcctccatccgtgtctgtggctccaggacagaccgccagaatcacatgcggcggcaacaacatcggcagcaagagcgtgcactggtatcagcagccacctggacaggctccagtggtggtggtgtacgacgacagcgatagacctagcggcatccccgagagattcagcggcagcaattccggcaataccgccacactgaccatcagcagagtggaagctggcgacgaggccgtgtactactgccaagtgtgggacagcagcagcgatcacgtggtgtttggcggcggaacaaagctgacagtgcttggcggaggcggaagtggaggcggaggatctggcggcggaggctctcaactccagctgcaagagtctggccctggcctggtcaagcctagcgaaacactgagcctgacctgtaccgtgtctggcggctctatcagctccggcagctatttctggggctggatcagacaacctcctggcaaaggactggaatggatcggctccatctactacagcggcatcacctactacaaccccagcctgaagtccagagtgaccatctccgtggacaccagcaagaaccagttctccctgaagctgagcagcgtgacagccgccgataccgccgtgtattattgtgccagacatgacggcgctatggccggcctgtttgattattggggacagggcaccctggtcaccgtgtcatctgctctcgaggacctgaagaacgtgttcccacctgaggtggccgtgttcgagcctagcgaggccgagatcagccacacccagaaagccaccctcgtgtgcctggctaccggcttctaccccgaccatgtggaactgtcttggtgggtcaacggcaaagaggtgcacagcggcgtgtctaccgacccccagccactgaaagaacagcccgccctgaacgacagccggtactgcctgagcagcagactgagagtgtccgccaccttctggcagaacccccggaaccacttcagatgccaggtgcagttctacggcctgagcgagaacgacgagtggacccaggacagagccaagcccgtgacccagatcgtgtctgccgaagcctggggcagagccgattgcggctttaccagcgagagctaccagcagggcgtgctgagcgccaccatcctgtacgagatcctgctgggcaaggccaccctgtacgccgtgctggtgtctgccctggtgctgatggctatggtcaagcggaaggacagccggggaagggccaagcgatctggatctggagcaacaaacttctcactactcaaacaagcaggtgacgtggaggagaatcccgggcctactagaggccatatgaccgagtacaagcccacggtgcgcctcgccacccgcgacgacgtccccagggccgtacgcaccctcgccgccgcgttcgccgactaccccgccacgcgccacaccgtcgatccggaccgccacatcgagcgggtcaccgagctgcaagaactcttcctcacgcgcgtcgggctcgacatcggcaaggtgtgggtcgcggacgacggcgccgcggtggcggtctggaccacgccggagagcgtcgaagcgggggcggtgttcgccgagatcggcccgcgcatggccgagttgagcggttcccggctggccgcgcagcaacagatggaaggcctcctggcgccgcaccggcccaaggagcccgcgtggttcctggccaccgtcggcgtctcgcccgaccaccagggcaagggtctgggcagcgccgtcgtgctccccggagtggaggcggccgagcgcgccggggtgcccgccttcctggagacctccgcgccccgcaacctccccttctacgagcggctcggcttcaccgtcaccgccgacgtcgaggtgcccgaaggaccgcgcacctggtgcatgacccgcaagcccggtgcctga

SEQ ID NO: 7588 - DNA, 2181 bp, Artificial Sequence
  Synthetic Polynucloetide
atggccttaccagtgaccgccttgctcctgccgctggccttgctgctccacgccgccaggccgagctacgtgctgacacagcctccatccgtgtctgtggctccaggacagaccgccagaatcacatgcggcggcaacaacatcggcagcaagagcgtgcactggtatcagcagccacctggacaggctccagtggtggtggtgtacgacgacagcgatagacctagcggcatccccgagagattcagcggcagcaattccggcaataccgccacactgaccatcagcagagtggaagctggcgacgaggccgtgtactactgccaagtgtgggacagcagcagcgatcacgtggtgtttggcggcggaacaaagctgacagtgcttggcggaggcggaagtggaggcggaggatctggcggcggaggctctcaactccagctgcaagagtctggccctggcctggtcaagcctagcgaaacactgagcctgacctgtaccgtgtctggcggctctatcagctccggcagctatttctggggctggatcagacaacctcctggcaaaggactggaatggatcggctccatctactacagcggcatcacctactacaaccccagcctgaagtccagagtgaccatctccgtggacaccagcaagaaccagttctccctgaagctgagcagcgtgacagccgccgataccgccgtgtattattgtgccagacatgacggcgctatggccggcctgtttgattattggggacagggcaccctggtcaccgtgtcatctgctacgcgtgagcagaaactgatctcggaagaggatctggggagcggcaccccattcccttctctggcccctcccatcatgctgctggtggacggcaagcagcagatggtggtcgtgtgcctggtgctggatgtggccccacctggactggacagccccatctggtttagcgccggcaatggctctgccctggacgcctttacctacggcccaagccctgccaccgatggcacctggacaaatctggcccacctgagcctgcccagcgaggaactggcttcttgggagcctctcgtgtgccacacaggacctggcgctgagggacacagcagatccacccagcctatgcacctgtctggcgaggccagcaccgccagaacctgtcctcaggaacctctgagaggcacccctggcggagcactgtggctgggagtgctgagactgctgctgttcaagctgctgctgtttgacctgctgctgacctgctcctgtctgtgcgatcctgccggccctctgccttctcctgccaccaccacaagactgagagccctgggcagccacagactgcaccctgccacagagacaggcggcagagaggccacaagcagccctagaccccagcccagagacagaagatggggcgataccccccctggcagaaagcctggatctccagtccgcgccaagagaagcggatctggcgtgaagcagaccctgaatttcgacctgctgaagctggctggcgacgtggaatccaacccaggcccttctagatctagaggccatatgaccgagtacaagcccacggtgcgcctcgccacccgcgacgacgtccccagggccgtacgcaccctcgccgccgcgttcgccgactaccccgccacgcgccacaccgtcgatccggaccgccacatcgagcgggtcaccgagctgcaagaactcttcctcacgcgcgtcgggctcgacatcggcaaggtgtgggtcgcggacgacggcgccgcggtggcggtctggaccacgccggagagcgtcgaagcgggggcggtgttcgccgagatcggcccgcgcatggccgagttgagcggttcccggctggccgcgcagcaacagatggaaggcctcctggcgccgcaccggcccaaggagcccgcgtggttcctggccaccgtcggcgtctcgcccgaccaccagggcaagggtctgggcagcgccgtcgtgctccccggagtggaggcggccgagcgcgccggggtgcccgccttcctggagacctccgcgccccgcaacctccccttctacgagcggctcggcttcaccgtcaccgccgacgtcgaggtgcccgaaggaccgcgcacctggtgcatgacccgcaagcccggtgcctga

SEQ ID NO: 7589 - DNA, 1620 bp, Artificial Sequence; identical to SEQ ID NO: 7451
  Synthetic Polynucloetide

SEQ ID NO: 7590 - DNA, 927 bp, Artificial Sequence; identical to SEQ ID NO: 7452
  Synthetic Polynucloetide

SEQ ID NO: 7591 - DNA, 1356 bp, Artificial Sequence
  Synthetic Polynucloetide
atggactggatttggcgcatccttttccttgtcggcgctgctaccggcgcgcattccttcgaacaactccagctgcaagagtctggccctggcctggtcaagcctagcgaaacactgagcctgacctgtaccgtgtctggcggctctatcagctccggcagctatttctggggctggatcagacaacctcctggcaaaggactggaatggatcggctccatctactacagcggcatcacctactacaaccccagcctgaagtccagagtgaccatctccgtggacaccagcaagaaccagttctccctgaagctgagcagcgtgacagccgccgataccgccgtgtattattgtgccagacatgacggcgctatggccggcctgtttgattattggggacagggcaccctggtcaccgtgtcatctgctacgcgtatccagaaccctgatcctgccgtgtaccagctgcgggatagcaagagcagcgacaagagcgtgtgtctgttcaccgacttcgacagccagaccaacgtgtcccagagcaaggactccgacgtgtacatcaccgataagaccgtgctggacatgcggagcatggacttcaagagcaactccgccgtggcctggtccaacaagtccgatttcgcctgcgccaacgccttcaacaacagcattatccccgaggacacattcttcccaagccccgagagcagctgcgacgtgaagctggtggaaaagagcttcgagacagacaccaacctgaacttccagaacctgagcgtgatcggcttcagaatcctgctgctgaaagtggccggctttaacctgctgatgaccctgcggctgtggtccagccgcgccaagagaagcggatctggcgtgaagcagaccctgaatttcgacctgctgaagctggctggcgacgtggaatccaacccaggcccttctagaggccatatggccaagcctttgtctcaagaagaatccaccctcattgaaagagcaacggctacaatcaacagcatccccatctctgaagactacagcgtcgccagcgcagctctctctagcgacggccgcatcttcactggtgtcaatgtatatcattttactgggggaccttgtgcagaactcgtggtgctgggcactgctgctgctgcggcagctggcaacctgacttgtatcgtcgcgatcggaaatgagaacaggggcatcttgagcccctgcggacggtgccgacaggtgcttctcgatctgcatcctgggatcaaagccatagtgaaggacagtgatggacagccgacggcagttgggattcgtgaattgctgccctctggttatgtgtgggagggctga

SEQ ID NO: 7592 - DNA, 855 bp, Artificial Sequence
  Synthetic Polynucloetide
atggactggatttggcgcatccttttccttgtcggcgctgctaccggcgcgcattccttcgaacaactccagctgcaagagtctggccctggcctggtcaagcctagcgaaacactgagcctgacctgtaccgtgtctggcggctctatcagctccggcagctatttctggggctggatcagacaacctcctggcaaaggactggaatggatcggctccatctactacagcggcatcacctactacaaccccagcctgaagtccagagtgaccatctccgtggacaccagcaagaaccagttctccctgaagctgagcagcgtgacagccgccgataccgccgtgtattattgtgccagacatgacggcgctatggccggcctgtttgattattggggacagggcaccctggtcaccgtgtcatctgctacgcgtatccagaaccctgatcctgccgtgtaccagctgcgggatagcaagagcagcgacaagagcgtgtgtctgttcaccgacttcgacagccagaccaacgtgtcccagagcaaggactccgacgtgtacatcaccgataagaccgtgctggacatgcggagcatggacttcaagagcaactccgccgtggcctggtccaacaagtccgatttcgcctgcgccaacgccttcaacaacagcattatccccgaggacacattcttcccaagccccgagagcagctgcgacgtgaagctggtggaaaagagcttcgagacagacaccaacctgaacttccagaacctgagcgtgatcggcttcagaatcctgctgctgaaagtggccggctttaacctgctgatgaccctgcggctgtggtccagc

SEQ ID NO: 7593 - DNA, 1674 bp, Artificial Sequence; identical to SEQ ID NO: 7455
  Synthetic Polynucloetide

SEQ ID NO: 7594 - DNA, 984 bp, Artificial Sequence; identical to SEQ ID NO: 7456
  Synthetic Polynucloetide

SEQ ID NO: 7595 - DNA, 1392 bp, Artificial Sequence
  Synthetic Polynucloetide
atggactggatttggcgcatccttttccttgtcggcgctgctaccggcgcgcattccttcgaacaactccagctgcaagagtctggccctggcctggtcaagcctagcgaaacactgagcctgacctgtaccgtgtctggcggctctatcagctccggcagctatttctggggctggatcagacaacctcctggcaaaggactggaatggatcggctccatctactacagcggcatcacctactacaaccccagcctgaagtccagagtgaccatctccgtggacaccagcaagaaccagttctccctgaagctgagcagcgtgacagccgccgataccgccgtgtattattgtgccagacatgacggcgctatggccggcctgtttgattattggggacagggcaccctggtcaccgtgtcatctgctacgcgtgagcagaaactgatctcggaagaggatgggagcggcatccagaaccctgatcctgccgtgtaccagctgcgggatagcaagagcagcgacaagagcgtgtgtctgttcaccgacttcgacagccagaccaacgtgtcccagagcaaggactccgacgtgtacatcaccgataagtgcgtgctggacatgcggagcatggacttcaagagcaactccgccgtggcctggtccaacaagtccgatttcgcctgcgccaacgccttcaacaacagcattatccccgaggacacattcttcccaagccccgagagcagctgcgacgtgaagctggtggaaaagagcttcgagacagacaccaacctgaacttccagaacctgagcgtgatcggcttcagaatcctgctgctgaaagtggccggctttaacctgctgatgaccctgcggctgtggtccagccgcgccaagagaagcggatctggcgtgaagcagaccctgaatttcgacctgctgaagctggctggcgacgtggaatccaacccaggcccttctagaggccatatggccaagcctttgtctcaagaagaatccaccctcattgaaagagcaacggctacaatcaacagcatccccatctctgaagactacagcgtcgccagcgcagctctctctagcgacggccgcatcttcactggtgtcaatgtatatcattttactgggggaccttgtgcagaactcgtggtgctgggcactgctgctgctgcggcagctggcaacctgacttgtatcgtcgcgatcggaaatgagaacaggggcatcttgagcccctgcggacggtgccgacaggtgcttctcgatctgcatcctgggatcaaagccatagtgaaggacagtgatggacagccgacggcagttgggattcgtgaattgctgccctctggttatgtgtgggagggctga

SEQ ID NO: 7596 - DNA, 894 bp, Artificial Sequence
  Synthetic Polynucloetide
atggactggatttggcgcatccttttccttgtcggcgctgctaccggcgcgcattccttcgaacaactccagctgcaagagtctggccctggcctggtcaagcctagcgaaacactgagcctgacctgtaccgtgtctggcggctctatcagctccggcagctatttctggggctggatcagacaacctcctggcaaaggactggaatggatcggctccatctactacagcggcatcacctactacaaccccagcctgaagtccagagtgaccatctccgtggacaccagcaagaaccagttctccctgaagctgagcagcgtgacagccgccgataccgccgtgtattattgtgccagacatgacggcgctatggccggcctgtttgattattggggacagggcaccctggtcaccgtgtcatctgctacgcgtgagcagaaactgatctcggaagaggatgggagcggcatccagaaccctgatcctgccgtgtaccagctgcgggatagcaagagcagcgacaagagcgtgtgtctgttcaccgacttcgacagccagaccaacgtgtcccagagcaaggactccgacgtgtacatcaccgataagtgcgtgctggacatgcggagcatggacttcaagagcaactccgccgtggcctggtccaacaagtccgatttcgcctgcgccaacgccttcaacaacagcattatccccgaggacacattcttcccaagccccgagagcagctgcgacgtgaagctggtggaaaagagcttcgagacagacaccaacctgaacttccagaacctgagcgtgatcggcttcagaatcctgctgctgaaagtggccggctttaacctgctgatgaccctgcggctgtggtccagctga

SEQ ID NO: 7597 - DNA, 1935 bp, Artificial Sequence
  Synthetic Polynucloetide
atggccttaccagtgaccgccttgctcctgccgctggccttgctgctccacgccgccaggccgagctacgtgctgacacagcctccatccgtgtctgtggctccaggacagaccgccagaatcacatgcggcggcaacaacatcggcagcaagagcgtgcactggtatcagcagccacctggacaggctccagtggtggtggtgtacgacgacagcgatagacctagcggcatccccgagagattcagcggcagcaattccggcaataccgccacactgaccatcagcagagtggaagctggcgacgaggccgtgtactactgccaagtgtgggacagcagcagcgatcacgtggtgtttggcggcggaacaaagctgacagtgcttggcggaggcggaagtggaggcggaggatctggcggcggaggctctcaactccagctgcaagagtctggccctggcctggtcaagcctagcgaaacactgagcctgacctgtaccgtgtctggcggctctatcagctccggcagctatttctggggctggatcagacaacctcctggcaaaggactggaatggatcggctccatctactacagcggcatcacctactacaaccccagcctgaagtccagagtgaccatctccgtggacaccagcaagaaccagttctccctgaagctgagcagcgtgacagccgccgataccgccgtgtattattgtgccagacatgacggcgctatggccggcctgtttgattattggggacagggcaccctggtcaccgtgtcatctgctacgcgtgggagcggcatccagaaccctgatcctgccgtgtaccagctgcgggatagcaagagcagcgacaagagcgtgtgtctgttcaccgacttcgacagccagaccaacgtgtcccagagcaaggactccgacgtgtacatcaccgataagaccgtgctggacatgcggagcatggacttcaagagcaactccgccgtggcctggtccaacaagtccgatttcgcctgcgccaacgccttcaacaacagcattatccccgaggacacattcttcccaagcagcgacgtgccctgcgacgtgaagctggtggaaaagagcttcgagacagacaccaacctgaacttccagaacctgagcgtgatcggcttcagaatcctgctgctgaaagtggccggctttaacctgctgatgaccctgcggctgtggtccagccgcgccaagagaagcggatctggcgtgaagcagaccctgaatttcgacctgctgaagctggctggcgacgtggaatccaacccaggcccttctagaggccatatgaccgagtacaagcccacggtgcgcctcgccacccgcgacgacgtccccagggccgtacgcaccctcgccgccgcgttcgccgactaccccgccacgcgccacaccgtcgatccggaccgccacatcgagcgggtcaccgagctgcaagaactcttcctcacgcgcgtcgggctcgacatcggcaaggtgtgggtcgcggacgacggcgccgcggtggcggtctggaccacgccggagagcgtcgaagcgggggcggtgttcgccgagatcggcccgcgcatggccgagttgagcggttcccggctggccgcgcagcaacagatggaaggcctcctggcgccgcaccggcccaaggagcccgcgtggttcctggccaccgtcggcgtctcgcccgaccaccagggcaagggtctgggcagcgccgtcgtgctccccggagtggaggcggccgagcgcgccggggtgcccgccttcctggagacctccgcgccccgcaacctccccttctacgagcggctcggcttcaccgtcaccgccgacgtcgaggtgcccgaaggaccgcgcacctggtgcatgacccgcaagcccggtgcctga

SEQ ID NO: 7598 - DNA, 2031 bp, Artificial Sequence
  Synthetic Polynucloetide
atggccttaccagtgaccgccttgctcctgccgctggccttgctgctccacgccgccaggccgagctacgtgctgacacagcctccatccgtgtctgtggctccaggacagaccgccagaatcacatgcggcggcaacaacatcggcagcaagagcgtgcactggtatcagcagccacctggacaggctccagtggtggtggtgtacgacgacagcgatagacctagcggcatccccgagagattcagcggcagcaattccggcaataccgccacactgaccatcagcagagtggaagctggcgacgaggccgtgtactactgccaagtgtgggacagcagcagcgatcacgtggtgtttggcggcggaacaaagctgacagtgcttggcggaggcggaagtggaggcggaggatctggcggcggaggctctcaactccagctgcaagagtctggccctggcctggtcaagcctagcgaaacactgagcctgacctgtaccgtgtctggcggctctatcagctccggcagctatttctggggctggatcagacaacctcctggcaaaggactggaatggatcggctccatctactacagcggcatcacctactacaaccccagcctgaagtccagagtgaccatctccgtggacaccagcaagaaccagttctccctgaagctgagcagcgtgacagccgccgataccgccgtgtattattgtgccagacatgacggcgctatggccggcctgtttgattattggggacagggcaccctggtcaccgtgtcatctgctctcgaggacctgaagaacgtgttcccacctgaggtggccgtgttcgagcctagcaaggccgagatcgcccacacccagaaagccaccctcgtgtgcctggctaccggcttctaccccgaccatgtggaactgtcttggtgggtcaacggcaaagaggtgcacagcggcgtgtctaccgacccccagccactgaaagaacagcccgccctgaacgacagccggtactgcctgagcagcagactgagagtgtccgccaccttctggcagaacccccggaaccacttcagatgccaggtgcagttctacggcctgagcgagaacgacgagtggacccaggacagagccaagcccgtgacccagatcgtgtctgccgaagcctggggcagagccgattgcggcatcaccagcgccagctaccaccagggcgtgctgagcgccaccatcctgtacgagatcctgctgggcaaggccaccctgtacgccgtgctggtgtctgccctggtgctgatggctatggtcaagcggaaggacagccggggaagggccaagcgatctggatctggagcaacaaacttctcactactcaaacaagcaggtgacgtggaggagaatcccgggcctactagaggccatatgaccgagtacaagcccacggtgcgcctcgccacccgcgacgacgtccccagggccgtacgcaccctcgccgccgcgttcgccgactaccccgccacgcgccacaccgtcgatccggaccgccacatcgagcgggtcaccgagctgcaagaactcttcctcacgcgcgtcgggctcgacatcggcaaggtgtgggtcgcggacgacggcgccgcggtggcggtctggaccacgccggagagcgtcgaagcgggggcggtgttcgccgagatcggcccgcgcatggccgagttgagcggttcccggctggccgcgcagcaacagatggaaggcctcctggcgccgcaccggcccaaggagcccgcgtggttcctggccaccgtcggcgtctcgcccgaccaccagggcaagggtctgggcagcgccgtcgtgctccccggagtggaggcggccgagcgcgccggggtgcccgccttcctggagacctccgcgccccgcaacctccccttctacgagcggctcggcttcaccgtcaccgccgacgtcgaggtgcccgaaggaccgcgcacctggtgcatgacccgcaagcccggtgcctga

SEQ ID NO: 7599 - DNA, 2100 bp, Artificial Sequence
  Synthetic Polynucloetide
atggccttaccagtgaccgccttgctcctgccgctggccttgctgctccacgccgccaggccgagctacgtgctgacacagcctccatccgtgtctgtggctccaggacagaccgccagaatcacatgcggcggcaacaacatcggcagcaagagcgtgcactggtatcagcagccacctggacaggctccagtggtggtggtgtacgacgacagcgatagacctagcggcatccccgagagattcagcggcagcaattccggcaataccgccacactgaccatcagcagagtggaagctggcgacgaggccgtgtactactgccaagtgtgggacagcagcagcgatcacgtggtgtttggcggcggaacaaagctgacagtgcttggcggaggcggaagtggaggcggaggatctggcggcggaggctctcaactccagctgcaagagtctggccctggcctggtcaagcctagcgaaacactgagcctgacctgtaccgtgtctggcggctctatcagctccggcagctatttctggggctggatcagacaacctcctggcaaaggactggaatggatcggctccatctactacagcggcatcacctactacaaccccagcctgaagtccagagtgaccatctccgtggacaccagcaagaaccagttctccctgaagctgagcagcgtgacagccgccgataccgccgtgtattattgtgccagacatgacggcgctatggccggcctgtttgattattggggacagggcaccctggtcaccgtgtcatctgctacgcgtgggtctggaggcggaggcagcggcggaggcgggagcggcgacggtaacgaggagatgggaggaatcactcaaaccccttacaaagtctcaatttcaggaacaactgttatccttacatgtccccagtatcctggcagcgagatcctttggcagcataacgacaagaatatagggggagatgaagacgataagaatatcggatctgacgaggatcacttgagcctgaaagagttctccgagcttgaacaaagcggatattatgtgtgctatccgcgcgggtcaaagccggaagacgctaacttttacctttatctccgagccagagtgtgcgaaaattgcatggaaatggacgttatgtccgttgctacaatagttatcgtagatatatgcatcacgggtggactgcttctgctggtttattattggtccaagaatagaaaggccaaagctaaacccgtgaccagaggcgctggcgcaggcggaaggcaaaggggacaaaacaaagaacggccaccaccagtgccaaatccagattatgagcctattcggaaaggacagagggacctgtactctggcctgaatcagagaagaatccgcgccaagagaagcggatctggcgtgaagcagaccctgaatttcgacctgctgaagctggctggcgacgtggaatccaacccaggcccttctagaggccatatgaccgagtacaagcccacggtgcgcctcgccacccgcgacgacgtccccagggccgtacgcaccctcgccgccgcgttcgccgactaccccgccacgcgccacaccgtcgatccggaccgccacatcgagcgggtcaccgagctgcaagaactcttcctcacgcgcgtcgggctcgacatcggcaaggtgtgggtcgcggacgacggcgccgcggtggcggtctggaccacgccggagagcgtcgaagcgggggcggtgttcgccgagatcggcccgcgcatggccgagttgagcggttcccggctggccgcgcagcaacagatggaaggcctcctggcgccgcaccggcccaaggagcccgcgtggttcctggccaccgtcggcgtctcgcccgaccaccagggcaagggtctgggcagcgccgtcgtgctccccggagtggaggcggccgagcgcgccggggtgcccgccttcctggagacctccgcgccccgcaacctccccttctacgagcggctcggcttcaccgtcaccgccgacgtcgaggtgcccgaaggaccgcgcacctggtgcatgacccgcaagcccggtgcctga

SEQ ID NO: 7600 - DNA, 1995 bp, Artificial Sequence
  Synthetic Polynucloetide
atggccttaccagtgaccgccttgctcctgccgctggccttgctgctccacgccgccaggccgagctacgtgctgacacagcctccatccgtgtctgtggctccaggacagaccgccagaatcacatgcggcggcaacaacatcggcagcaagagcgtgcactggtatcagcagccacctggacaggctccagtggtggtggtgtacgacgacagcgatagacctagcggcatccccgagagattcagcggcagcaattccggcaataccgccacactgaccatcagcagagtggaagctggcgacgaggccgtgtactactgccaagtgtgggacagcagcagcgatcacgtggtgtttggcggcggaacaaagctgacagtgcttggcggaggcggaagtggaggcggaggatctggcggcggaggctctcaactccagctgcaagagtctggccctggcctggtcaagcctagcgaaacactgagcctgacctgtaccgtgtctggcggctctatcagctccggcagctatttctggggctggatcagacaacctcctggcaaaggactggaatggatcggctccatctactacagcggcatcacctactacaaccccagcctgaagtccagagtgaccatctccgtggacaccagcaagaaccagttctccctgaagctgagcagcgtgacagccgccgataccgccgtgtattattgtgccagacatgacggcgctatggccggcctgtttgattattggggacagggcaccctggtcaccgtgtcatctgctacgcgtgggtctggaggcggaggcagcggcggaggcgggagcggcttcaagatccccatcgaggaactggaagatcgggtgttcgtgaactgcaacacctctatcacctgggtggaaggcaccgtgggaacactgctgagcgacatcaccagactggacctcggcaagcggattctggaccctcggggcatctacagatgcaacggcaccgacatctacaaggacaaagaaagcaccgtgcaggtccactacagaatgtgccagtcctgcgtggaactggaccctgctacagtggccggcatcatcgtgaccgatgtgatcgctactctgctgctggctctgggagtgttctgcttcgccggacacgaaacaggcagactgtctggcgctgccgatacacaggccctgctgagaaacgaccaagtgtatcagcccctgcgcgacagagatgatgcccagtattctcacctcggcggcaactgggctagaaacaagcgcgccaagagaagcggatctggcgtgaagcagaccctgaatttcgacctgctgaagctggctggcgacgtggaatccaacccaggcccttctagaggccatatgaccgagtacaagcccacggtgcgcctcgccacccgcgacgacgtccccagggccgtacgcaccctcgccgccgcgttcgccgactaccccgccacgcgccacaccgtcgatccggaccgccacatcgagcgggtcaccgagctgcaagaactcttcctcacgcgcgtcgggctcgacatcggcaaggtgtgggtcgcggacgacggcgccgcggtggcggtctggaccacgccggagagcgtcgaagcgggggcggtgttcgccgagatcggcccgcgcatggccgagttgagcggttcccggctggccgcgcagcaacagatggaaggcctcctggcgccgcaccggcccaaggagcccgcgtggttcctggccaccgtcggcgtctcgcccgaccaccagggcaagggtctgggcagcgccgtcgtgctccccggagtggaggcggccgagcgcgccggggtgcccgccttcctggagacctccgcgccccgcaacctccccttctacgagcggctcggcttcaccgtcaccgccgacgtcgaggtgcccgaaggaccgcgcacctggtgcatgacccgcaagcccggtgcctga

SEQ ID NO: 7601 - DNA, 2025 bp, Artificial Sequence
  Synthetic Polynucloetide
atggccttaccagtgaccgccttgctcctgccgctggccttgctgctccacgccgccaggccgagctacgtgctgacacagcctccatccgtgtctgtggctccaggacagaccgccagaatcacatgcggcggcaacaacatcggcagcaagagcgtgcactggtatcagcagccacctggacaggctccagtggtggtggtgtacgacgacagcgatagacctagcggcatccccgagagattcagcggcagcaattccggcaataccgccacactgaccatcagcagagtggaagctggcgacgaggccgtgtactactgccaagtgtgggacagcagcagcgatcacgtggtgtttggcggcggaacaaagctgacagtgcttggcggaggcggaagtggaggcggaggatctggcggcggaggctctcaactccagctgcaagagtctggccctggcctggtcaagcctagcgaaacactgagcctgacctgtaccgtgtctggcggctctatcagctccggcagctatttctggggctggatcagacaacctcctggcaaaggactggaatggatcggctccatctactacagcggcatcacctactacaaccccagcctgaagtccagagtgaccatctccgtggacaccagcaagaaccagttctccctgaagctgagcagcgtgacagccgccgataccgccgtgtattattgtgccagacatgacggcgctatggccggcctgtttgattattggggacagggcaccctggtcaccgtgtcatctgctacgcgtgggtctggaggcggaggcagcggcggaggcgggagcggccagagcatcaagggcaaccacctggtcaaggtgtacgactaccaagaggacggcagcgtgctgctgacatgtgatgccgaggccaagaacatcacctggtttaaggacggcaagatgatcggcttcctgaccgaggacaagaagaagtggaacctgggcagcaacgctaaggaccccagaggcatgtatcagtgcaagggcagccagaacaagagcaagcccctccaggtgtactaccggatgtgccagaactgcatcgagctgaacgccgctaccatcagcggctttctgttcgccgagatcgtgtccatcttcgtgctggccgtgggcgtgtactttatcgctggacaggatggcgtgcggcagagcagagcttccgataagcaaaccctgctgcctaacgaccagctgtaccagcctctgaaggacagagaggacgaccagtacagccacctccagggcaatcagctgagaagaaaccgcgccaagagaagcggatctggcgtgaagcagaccctgaatttcgacctgctgaagctggctggcgacgtggaatccaacccaggcccttctagaggccatatgaccgagtacaagcccacggtgcgcctcgccacccgcgacgacgtccccagggccgtacgcaccctcgccgccgcgttcgccgactaccccgccacgcgccacaccgtcgatccggaccgccacatcgagcgggtcaccgagctgcaagaactcttcctcacgcgcgtcgggctcgacatcggcaaggtgtgggtcgcggacgacggcgccgcggtggcggtctggaccacgccggagagcgtcgaagcgggggcggtgttcgccgagatcggcccgcgcatggccgagttgagcggttcccggctggccgcgcagcaacagatggaaggcctcctggcgccgcaccggcccaaggagcccgcgtggttcctggccaccgtcggcgtctcgcccgaccaccagggcaagggtctgggcagcgccgtcgtgctccccggagtggaggcggccgagcgcgccggggtgcccgccttcctggagacctccgcgccccgcaacctccccttctacgagcggctcggcttcaccgtcaccgccgacgtcgaggtgcccgaaggaccgcgcacctggtgcatgacccgcaagcccggtgcctga

SEQ ID NO: 7602 - DNA, 1974 bp, Artificial Sequence
  Synthetic Polynucloetide
atggccttaccagtgaccgccttgctcctgccgctggccttgctgctccacgccgccaggccgagctacgtgctgacacagcctccatccgtgtctgtggctccaggacagaccgccagaatcacatgcggcggcaacaacatcggcagcaagagcgtgcactggtatcagcagccacctggacaggctccagtggtggtggtgtacgacgacagcgatagacctagcggcatccccgagagattcagcggcagcaattccggcaataccgccacactgaccatcagcagagtggaagctggcgacgaggccgtgtactactgccaagtgtgggacagcagcagcgatcacgtggtgtttggcggcggaacaaagctgacagtgcttggcggaggcggaagtggaggcggaggatctggcggcggaggctctcaactccagctgcaagagtctggccctggcctggtcaagcctagcgaaacactgagcctgacctgtaccgtgtctggcggctctatcagctccggcagctatttctggggctggatcagacaacctcctggcaaaggactggaatggatcggctccatctactacagcggcatcacctactacaaccccagcctgaagtccagagtgaccatctccgtggacaccagcaagaaccagttctccctgaagctgagcagcgtgacagccgccgataccgccgtgtattattgtgccagacatgacggcgctatggccggcctgtttgattattggggacagggcaccctggtcaccgtgtcatctgctacgcgtgggtctggaggcggaggcagcggcggaggcgggagcggccagagttttgggttgttggaccctaaattgtgctatctgttggacggaatcctgttcatttacggagtgatcctgaccgcattgttcctgcgggttaagttttccagatccgcagacgcacccgcttaccaacaagggcagaaccaactctacaatgaacttaatttggggcggagggaagagtacgacgttctggacaaaaggaggggacgagatcccgagatgggcggaaagcctcagcgaaggaagaatccgcaagaggggctttataacgaactccagaaagataaaatggcagaagcctatagtgagattgggatgaagggagaaaggaggaggggtaaaggtcacgatgggttgtaccaaggattgagcacagccactaaagatacctatgatgcgctccacatgcaggccctgccgccaagacgcgccaagagaagcggatctggcgtgaagcagaccctgaatttcgacctgctgaagctggctggcgacgtggaatccaacccaggcccttctagaggccatatgaccgagtacaagcccacggtgcgcctcgccacccgcgacgacgtccccagggccgtacgcaccctcgccgccgcgttcgccgactaccccgccacgcgccacaccgtcgatccggaccgccacatcgagcgggtcaccgagctgcaagaactcttcctcacgcgcgtcgggctcgacatcggcaaggtgtgggtcgcggacgacggcgccgcggtggcggtctggaccacgccggagagcgtcgaagcgggggcggtgttcgccgagatcggcccgcgcatggccgagttgagcggttcccggctggccgcgcagcaacagatggaaggcctcctggcgccgcaccggcccaaggagcccgcgtggttcctggccaccgtcggcgtctcgcccgaccaccagggcaagggtctgggcagcgccgtcgtgctccccggagtggaggcggccgagcgcgccggggtgcccgccttcctggagacctccgcgccccgcaacctccccttctacgagcggctcggcttcaccgtcaccgccgacgtcgaggtgcccgaaggaccgcgcacctggtgcatgacccgcaagcccggtgcctga

SEQ ID NO: 7603 - DNA, 2274 bp, Artificial Sequence
  Synthetic Polynucloetide
atggccttaccagtgaccgccttgctcctgccgctggccttgctgctccacgccgccaggccggaagtgcagctggttgaatctggcggaggactggttcagcctggcggatctctgagactgtcttgtgccgccagcggcttcagcttcagcgacttttggatgagctgggtccgacaggcccctggcaaaggacttgaatgggtcgccacaatcagccaggccggcagcgagaaggactacgtggactctgtgaagggcagattcaccatcagccgggacaacgccaagaagtccctgtacctccagatgaacagcctgagagccgaggacaccgccgtgtactattgtgcctctggcgtgtacagcttcgactacagaggccagggcaccctggtcacagtctcttctggtaccggcggaggcggatctggcggcggaggtagcggtggcggaggatctgaattcagctacgtgctgacacagcctccatccgtgtctgtggctccaggacagaccgccagaatcacatgcggcggcaacaacatcggcagcaagagcgtgcactggtatcagcagccacctggacaggctccagtggtggtggtgtacgacgacagcgatagacctagcggcatccccgagagattcagcggcagcaattccggcaataccgccacactgaccatcagcagagtggaagctggcgacgaggccgtgtactactgccaagtgtgggacagcagcagcgatcacgtggtgtttggcggcggaacaaagctgacagtgcttctcgaggacctgaagaacgtgttcccacctgaggtggccgtgttcgagcctagcgaggccgagatcagccacacccagaaagccaccctcgtgtgcctggctaccggcttctaccccgaccatgtggaactgtcttggtgggtcaacggcaaagaggtgcacagcggcgtgtgtaccgacccccagccactgaaagaacagcccgccctgaacgacagccggtactgcctgagcagcagactgagagtgtccgccaccttctggcagaacccccggaaccacttcagatgccaggtgcagttctacggcctgagcgagaacgacgagtggacccaggacagagccaagcccgtgacccagatcgtgtctgccgaagcctggggcagagccgattgcggctttaccagcgagagctaccagcagggcgtgctgagcgccaccatcctgtacgagatcctgctgggcaaggccaccctgtacgccgtgctggtgtctgccctggtgctgatggctatggtcaagcggaaggacagccggggaagggccaagcgatctggatctggagcaacaaacttctcactactcaaacaagcaggtgacgtggaggagaatcccgggcctactagtatggactggatttggcgcatccttttccttgtcggcgctgctaccggcgcgcattccttcgaacaactccagctgcaagagtctggccctggcctggtcaagcctagcgaaacactgagcctgacctgtaccgtgtctggcggctctatcagctccggcagctatttctggggctggatcagacaacctcctggcaaaggactggaatggatcggctccatctactacagcggcatcacctactacaaccccagcctgaagtccagagtgaccatctccgtggacaccagcaagaaccagttctccctgaagctgagcagcgtgacagccgccgataccgccgtgtattattgtgccagacatgacggcgctatggccggcctgtttgattattggggacagggcaccctggtcaccgtgtcatctgctacgcgtatccagaaccctgatcctgccgtgtaccagctgcgggatagcaagagcagcgacaagagcgtgtgtctgttcaccgacttcgacagccagaccaacgtgtcccagagcaaggactccgacgtgtacatcaccgataagtgcgtgctggacatgcggagcatggacttcaagagcaactccgccgtggcctggtccaacaagtccgatttcgcctgcgccaacgccttcaacaacagcattatccccgaggacacattcttcccaagccccgagagcagctgcgacgtgaagctggtggaaaagagcttcgagacagacaccaacctgaacttccagaacctgagcgtgatcggcttcagaatcctgctgctgaaagtggccggctttaacctgctgatgaccctgcggctgtggtccagc

SEQ ID NO: 7604 - DNA, 2286 bp, Artificial Sequence
  Synthetic Polynucloetide
atggccttaccagtgaccgccttgctcctgccgctggccttgctgctccacgccgccaggccggaagtgcagctggttgaatctggcggaggactggttcagcctggcggatctctgagactgtcttgtgccgccagcggcttcagcttcagcgacttttggatgagctgggtccgacaggcccctggcaaaggacttgaatgggtcgccacaatcagccaggccggcagcgagaaggactacgtggactctgtgaagggcagattcaccatcagccgggacaacgccaagaagtccctgtacctccagatgaacagcctgagagccgaggacaccgccgtgtactattgtgcctctggcgtgtacagcttcgactacagaggccagggcaccctggtcacagtctcttctggtaccggcggaggcggatctggcggcggaggtagcggtggcggaggatctgaattcagctacgtgctgacacagcctccatccgtgtctgtggctccaggacagaccgccagaatcacatgcggcggcaacaacatcggcagcaagagcgtgcactggtatcagcagccacctggacaggctccagtggtggtggtgtacgacgacagcgatagacctagcggcatccccgagagattcagcggcagcaattccggcaataccgccacactgaccatcagcagagtggaagctggcgacgaggccgtgtactactgccaagtgtgggacagcagcagcgatcacgtggtgtttggcggcggaacaaagctgacagtgcttctcgagatccagaaccctgatcctgccgtgtaccagctgcgggatagcaagagcagcgacaagagcgtgtgtctgttcaccgacttcgacagccagaccaacgtgtcccagagcaaggactccgacgtgtacatcaccgataagtgcgtgctggacatgcggagcatggacttcaagagcaactccgccgtggcctggtccaacaagtccgatttcgcctgcgccaacgccttcaacaacagcattatccccgaggacacattcttcccaagccccgagagcagctgcgacgtgaagctggtggaaaagagcttcgagacagacaccaacctgaacttccagaacctgagcgtgatcggcttcagaatcctgctgctgaaagtggccggctttaacctgctgatgaccctgcggctgtggtccagccgcgccaagagaagcggatctggcgtgaagcagaccctgaatttcgacctgctgaagctggctggcgacgtggaatccaacccaggccctactagtatggactggatttggcgcatccttttccttgtcggcgctgctaccggcgcgcattccttcgaacaactccagctgcaagagtctggccctggcctggtcaagcctagcgaaacactgagcctgacctgtaccgtgtctggcggctctatcagctccggcagctatttctggggctggatcagacaacctcctggcaaaggactggaatggatcggctccatctactacagcggcatcacctactacaaccccagcctgaagtccagagtgaccatctccgtggacaccagcaagaaccagttctccctgaagctgagcagcgtgacagccgccgataccgccgtgtattattgtgccagacatgacggcgctatggccggcctgtttgattattggggacagggcaccctggtcaccgtgtcatctgctacgcgtgaggacctgaagaacgtgttcccacctgaggtggccgtgttcgagcctagcgaggccgagatcagccacacccagaaagccaccctcgtgtgcctggctaccggcttctaccccgaccatgtggaactgtcttggtgggtcaacggcaaagaggtgcacagcggcgtgtgtaccgacccccagccactgaaagaacagcccgccctgaacgacagccggtactgcctgagcagcagactgagagtgtccgccaccttctggcagaacccccggaaccacttcagatgccaggtgcagttctacggcctgagcgagaacgacgagtggacccaggacagagccaagcccgtgacccagatcgtgtctgccgaagcctggggcagagccgattgcggctttaccagcgagagctaccagcagggcgtgctgagcgccaccatcctgtacgagatcctgctgggcaaggccaccctgtacgccgtgctggtgtctgccctggtgctgatggctatggtcaagcggaaggacagccgggga

SEQ ID NO: 7605 - DNA, 2862 bp, Artificial Sequence
  Synthetic Polynucloetide
atggccttaccagtgaccgccttgctcctgccgctggccttgctgctccacgccgccaggccggaagtgcagctggttgaatctggcggaggactggttcagcctggcggatctctgagactgtcttgtgccgccagcggcttcagcttcagcgacttttggatgagctgggtccgacaggcccctggcaaaggacttgaatgggtcgccacaatcagccaggccggcagcgagaaggactacgtggactctgtgaagggcagattcaccatcagccgggacaacgccaagaagtccctgtacctccagatgaacagcctgagagccgaggacaccgccgtgtactattgtgcctctggcgtgtacagcttcgactacagaggccagggcaccctggtcacagtctcttctggtaccggcggaggcggatctggcggcggaggtagcggtggcggaggatctgaattcagctacgtgctgacacagcctccatccgtgtctgtggctccaggacagaccgccagaatcacatgcggcggcaacaacatcggcagcaagagcgtgcactggtatcagcagccacctggacaggctccagtggtggtggtgtacgacgacagcgatagacctagcggcatccccgagagattcagcggcagcaattccggcaataccgccacactgaccatcagcagagtggaagctggcgacgaggccgtgtactactgccaagtgtgggacagcagcagcgatcacgtggtgtttggcggcggaacaaagctgacagtgcttctcgaggacctgaagaacgtgttcccacctgaggtggccgtgttcgagcctagcgaggccgagatcagccacacccagaaagccaccctcgtgtgcctggctaccggcttctaccccgaccatgtggaactgtcttggtgggtcaacggcaaagaggtgcacagcggcgtgtctaccgacccccagccactgaaagaacagcccgccctgaacgacagccggtactgcctgagcagcagactgagagtgtccgccaccttctggcagaacccccggaaccacttcagatgccaggtgcagttctacggcctgagcgagaacgacgagtggacccaggacagagccaagcccgtgacccagatcgtgtctgccgaagcctggggcagagccgattgcggatcccagagcttcggcctgctggaccccaagctgtgctacctgctggatggcatcctgttcatctacggcgtgatcctgaccgccctgttcctgagagtgaagttcagcagaagcgccgacgcccctgcctaccagcagggacagaaccaactgtacaacgagctgaacctgggcagacgggaagagtacgacgtgctggacaagcggagaggcagggaccctgagatgggcggaaagccccagcggagaaagaacccccaggaaggactgtataacgaactccagaaagacaagatggccgaagcctacagcgagatcggcatgaagggcgagcggagaagaggcaagggccacgatggcctgtaccagggcctgagcaccgccaccaaggacacctatgacgccctgcacatgcaggccctgcctccaagaagggccaagcgatctggatctggagcaacaaacttctcactactcaaacaagcaggtgacgtggaggagaatcccgggcctactagtatggactggatttggcgcatccttttccttgtcggcgctgctaccggcgcgcattccttcgaacaactccagctgcaagagtctggccctggcctggtcaagcctagcgaaacactgagcctgacctgtaccgtgtctggcggctctatcagctccggcagctatttctggggctggatcagacaacctcctggcaaaggactggaatggatcggctccatctactacagcggcatcacctactacaaccccagcctgaagtccagagtgaccatctccgtggacaccagcaagaaccagttctccctgaagctgagcagcgtgacagccgccgataccgccgtgtattattgtgccagacatgacggcgctatggccggcctgtttgattattggggacagggcaccctggtcaccgtgtcatctgctacgcgtatccagaaccctgatcctgccgtgtaccagctgcgggatagcaagagcagcgacaagagcgtgtgtctgttcaccgacttcgacagccagaccaacgtgtcccagagcaaggactccgacgtgtacatcaccgataagaccgtgctggacatgcggagcatggacttcaagagcaactccgccgtggcctggtccaacaagtccgatttcgcctgcgccaacgccttcaacaacagcattatccccgaggacacattcttcccaagccccgagagcagctgcggtacccagagttttgggttgttggaccctaaattgtgctatctgttggacggaatcctgttcatttacggagtgatcctgaccgcattgttcctgcgggttaagttttccagatccgcagacgcacccgcttaccaacaagggcagaaccaactctacaatgaacttaatttggggcggagggaagagtacgacgttctggacaaaaggaggggacgagatcccgagatgggcggaaagcctcagcgaaggaagaatccgcaagaggggctttataacgaactccagaaagataaaatggcagaagcctatagtgagattgggatgaagggagaaaggaggaggggtaaaggtcacgatgggttgtaccaaggattgagcacagccactaaagatacctatgatgcgctccacatgcaggccctgccgccaaga

SEQ ID NO: 7606 - DNA, 2352 bp, Artificial Sequence
  Synthetic Polynucloetide
atggccttaccagtgaccgccttgctcctgccgctggccttgctgctccacgccgccaggccggaagtgcagctggttgaatctggcggaggactggttcagcctggcggatctctgagactgtcttgtgccgccagcggcttcagcttcagcgacttttggatgagctgggtccgacaggcccctggcaaaggacttgaatgggtcgccacaatcagccaggccggcagcgagaaggactacgtggactctgtgaagggcagattcaccatcagccgggacaacgccaagaagtccctgtacctccagatgaacagcctgagagccgaggacaccgccgtgtactattgtgcctctggcgtgtacagcttcgactacagaggccagggcaccctggtcacagtctcttctggtaccggcggaggcggatctggcggcggaggtagcggtggcggaggatctgaattcagctacgtgctgacacagcctccatccgtgtctgtggctccaggacagaccgccagaatcacatgcggcggcaacaacatcggcagcaagagcgtgcactggtatcagcagccacctggacaggctccagtggtggtggtgtacgacgacagcgatagacctagcggcatccccgagagattcagcggcagcaattccggcaataccgccacactgaccatcagcagagtggaagctggcgacgaggccgtgtactactgccaagtgtgggacagcagcagcgatcacgtggtgtttggcggcggaacaaagctgacagtgcttctcgagggacagcctaaggccaatcctaccgtgacactgttccctccaagcagcgaagaactccaggccaacaaggccacacttgtgtgcctgatctccgacttctaccctggggctgtgacagtggcttggaaggccgatggatctcctgtgaaagccggcgtggaaaccaccaagccatccaagcagagcaacaacaaatacgccgccagctcctacctgagcctgacacctgagcagtggaagtcccacagatcctacagctgccaagtgacccacgaaggcagcaccgtggaaaagacagtggcccctacagagtgcagccccatcaagaccgatgtgattacaatggaccccaaggacaactgctccaaggacgccaacgataccctgctgctccagctgaccaacaccagcgcctactacatgtacttgttgctgctgctgaagtccgtggtgtacttcgccatcatcacatgctgcctgctgcggagaaccgccttctgctgcaacggcgagaagtctagggccaagcgatctggatctggagcaacaaacttctcactactcaaacaagcaggtgacgtggaggagaatcccgggcctactagtatggactggatttggcgcatccttttccttgtcggcgctgctaccggcgcgcattccttcgaacaactccagctgcaagagtctggccctggcctggtcaagcctagcgaaacactgagcctgacctgtaccgtgtctggcggctctatcagctccggcagctatttctggggctggatcagacaacctcctggcaaaggactggaatggatcggctccatctactacagcggcatcacctactacaaccccagcctgaagtccagagtgaccatctccgtggacaccagcaagaaccagttctccctgaagctgagcagcgtgacagccgccgataccgccgtgtattattgtgccagacatgacggcgctatggccggcctgtttgattattggggacagggcaccctggtcaccgtgtcatctgctacgcgtgcctctacaaagggaccctccgtgtttcctctggctcccagcagcaagtctacaagcggaggaacagccgctctgggctgcctggtcaaggattactttcccgagcctgtgaccgtgtcctggaatagcggagcactgacaagcggcgtgcacacctttccagccgtgctgcaaagcagcggcctgtactctctgagcagcgtggtcacagtgcctagctctagcctgggcacccagacctacatctgcaatgtgaaccacaagcctagcaacaccaaggtggacaagagagtggaacccaagagctgtgaagtgaaaaccgactccaccgaccacgtgaagcccaaagagacagagaacaccaagcagcccagcaagagctgccacaagcccaaggccatcgtgcacaccgagaaagtgaacatgatgagcctgaccgtgctgggcctgcggatgctgttcgccaaaaccgtggccgtgaacttcctgctgaccgccaagctgttcttcctc

SEQ ID NO: 7607 - DNA, 2295 bp, Artificial Sequence
  Synthetic Polynucloetide
atggccttaccagtgaccgccttgctcctgccgctggccttgctgctccacgccgccaggccggaagtgcagctggttgaatctggcggaggactggttcagcctggcggatctctgagactgtcttgtgccgccagcggcttcagcttcagcgacttttggatgagctgggtccgacaggcccctggcaaaggacttgaatgggtcgccacaatcagccaggccggcagcgagaaggactacgtggactctgtgaagggcagattcaccatcagccgggacaacgccaagaagtccctgtacctccagatgaacagcctgagagccgaggacaccgccgtgtactattgtgcctctggcgtgtacagcttcgactacagaggccagggcaccctggtcacagtctcttctggtaccggcggaggcggatctggcggcggaggtagcggtggcggaggatctgaattcagctacgtgctgacacagcctccatccgtgtctgtggctccaggacagaccgccagaatcacatgcggcggcaacaacatcggcagcaagagcgtgcactggtatcagcagccacctggacaggctccagtggtggtggtgtacgacgacagcgatagacctagcggcatccccgagagattcagcggcagcaattccggcaataccgccacactgaccatcagcagagtggaagctggcgacgaggccgtgtactactgccaagtgtgggacagcagcagcgatcacgtggtgtttggcggcggaacaaagctgacagtgcttctcgagggacagcctaaggccaatcctaccgtgacactgttccctccaagcagcgaagaactccaggccaacaaggccacacttgtgtgcctgatctccgacttctaccctggggctgtgacagtggcttggaaggccgatggatctcctgtgaaagccggcgtggaaaccaccaagccatccaagcagagcaacaacaaatacgccgccagctcctacctgagcctgacacctgagcagtggaagtcccacagatcctacagctgccaagtgacccacgaaggcagcaccgtggaaaagacagtggcccctacagagtgcagcggcagagccgattgcggctttaccagcgagagctaccagcagggcgtgctgagcgccaccatcctgtacgagatcctgctgggcaaggccaccctgtacgccgtgctggtgtctgccctggtgctgatggctatggtcaagcggaaggacagccggggacgcgccaagagaagcggatctggcgtgaagcagaccctgaatttcgacctgctgaagctggctggcgacgtggaatccaacccaggccctactagtatggactggatttggcgcatccttttccttgtcggcgctgctaccggcgcgcattccttcgaacaactccagctgcaagagtctggccctggcctggtcaagcctagcgaaacactgagcctgacctgtaccgtgtctggcggctctatcagctccggcagctatttctggggctggatcagacaacctcctggcaaaggactggaatggatcggctccatctactacagcggcatcacctactacaaccccagcctgaagtccagagtgaccatctccgtggacaccagcaagaaccagttctccctgaagctgagcagcgtgacagccgccgataccgccgtgtattattgtgccagacatgacggcgctatggccggcctgtttgattattggggacagggcaccctggtcaccgtgtcatctgctacgcgtgcctctacaaagggaccctccgtgtttcctctggctcccagcagcaagtctacaagcggaggaacagccgctctgggctgcctggtcaaggattactttcccgagcctgtgaccgtgtcctggaatagcggagcactgacaagcggcgtgcacacctttccagccgtgctgcaaagcagcggcctgtactctctgagcagcgtggtcacagtgcctagctctagcctgggcacccagacctacatctgcaatgtgaaccacaagcctagcaacaccaaggtggacaagagagtggaacccaagagctgtatccccgaggacacattcttcccaagccccgagagcagctgcgacgtgaagctggtggaaaagagcttcgagacagacaccaacctgaacttccagaacctgagcgtgatcggcttcagaatcctgctgctgaaagtggccggctttaacctgctgatgaccctgcggctgtggtccagc

SEQ ID NO: 7608 - DNA, 2697 bp, Artificial Sequence
  Synthetic Polynucloetide
atggccttaccagtgaccgccttgctcctgccgctggccttgctgctccacgccgccaggccggaagtgcagctggttgaatctggcggaggactggttcagcctggcggatctctgagactgtcttgtgccgccagcggcttcagcttcagcgacttttggatgagctgggtccgacaggcccctggcaaaggacttgaatgggtcgccacaatcagccaggccggcagcgagaaggactacgtggactctgtgaagggcagattcaccatcagccgggacaacgccaagaagtccctgtacctccagatgaacagcctgagagccgaggacaccgccgtgtactattgtgcctctggcgtgtacagcttcgactacagaggccagggcaccctggtcacagtctcttctggtaccggcggaggcggatctggcggcggaggtagcggtggcggaggatctgaattcagctacgtgctgacacagcctccatccgtgtctgtggctccaggacagaccgccagaatcacatgcggcggcaacaacatcggcagcaagagcgtgcactggtatcagcagccacctggacaggctccagtggtggtggtgtacgacgacagcgatagacctagcggcatccccgagagattcagcggcagcaattccggcaataccgccacactgaccatcagcagagtggaagctggcgacgaggccgtgtactactgccaagtgtgggacagcagcagcgatcacgtggtgtttggcggcggaacaaagctgacagtgcttctcgagatccagaaccctgatcctgccgtgtaccagctgcgggatagcaagagcagcgacaagagcgtgtgtctgttcaccgacttcgacagccagaccaacgtgtcccagagcaaggactccgacgtgtacatcaccgataagtgcgtgctggacatgcggagcatggacttcaagagcaactccgccgtggcctggtccaacaagtccgatttcgcctgcgccaacgccttcaacaacagcattatccccgaggacacattcttcccaagccccgagagcagctgcgacgtgaagctggtggaaaagagcttcgagacagacaccaacctgaacttccagaacctgagcgtgatcggcttcagaatcctgctgctgaaagtggccggctttaacctgctgatgaccctgcggctgtggtccagccgcgccaagagaagcggatctggcgtgaagcagaccctgaatttcgacctgctgaagctggctggcgacgtggaatccaacccaggccctactagtatggactggatttggcgcatccttttccttgtcggcgctgctaccggcgcgcattccgggccccagctccagctgcaagagtctggacctggcctggtcaagcctagcgagacactgagcctgacctgtaccgtgtccggcgatagcatcagcagcggcgattactactggggctggatcagacagcctcctggcaaaggactggaatggatcggccacatctactacagcggcgtgacctactacaaccccagcctgaagtccagagtgaccatcagcgtggacaccagccggaaccagttctccctgaagctgtctagcgtgacagccgccgataccgccgtgtactactgcaccagagaggacagcagcaactggcggagtagaggccagggaacactggtcacagttagctctggatccggcggaggcggaagtggaggcggaggatctggcggcggaggctctttcgaacaactccagctgcaagagtctggccctggcctggtcaagcctagcgaaacactgagcctgacctgtaccgtgtctggcggctctatcagctccggcagctatttctggggctggatcagacaacctcctggcaaaggactggaatggatcggctccatctactacagcggcatcacctactacaaccccagcctgaagtccagagtgaccatctccgtggacaccagcaagaaccagttctccctgaagctgagcagcgtgacagccgccgataccgccgtgtattattgtgccagacatgacggcgctatggccggcctgtttgattattggggacagggcaccctggtcaccgtgtcatctgctacgcgtgaggacctgaagaacgtgttcccacctgaggtggccgtgttcgagcctagcgaggccgagatcagccacacccagaaagccaccctcgtgtgcctggctaccggcttctaccccgaccatgtggaactgtcttggtgggtcaacggcaaagaggtgcacagcggcgtgtgtaccgacccccagccactgaaagaacagcccgccctgaacgacagccggtactgcctgagcagcagactgagagtgtccgccaccttctggcagaacccccggaaccacttcagatgccaggtgcagttctacggcctgagcgagaacgacgagtggacccaggacagagccaagcccgtgacccagatcgtgtctgccgaagcctggggcagagccgattgcggctttaccagcgagagctaccagcagggcgtgctgagcgccaccatcctgtacgagatcctgctgggcaaggccaccctgtacgccgtgctggtgtctgccctggtgctgatggctatggtcaagcggaaggacagccgggga

SEQ ID NO: 7609 - DNA, 3273 bp, Artificial Sequence
  Synthetic Polynucloetide
atggccttaccagtgaccgccttgctcctgccgctggccttgctgctccacgccgccaggccggaagtgcagctggttgaatctggcggaggactggttcagcctggcggatctctgagactgtcttgtgccgccagcggcttcagcttcagcgacttttggatgagctgggtccgacaggcccctggcaaaggacttgaatgggtcgccacaatcagccaggccggcagcgagaaggactacgtggactctgtgaagggcagattcaccatcagccgggacaacgccaagaagtccctgtacctccagatgaacagcctgagagccgaggacaccgccgtgtactattgtgcctctggcgtgtacagcttcgactacagaggccagggcaccctggtcacagtctcttctggtaccggcggaggcggatctggcggcggaggtagcggtggcggaggatctgaattcagctacgtgctgacacagcctccatccgtgtctgtggctccaggacagaccgccagaatcacatgcggcggcaacaacatcggcagcaagagcgtgcactggtatcagcagccacctggacaggctccagtggtggtggtgtacgacgacagcgatagacctagcggcatccccgagagattcagcggcagcaattccggcaataccgccacactgaccatcagcagagtggaagctggcgacgaggccgtgtactactgccaagtgtgggacagcagcagcgatcacgtggtgtttggcggcggaacaaagctgacagtgcttctcgaggacctgaagaacgtgttcccacctgaggtggccgtgttcgagcctagcgaggccgagatcagccacacccagaaagccaccctcgtgtgcctggctaccggcttctaccccgaccatgtggaactgtcttggtgggtcaacggcaaagaggtgcacagcggcgtgtctaccgacccccagccactgaaagaacagcccgccctgaacgacagccggtactgcctgagcagcagactgagagtgtccgccaccttctggcagaacccccggaaccacttcagatgccaggtgcagttctacggcctgagcgagaacgacgagtggacccaggacagagccaagcccgtgacccagatcgtgtctgccgaagcctggggcagagccgattgcggatcccagagcttcggcctgctggaccccaagctgtgctacctgctggatggcatcctgttcatctacggcgtgatcctgaccgccctgttcctgagagtgaagttcagcagaagcgccgacgcccctgcctaccagcagggacagaaccaactgtacaacgagctgaacctgggcagacgggaagagtacgacgtgctggacaagcggagaggcagggaccctgagatgggcggaaagccccagcggagaaagaacccccaggaaggactgtataacgaactccagaaagacaagatggccgaagcctacagcgagatcggcatgaagggcgagcggagaagaggcaagggccacgatggcctgtaccagggcctgagcaccgccaccaaggacacctatgacgccctgcacatgcaggccctgcctccaagaagggccaagcgatctggatctggagcaacaaacttctcactactcaaacaagcaggtgacgtggaggagaatcccgggcctactagtatggactggatttggcgcatccttttccttgtcggcgctgctaccggcgcgcattccgggccccagctccagctgcaagagtctggacctggcctggtcaagcctagcgagacactgagcctgacctgtaccgtgtccggcgatagcatcagcagcggcgattactactggggctggatcagacagcctcctggcaaaggactggaatggatcggccacatctactacagcggcgtgacctactacaaccccagcctgaagtccagagtgaccatcagcgtggacaccagccggaaccagttctccctgaagctgtctagcgtgacagccgccgataccgccgtgtactactgcaccagagaggacagcagcaactggcggagtagaggccagggaacactggtcacagttagctctggatccggcggaggcggaagtggaggcggaggatctggcggcggaggctctttcgaacaactccagctgcaagagtctggccctggcctggtcaagcctagcgaaacactgagcctgacctgtaccgtgtctggcggctctatcagctccggcagctatttctggggctggatcagacaacctcctggcaaaggactggaatggatcggctccatctactacagcggcatcacctactacaaccccagcctgaagtccagagtgaccatctccgtggacaccagcaagaaccagttctccctgaagctgagcagcgtgacagccgccgataccgccgtgtattattgtgccagacatgacggcgctatggccggcctgtttgattattggggacagggcaccctggtcaccgtgtcatctgctacgcgtatccagaaccctgatcctgccgtgtaccagctgcgggatagcaagagcagcgacaagagcgtgtgtctgttcaccgacttcgacagccagaccaacgtgtcccagagcaaggactccgacgtgtacatcaccgataagaccgtgctggacatgcggagcatggacttcaagagcaactccgccgtggcctggtccaacaagtccgatttcgcctgcgccaacgccttcaacaacagcattatccccgaggacacattcttcccaagccccgagagcagctgcggtacccagagttttgggttgttggaccctaaattgtgctatctgttggacggaatcctgttcatttacggagtgatcctgaccgcattgttcctgcgggttaagttttccagatccgcagacgcacccgcttaccaacaagggcagaaccaactctacaatgaacttaatttggggcggagggaagagtacgacgttctggacaaaaggaggggacgagatcccgagatgggcggaaagcctcagcgaaggaagaatccgcaagaggggctttataacgaactccagaaagataaaatggcagaagcctatagtgagattgggatgaagggagaaaggaggaggggtaaaggtcacgatgggttgtaccaaggattgagcacagccactaaagatacctatgatgcgctccacatgcaggccctgccgccaaga

SEQ ID NO: 7610 - DNA, 2763 bp, Artificial Sequence
  Synthetic Polynucloetide
atggccttaccagtgaccgccttgctcctgccgctggccttgctgctccacgccgccaggccggaagtgcagctggttgaatctggcggaggactggttcagcctggcggatctctgagactgtcttgtgccgccagcggcttcagcttcagcgacttttggatgagctgggtccgacaggcccctggcaaaggacttgaatgggtcgccacaatcagccaggccggcagcgagaaggactacgtggactctgtgaagggcagattcaccatcagccgggacaacgccaagaagtccctgtacctccagatgaacagcctgagagccgaggacaccgccgtgtactattgtgcctctggcgtgtacagcttcgactacagaggccagggcaccctggtcacagtctcttctggtaccggcggaggcggatctggcggcggaggtagcggtggcggaggatctgaattcagctacgtgctgacacagcctccatccgtgtctgtggctccaggacagaccgccagaatcacatgcggcggcaacaacatcggcagcaagagcgtgcactggtatcagcagccacctggacaggctccagtggtggtggtgtacgacgacagcgatagacctagcggcatccccgagagattcagcggcagcaattccggcaataccgccacactgaccatcagcagagtggaagctggcgacgaggccgtgtactactgccaagtgtgggacagcagcagcgatcacgtggtgtttggcggcggaacaaagctgacagtgcttctcgagggacagcctaaggccaatcctaccgtgacactgttccctccaagcagcgaagaactccaggccaacaaggccacacttgtgtgcctgatctccgacttctaccctggggctgtgacagtggcttggaaggccgatggatctcctgtgaaagccggcgtggaaaccaccaagccatccaagcagagcaacaacaaatacgccgccagctcctacctgagcctgacacctgagcagtggaagtcccacagatcctacagctgccaagtgacccacgaaggcagcaccgtggaaaagacagtggcccctacagagtgcagccccatcaagaccgatgtgattacaatggaccccaaggacaactgctccaaggacgccaacgataccctgctgctccagctgaccaacaccagcgcctactacatgtacttgttgctgctgctgaagtccgtggtgtacttcgccatcatcacatgctgcctgctgcggagaaccgccttctgctgcaacggcgagaagtctagggccaagcgatctggatctggagcaacaaacttctcactactcaaacaagcaggtgacgtggaggagaatcccgggcctactagtatggactggatttggcgcatccttttccttgtcggcgctgctaccggcgcgcattccgggccccagctccagctgcaagagtctggacctggcctggtcaagcctagcgagacactgagcctgacctgtaccgtgtccggcgatagcatcagcagcggcgattactactggggctggatcagacagcctcctggcaaaggactggaatggatcggccacatctactacagcggcgtgacctactacaaccccagcctgaagtccagagtgaccatcagcgtggacaccagccggaaccagttctccctgaagctgtctagcgtgacagccgccgataccgccgtgtactactgcaccagagaggacagcagcaactggcggagtagaggccagggaacactggtcacagttagctctggatccggcggaggcggaagtggaggcggaggatctggcggcggaggctctttcgaacaactccagctgcaagagtctggccctggcctggtcaagcctagcgaaacactgagcctgacctgtaccgtgtctggcggctctatcagctccggcagctatttctggggctggatcagacaacctcctggcaaaggactggaatggatcggctccatctactacagcggcatcacctactacaaccccagcctgaagtccagagtgaccatctccgtggacaccagcaagaaccagttctccctgaagctgagcagcgtgacagccgccgataccgccgtgtattattgtgccagacatgacggcgctatggccggcctgtttgattattggggacagggcaccctggtcaccgtgtcatctgctacgcgtgcctctacaaagggaccctccgtgtttcctctggctcccagcagcaagtctacaagcggaggaacagccgctctgggctgcctggtcaaggattactttcccgagcctgtgaccgtgtcctggaatagcggagcactgacaagcggcgtgcacacctttccagccgtgctgcaaagcagcggcctgtactctctgagcagcgtggtcacagtgcctagctctagcctgggcacccagacctacatctgcaatgtgaaccacaagcctagcaacaccaaggtggacaagagagtggaacccaagagctgtgaagtgaaaaccgactccaccgaccacgtgaagcccaaagagacagagaacaccaagcagcccagcaagagctgccacaagcccaaggccatcgtgcacaccgagaaagtgaacatgatgagcctgaccgtgctgggcctgcggatgctgttcgccaaaaccgtggccgtgaacttcctgctgaccgccaagctgttcttcctc

SEQ ID NO: 7611 - DNA, 2706 bp, Artificial Sequence
  Synthetic Polynucloetide
atggccttaccagtgaccgccttgctcctgccgctggccttgctgctccacgccgccaggccggaagtgcagctggttgaatctggcggaggactggttcagcctggcggatctctgagactgtcttgtgccgccagcggcttcagcttcagcgacttttggatgagctgggtccgacaggcccctggcaaaggacttgaatgggtcgccacaatcagccaggccggcagcgagaaggactacgtggactctgtgaagggcagattcaccatcagccgggacaacgccaagaagtccctgtacctccagatgaacagcctgagagccgaggacaccgccgtgtactattgtgcctctggcgtgtacagcttcgactacagaggccagggcaccctggtcacagtctcttctggtaccggcggaggcggatctggcggcggaggtagcggtggcggaggatctgaattcagctacgtgctgacacagcctccatccgtgtctgtggctccaggacagaccgccagaatcacatgcggcggcaacaacatcggcagcaagagcgtgcactggtatcagcagccacctggacaggctccagtggtggtggtgtacgacgacagcgatagacctagcggcatccccgagagattcagcggcagcaattccggcaataccgccacactgaccatcagcagagtggaagctggcgacgaggccgtgtactactgccaagtgtgggacagcagcagcgatcacgtggtgtttggcggcggaacaaagctgacagtgcttctcgagggacagcctaaggccaatcctaccgtgacactgttccctccaagcagcgaagaactccaggccaacaaggccacacttgtgtgcctgatctccgacttctaccctggggctgtgacagtggcttggaaggccgatggatctcctgtgaaagccggcgtggaaaccaccaagccatccaagcagagcaacaacaaatacgccgccagctcctacctgagcctgacacctgagcagtggaagtcccacagatcctacagctgccaagtgacccacgaaggcagcaccgtggaaaagacagtggcccctacagagtgcagcggcagagccgattgcggctttaccagcgagagctaccagcagggcgtgctgagcgccaccatcctgtacgagatcctgctgggcaaggccaccctgtacgccgtgctggtgtctgccctggtgctgatggctatggtcaagcggaaggacagccggggacgcgccaagagaagcggatctggcgtgaagcagaccctgaatttcgacctgctgaagctggctggcgacgtggaatccaacccaggccctactagtatggactggatttggcgcatccttttccttgtcggcgctgctaccggcgcgcattccgggccccagctccagctgcaagagtctggacctggcctggtcaagcctagcgagacactgagcctgacctgtaccgtgtccggcgatagcatcagcagcggcgattactactggggctggatcagacagcctcctggcaaaggactggaatggatcggccacatctactacagcggcgtgacctactacaaccccagcctgaagtccagagtgaccatcagcgtggacaccagccggaaccagttctccctgaagctgtctagcgtgacagccgccgataccgccgtgtactactgcaccagagaggacagcagcaactggcggagtagaggccagggaacactggtcacagttagctctggatccggcggaggcggaagtggaggcggaggatctggcggcggaggctctttcgaacaactccagctgcaagagtctggccctggcctggtcaagcctagcgaaacactgagcctgacctgtaccgtgtctggcggctctatcagctccggcagctatttctggggctggatcagacaacctcctggcaaaggactggaatggatcggctccatctactacagcggcatcacctactacaaccccagcctgaagtccagagtgaccatctccgtggacaccagcaagaaccagttctccctgaagctgagcagcgtgacagccgccgataccgccgtgtattattgtgccagacatgacggcgctatggccggcctgtttgattattggggacagggcaccctggtcaccgtgtcatctgctacgcgtgcctctacaaagggaccctccgtgtttcctctggctcccagcagcaagtctacaagcggaggaacagccgctctgggctgcctggtcaaggattactttcccgagcctgtgaccgtgtcctggaatagcggagcactgacaagcggcgtgcacacctttccagccgtgctgcaaagcagcggcctgtactctctgagcagcgtggtcacagtgcctagctctagcctgggcacccagacctacatctgcaatgtgaaccacaagcctagcaacaccaaggtggacaagagagtggaacccaagagctgtatccccgaggacacattcttcccaagccccgagagcagctgcgacgtgaagctggtggaaaagagcttcgagacagacaccaacctgaacttccagaacctgagcgtgatcggcttcagaatcctgctgctgaaagtggccggctttaacctgctgatgaccctgcggctgtggtccagc

SEQ ID NO: 7612 - DNA, 2277 bp, Artificial Sequence
  Synthetic Polynucloetide
atggccttaccagtgaccgccttgctcctgccgctggccttgctgctccacgccgccaggccggaagtgcaggttttggagtctggcggaggactggttcagcctggcggatctctgagactgtcttgtgccgccagcggcttcaccttcagcaactttgccatgagctgggtccgacaggcccctggcaaaggacttgaatgggtgtccacaatcagcggcagcgccggcacaacagattacgccgattctgtgaagggcagattcaccatcagccgggacaacagcaagaaaaccctgtacctccagatgaacagcctgcgcgtggaagataccgccgtgtactactgtgccgatggcagaggccccttcttcgattatcgcggccagggcacactggtcaccgtttcttctggtaccggcggaggcggatctggcggcggaggtagcggtggcggaggatctgaattcagctacgtgctgacacagcctccatccgtgtctgtggctccaggacagaccgccagaatcacatgcggcggcaacaacatcggcagcaagagcgtgcactggtatcagcagccacctggacaggctccagtggtggtggtgtacgacgacagcgatagacctagcggcatccccgagagattcagcggcagcaattccggcaataccgccacactgaccatcagcagagtggaagctggcgacgaggccgtgtactactgccaagtgtgggacagcagcagcgatcacgtggtgtttggcggcggaacaaagctgacagtgcttctcgaggacctgaagaacgtgttcccacctgaggtggccgtgttcgagcctagcgaggccgagatcagccacacccagaaagccaccctcgtgtgcctggctaccggcttctaccccgaccatgtggaactgtcttggtgggtcaacggcaaagaggtgcacagcggcgtgtgtaccgacccccagccactgaaagaacagcccgccctgaacgacagccggtactgcctgagcagcagactgagagtgtccgccaccttctggcagaacccccggaaccacttcagatgccaggtgcagttctacggcctgagcgagaacgacgagtggacccaggacagagccaagcccgtgacccagatcgtgtctgccgaagcctggggcagagccgattgcggctttaccagcgagagctaccagcagggcgtgctgagcgccaccatcctgtacgagatcctgctgggcaaggccaccctgtacgccgtgctggtgtctgccctggtgctgatggctatggtcaagcggaaggacagccggggaagggccaagcgatctggatctggagcaacaaacttctcactactcaaacaagcaggtgacgtggaggagaatcccgggcctactagtatggactggatttggcgcatccttttccttgtcggcgctgctaccggcgcgcattccttcgaacaactccagctgcaagagtctggccctggcctggtcaagcctagcgaaacactgagcctgacctgtaccgtgtctggcggctctatcagctccggcagctatttctggggctggatcagacaacctcctggcaaaggactggaatggatcggctccatctactacagcggcatcacctactacaaccccagcctgaagtccagagtgaccatctccgtggacaccagcaagaaccagttctccctgaagctgagcagcgtgacagccgccgataccgccgtgtattattgtgccagacatgacggcgctatggccggcctgtttgattattggggacagggcaccctggtcaccgtgtcatctgctacgcgtatccagaaccctgatcctgccgtgtaccagctgcgggatagcaagagcagcgacaagagcgtgtgtctgttcaccgacttcgacagccagaccaacgtgtcccagagcaaggactccgacgtgtacatcaccgataagtgcgtgctggacatgcggagcatggacttcaagagcaactccgccgtggcctggtccaacaagtccgatttcgcctgcgccaacgccttcaacaacagcattatccccgaggacacattcttcccaagccccgagagcagctgcgacgtgaagctggtggaaaagagcttcgagacagacaccaacctgaacttccagaacctgagcgtgatcggcttcagaatcctgctgctgaaagtggccggctttaacctgctgatgaccctgcggctgtggtccagc

SEQ ID NO: 7613 - DNA, 2280 bp, Artificial Sequence
  Synthetic Polynucloetide
atggccttaccagtgaccgccttgctcctgccgctggccttgctgctccacgccgccaggccgagctacgtgctgacacagcctccatccgtgtctgtggctccaggacagaccgccagaatcacatgcggcggcaacaacatcggcagcaagagcgtgcactggtatcagcagccacctggacaggctccagtggtggtggtgtacgacgacagcgatagacctagcggcatccccgagagattcagcggcagcaattccggcaataccgccacactgaccatcagcagagtggaagctggcgacgaggccgtgtactactgccaagtgtgggacagcagcagcgatcacgtggtgtttggcggcggaacaaagctgacagtgcttctcgaggacctgaagaacgtgttcccacctgaggtggccgtgttcgagcctagcgaggccgagatcagccacacccagaaagccaccctcgtgtgcctggctaccggcttctaccccgaccatgtggaactgtcttggtgggtcaacggcaaagaggtgcacagcggcgtgtgtaccgacccccagccactgaaagaacagcccgccctgaacgacagccggtactgcctgagcagcagactgagagtgtccgccaccttctggcagaacccccggaaccacttcagatgccaggtgcagttctacggcctgagcgagaacgacgagtggacccaggacagagccaagcccgtgacccagatcgtgtctgccgaagcctggggcagagccgattgcggctttaccagcgagagctaccagcagggcgtgctgagcgccaccatcctgtacgagatcctgctgggcaaggccaccctgtacgccgtgctggtgtctgccctggtgctgatggctatggtcaagcggaaggacagccggggaagggccaagcgatctggatctggagcaacaaacttctcactactcaaacaagcaggtgacgtggaggagaatcccgggcctactagtatggactggatttggcgcatccttttccttgtcggcgctgctaccggcgcccattccgggcccgaagtgcagctggttgaatctggcggaggactggttcaggctggcggatctctgagactgtcttgtgccgccagcggcagaacctttagcatgggctggtttagacaggcccctggcaaagagagagagttcgtcgccgccatcacatactctggcggcagcccttactacgccgactctgtgaagggcagattcaccatcagccgggacaacgccaagaacaccgtgtacctccagatgaacagcctgaagcctgaggacaccgccgtgtactactgcgccgccaatccaacatacggcagcgactggaacgccgagaattggggccagggaacccaagtgacagtgtctagcggatccggcggcggaggatctggcggaggcggatctgggggcggaggctctttcgaacaactccagctgcaagagtctggccctggcctggtcaagcctagcgaaacactgagcctgacctgtaccgtgtctggcggctctatcagctccggcagctatttctggggctggatcagacaacctcctggcaaaggactggaatggatcggctccatctactacagcggcatcacctactacaaccccagcctgaagtccagagtgaccatctccgtggacaccagcaagaaccagttctccctgaagctgagcagcgtgacagccgccgataccgccgtgtattattgtgccagacatgacggcgctatggccggcctgtttgattattggggacagggcaccctggtcaccgtgtcatctgctacgcgtatccagaaccctgatcctgccgtgtaccagctgcgggatagcaagagcagcgacaagagcgtgtgtctgttcaccgacttcgacagccagaccaacgtgtcccagagcaaggactccgacgtgtacatcaccgataagtgcgtgctggacatgcggagcatggacttcaagagcaactccgccgtggcctggtccaacaagtccgatttcgcctgcgccaacgccttcaacaacagcattatccccgaggacacattcttcccaagccccgagagcagctgcgacgtgaagctggtggaaaagagcttcgagacagacaccaacctgaacttccagaacctgagcgtgatcggcttcagaatcctgctgctgaaagtggccggctttaacctgctgatgaccctgcggctgtggtccagc

SEQ ID NO: 7614 - DNA, 2661 bp, Artificial Sequence
  Synthetic Polynucloetide
atggccttaccagtgaccgccttgctcctgccgctggccttgctgctccacgccgccaggccgagctacgtgctgacacagcctccatccgtgtctgtggctccaggacagaccgccagaatcacatgcggcggcaacaacatcggcagcaagagcgtgcactggtatcagcagccacctggacaggctccagtggtggtggtgtacgacgacagcgatagacctagcggcatccccgagagattcagcggcagcaattccggcaataccgccacactgaccatcagcagagtggaagctggcgacgaggccgtgtactactgccaagtgtgggacagcagcagcgatcacgtggtgtttggcggcggaacaaagctgacagtgcttctcgaggacctgaagaacgtgttcccacctgaggtggccgtgttcgagcctagcgaggccgagatcagccacacccagaaagccaccctcgtgtgcctggctaccggcttctaccccgaccatgtggaactgtcttggtgggtcaacggcaaagaggtgcacagcggcgtgtgtaccgacccccagccactgaaagaacagcccgccctgaacgacagccggtactgcctgagcagcagactgagagtgtccgccaccttctggcagaacccccggaaccacttcagatgccaggtgcagttctacggcctgagcgagaacgacgagtggacccaggacagagccaagcccgtgacccagatcgtgtctgccgaagcctggggcagagccgattgcggctttaccagcgagagctaccagcagggcgtgctgagcgccaccatcctgtacgagatcctgctgggcaaggccaccctgtacgccgtgctggtgtctgccctggtgctgatggctatggtcaagcggaaggacagccggggaagggccaagcgatctggatctggagcaacaaacttctcactactcaaacaagcaggtgacgtggaggagaatcccgggcctactagtatggactggatttggcgcatccttttccttgtcggcgctgctaccggcgcccattcccaactgcaactgcaagagtctggccctggcctggtcaagccttctgaaaccctgagcctgacctgtaccgtgtccggcggctctatcagcagcggcgattactactggggctggatcagacagcctccaggcaagggactcgaatggatcggcagcatcagctacagcggctccacctactacaacccaagcctgaagtccagagtgaccatcagcgtggacaccagcagaaaccagttctccctgaagctgagcagcgtgacagccgccgatacagccgtgtattattgcaccagagaggacagcagcaactggcggagtagaggacagggcacactggtcacagtgtcctcttctggaggcggtggaagcggtggaggaggatctgaagtgcagctggttgaatctggcggaggactggttcaggctggcggatctctgagactgtcttgtgccgccagcggcagaacctttagcatgggctggtttagacaggcccctggcaaagagagagagttcgtcgccgccatcacatactctggcggcagcccttactacgccgactctgtgaagggcagattcaccatcagccgggacaacgccaagaacaccgtgtacctccagatgaacagcctgaagcctgaggacaccgccgtgtactactgcgccgccaatccaacatacggcagcgactggaacgccgagaattggggccagggaacccaagtgacagtgtctagcggatccggcggcggaggatctggcggaggcggatctgggggcggaggctctttcgaacaactccagctgcaagagtctggccctggcctggtcaagcctagcgaaacactgagcctgacctgtaccgtgtctggcggctctatcagctccggcagctatttctggggctggatcagacaacctcctggcaaaggactggaatggatcggctccatctactacagcggcatcacctactacaaccccagcctgaagtccagagtgaccatctccgtggacaccagcaagaaccagttctccctgaagctgagcagcgtgacagccgccgataccgccgtgtattattgtgccagacatgacggcgctatggccggcctgtttgattattggggacagggcaccctggtcaccgtgtcatctgctacgcgtatccagaaccctgatcctgccgtgtaccagctgcgggatagcaagagcagcgacaagagcgtgtgtctgttcaccgacttcgacagccagaccaacgtgtcccagagcaaggactccgacgtgtacatcaccgataagtgcgtgctggacatgcggagcatggacttcaagagcaactccgccgtggcctggtccaacaagtccgatttcgcctgcgccaacgccttcaacaacagcattatccccgaggacacattcttcccaagccccgagagcagctgcgacgtgaagctggtggaaaagagcttcgagacagacaccaacctgaacttccagaacctgagcgtgatcggcttcagaatcctgctgctgaaagtggccggctttaacctgctgatgaccctgcggctgtggtccagc

SEQ ID NO: 7615 - DNA, 2688 bp, Artificial Sequence
  Synthetic Polynucloetide
atggccttaccagtgaccgccttgctcctgccgctggccttgctgctccacgccgccaggccggaagtgcaggttttggagtctggcggaggactggttcagcctggcggatctctgagactgtcttgtgccgccagcggcttcaccttcagcaactttgccatgagctgggtccgacaggcccctggcaaaggacttgaatgggtgtccacaatcagcggcagcgccggcacaacagattacgccgattctgtgaagggcagattcaccatcagccgggacaacagcaagaaaaccctgtacctccagatgaacagcctgcgcgtggaagataccgccgtgtactactgtgccgatggcagaggccccttcttcgattatcgcggccagggcacactggtcaccgtttcttctggtaccggcggaggcggatctggcggcggaggtagcggtggcggaggatctgaattcagctacgtgctgacacagcctccatccgtgtctgtggctccaggacagaccgccagaatcacatgcggcggcaacaacatcggcagcaagagcgtgcactggtatcagcagccacctggacaggctccagtggtggtggtgtacgacgacagcgatagacctagcggcatccccgagagattcagcggcagcaattccggcaataccgccacactgaccatcagcagagtggaagctggcgacgaggccgtgtactactgccaagtgtgggacagcagcagcgatcacgtggtgtttggcggcggaacaaagctgacagtgcttctcgaggacctgaagaacgtgttcccacctgaggtggccgtgttcgagcctagcgaggccgagatcagccacacccagaaagccaccctcgtgtgcctggctaccggcttctaccccgaccatgtggaactgtcttggtgggtcaacggcaaagaggtgcacagcggcgtgtgtaccgacccccagccactgaaagaacagcccgccctgaacgacagccggtactgcctgagcagcagactgagagtgtccgccaccttctggcagaacccccggaaccacttcagatgccaggtgcagttctacggcctgagcgagaacgacgagtggacccaggacagagccaagcccgtgacccagatcgtgtctgccgaagcctggggcagagccgattgcggctttaccagcgagagctaccagcagggcgtgctgagcgccaccatcctgtacgagatcctgctgggcaaggccaccctgtacgccgtgctggtgtctgccctggtgctgatggctatggtcaagcggaaggacagccggggaagggccaagcgatctggatctggagcaacaaacttctcactactcaaacaagcaggtgacgtggaggagaatcccgggcctactagtatggactggatttggcgcatccttttccttgtcggcgctgctaccggcgcccattccgggcccgaagtgcagctggttgaatctggcggaggactggttcaggctggcggatctctgagactgtcttgtgccgccagcggcagaacctttagcatgggctggtttagacaggcccctggcaaagagagagagttcgtcgccgccatcacatacagcggcggcagcccttactacgcctcttctgtcagaggccggttcaccatcagccgggacaacgccaagaacaccgtgtacctccagatgaacagcctgaagccagaggacaccgccgtgtactactgtgccgccaatccaacctacggcagcgactggaatgccgagaattggggccagggcacccaagtgacagtgtctagtggatccggcggcggaggatctggcggaggcggatctgggggcggaggctctttcgaacaactccagctgcaagagtctggccctggcctggtcaagcctagcgaaacactgagcctgacctgtaccgtgtctggcggctctatcagctccggcagctatttctggggctggatcagacaacctcctggcaaaggactggaatggatcggctccatctactacagcggcatcacctactacaaccccagcctgaagtccagagtgaccatctccgtggacaccagcaagaaccagttctccctgaagctgagcagcgtgacagccgccgataccgccgtgtattattgtgccagacatgacggcgctatggccggcctgtttgattattggggacagggcaccctggtcaccgtgtcatctgctacgcgtatccagaaccctgatcctgccgtgtaccagctgcgggatagcaagagcagcgacaagagcgtgtgtctgttcaccgacttcgacagccagaccaacgtgtcccagagcaaggactccgacgtgtacatcaccgataagtgcgtgctggacatgcggagcatggacttcaagagcaactccgccgtggcctggtccaacaagtccgatttcgcctgcgccaacgccttcaacaacagcattatccccgaggacacattcttcccaagccccgagagcagctgcgacgtgaagctggtggaaaagagcttcgagacagacaccaacctgaacttccagaacctgagcgtgatcggcttcagaatcctgctgctgaaagtggccggctttaacctgctgatgaccctgcggctgtggtccagc

SEQ ID NO: 7616 - DNA, 2184 bp, Artificial Sequence
  Synthetic Polynucloetide
atggccttaccagtgaccgccttgctcctgccgctggccttgctgctccacgccgccaggccgagctacgtgctgacacagcctccatccgtgtctgtggctccaggacagaccgccagaatcacatgcggcggcaacaacatcggcagcaagagcgtgcactggtatcagcagccacctggacaggctccagtggtggtggtgtacgacgacagcgatagacctagcggcatccccgagagattcagcggcagcaattccggcaataccgccacactgaccatcagcagagtggaagctggcgacgaggccgtgtactactgccaagtgtgggacagcagcagcgatcacgtggtgtttggcggcggaacaaagctgacagtgcttggcggaggcggaagtggaggcggaggatctggcggcggaggctctcaactccagctgcaagagtctggccctggcctggtcaagcctagcgaaacactgagcctgacctgtaccgtgtctggcggctctatcagctccggcagctatttctggggctggatcagacaacctcctggcaaaggactggaatggatcggctccatctactacagcggcagcacctactacaaccccagcctgaagtccagagtgaccatctccgtggacaccagcaagaaccagttctccctgaagctgagcagcgtgacagccgccgataccgccgtgtattattgtgccagacatgacggcgctgtggccggcctgtttgattattggggacagggcaccctggtcaccgtgtcatctgctacgcgtgagcagaaactgatctcggaagaggatctggcgaagcccaccacgacgccagcgccgcgaccaccaacaccggcgcccaccatcgcgtcgcagcccctgtccctgcgcccagaggcgtgccggccagcggcggggggcgcagtgcacacgagggggctggacttcgcctgtgacatctacatctgggcgcccttggccgggacttgtggggtccttctcctgtcactggttatcaccctttactgcaaacggggcagaaagaaactcctgtatatattcaaacaaccatttatgagaccagtacaaactactcaagaggaagatggctgtagctgccgatttccagaagaagaagaaggaggatgtgaactgagagtgaagttcagcaggagcgcagacgcccccgcgtaccagcagggccagaaccagctctataacgagctgaatctaggacgaagagaggagtacgatgttttggacaagagacgtggccgggaccctgagatggggggaaagccgagaaggaagaaccctcaggaaggcctgtacaatgaactgcagaaagataagatggcggaggcctacagtgagattgggatgaaaggcgagcgccggaggggcaaggggcacgatggcctttaccagggtctcagtacagccaccaaggacacctacgacgcccttcacatgcaggccctgccccctcgctctagtggctccggcgagggcagaggaagtctactaacctgcggagatgtggaagaaaatcctggcccacatatgaccgagtacaagcccacggtgcgcctcgccacccgcgacgacgtccccagggccgtacgcaccctcgccgccgcgttcgccgactaccccgccacgcgccacaccgtcgatccggaccgccacatcgagcgggtcaccgagctgcaagaactcttcctcacgcgcgtcgggctcgacatcggcaaggtgtgggtcgcggacgacggcgccgcggtggcggtctggaccacgccggagagcgtcgaagcgggggcggtgttcgccgagatcggcccgcgcatggccgagttgagcggttcccggctggccgcgcagcaacagatggaaggcctcctggcgccgcaccggcccaaggagcccgcgtggttcctggccaccgtcggcgtctcgcccgaccaccagggcaagggtctgggcagcgccgtcgtgctccccggagtggaggcggccgagcgcgccggggtgcccgccttcctggagacctccgcgccccgcaacctccccttctacgagcggctcggcttcaccgtcaccgccgacgtcgaggtgcccgaaggaccgcgcacctggtgcatgacccgcaagcccggtgcctga

SEQ ID NO: 7617 - DNA, 2166 bp, Artificial Sequence
  Synthetic Polynucloetide
atggccttaccagtgaccgccttgctcctgccgctggccttgctgctccacgccgccaggccgagctacgtgctgacacagcctccatccgtgtctgtggctccaggacagaccgccagaatcacatgcggcggcaacaacatcggcagcaagagcgtgcactggtatcagcagccacctggacaggctccagtggtggtggtgtacgacgacagcgatagacctagcggcatccccgagagattcagcggcagcaattccggcaataccgccacactgaccatcagcagagtggaagctggcgacgaggccgtgtactactgccaagtgtgggacagcagcagcgatcacgtggtgtttggcggcggaacaaagctgacagtgcttggcggaggcggaagtggaggcggaggatctggcggcggaggctctcaactccagctgcaagagtctggccctggcctggtcaagcctagcgaaacactgagcctgacctgtaccgtgtctggcggctctatcagctccggcagctatttctggggctggatcagacaacctcctggcaaaggactggaatggatcggctccatctactacagcggcagcacctactacaaccccagcctgaagtccagagtgaccatctccgtggacaccagcaagaaccagttctccctgaagctgagcagcgtgacagccgccgataccgccgtgtattattgtgccagacatgacggcgctgtggccggcctgtttgattattggggacagggcaccctggtcaccgtgtcatctgctacgcgtgagcagaaactgatctcggaagaggatctgaaaattgaagttatgtatcctcctccttacctagacaatgagaagagcaatggaaccattatccatgtgaaagggaaacacctttgtccaagtcccctatttcccggaccttctaagcccttttgggtgctggtggtggttgggggagtcctggcttgctatagcttgctagtaacagtggcctttattattttctgggtgaggagtaagaggagcaggctcctgcacagtgactacatgaacatgactccacgccgccccggacccacccgcaagcattaccagccctatgccccaccacgcgacttcgcagcctatcgctccagagtgaagttcagcaggagcgcagacgcccccgcgtaccagcagggccagaaccagctctataacgagctcaatctaggacgaagagaggagtacgatgttttggacaagagacgtggccgggaccctgagatggggggaaagccgagaaggaagaaccctcaggaaggcctgtacaatgaactgcagaaagataagatggcggaggcctacagtgagattgggatgaaaggcgagcgccggaggggcaaggggcacgatggcctttaccagggtctcagtacagccaccaaggacacctacgacgcccttcacatgcaggccctgccccctcgctctagtggctccggcgagggcagaggaagtctactaacctgcggagatgtggaagaaaatcctggcccacatatgaccgagtacaagcccacggtgcgcctcgccacccgcgacgacgtccccagggccgtacgcaccctcgccgccgcgttcgccgactaccccgccacgcgccacaccgtcgatccggaccgccacatcgagcgggtcaccgagctgcaagaactcttcctcacgcgcgtcgggctcgacatcggcaaggtgtgggtcgcggacgacggcgccgcggtggcggtctggaccacgccggagagcgtcgaagcgggggcggtgttcgccgagatcggcccgcgcatggccgagttgagcggttcccggctggccgcgcagcaacagatggaaggcctcctggcgccgcaccggcccaaggagcccgcgtggttcctggccaccgtcggcgtctcgcccgaccaccagggcaagggtctgggcagcgccgtcgtgctccccggagtggaggcggccgagcgcgccggggtgcccgccttcctggagacctccgcgccccgcaacctccccttctacgagcggctcggcttcaccgtcaccgccgacgtcgaggtgcccgaaggaccgcgcacctggtgcatgacccgcaagcccggtgcctga

SEQ ID NO: 7618 - DNA, 1494 bp, Artificial Sequence
  Synthetic Polynucloetide
atggccttaccagtgaccgccttgctcctgccgctggccttgctgctccacgccgccaggccgagctacgtgctgacacagcctccatccgtgtctgtggctccaggacagaccgccagaatcacatgcggcggcaacaacatcggcagcaagagcgtgcactggtatcagcagccacctggacaggctccagtggtggtggtgtacgacgacagcgatagacctagcggcatccccgagagattcagcggcagcaattccggcaataccgccacactgaccatcagcagagtggaagctggcgacgaggccgtgtactactgccaagtgtgggacagcagcagcgatcacgtggtgtttggcggcggaacaaagctgacagtgcttggcggaggcggaagtggaggcggaggatctggcggcggaggctctcaactccagctgcaagagtctggccctggcctggtcaagcctagcgaaacactgagcctgacctgtaccgtgtctggcggctctatcagctccggcagctatttctggggctggatcagacaacctcctggcaaaggactggaatggatcggctccatctactacagcggcagcacctactacaaccccagcctgaagtccagagtgaccatctccgtggacaccagcaagaaccagttctccctgaagctgagcagcgtgacagccgccgataccgccgtgtattattgtgccagacatgacggcgctgtggccggcctgtttgattattggggacagggcaccctggtcaccgtgtcatctgctacgcgtgagcagaaactgatctcggaagaggatctgaaaattgaagttatgtatcctcctccttacctagacaatgagaagagcaatggaaccattatccatgtgaaagggaaacacctttgtccaagtcccctatttcccggaccttctaagcccttttgggtgctggtggtggttgggggagtcctggcttgctatagcttgctagtaacagtggcctttattattttctgggtgaggagtaagaggagcaggctcctgcacagtgactacatgaacatgactccacgccgccccggacccacccgcaagcattaccagccctatgccccaccacgcgacttcgcagcctatcgctccagagtgaagttcagcaggagcgcagacgcccccgcgtaccagcagggccagaaccagctctataacgagctcaatctaggacgaagagaggagtacgatgttttggacaagagacgtggccgggaccctgagatggggggaaagccgagaaggaagaaccctcaggaaggcctgtacaatgaactgcagaaagataagatggcggaggcctacagtgagattgggatgaaaggcgagcgccggaggggcaaggggcacgatggcctttaccagggtctcagtacagccaccaaggacacctacgacgcccttcacatgcaggccctgccccctcgc

SEQ ID NO: 7619 - DNA, 1515 bp, Artificial Sequence
  Synthetic Polynucloetide
atggccttaccagtgaccgccttgctcctgccgctggccttgctgctccacgccgccaggccgagctacgtgctgacacagcctccatccgtgtctgtggctccaggacagaccgccagaatcacatgcggcggcaacaacatcggcagcaagagcgtgcactggtatcagcagccacctggacaggctccagtggtggtggtgtacgacgacagcgatagacctagcggcatccccgagagattcagcggcagcaattccggcaataccgccacactgaccatcagcagagtggaagctggcgacgaggccgtgtactactgccaagtgtgggacagcagcagcgatcacgtggtgtttggcggcggaacaaagctgacagtgcttggcggaggcggaagtggaggcggaggatctggcggcggaggctctcaactccagctgcaagagtctggccctggcctggtcaagcctagcgaaacactgagcctgacctgtaccgtgtctggcggctctatcagctccggcagctatttctggggctggatcagacaacctcctggcaaaggactggaatggatcggctccatctactacagcggcagcacctactacaaccccagcctgaagtccagagtgaccatctccgtggacaccagcaagaaccagttctccctgaagctgagcagcgtgacagccgccgataccgccgtgtattattgtgccagacatgacggcgctgtggccggcctgtttgattattggggacagggcaccctggtcaccgtgtcatctgctacgcgtgagcagaaactgatctcggaagaggatctggcgaagcccaccacgacgccagcgccgcgaccaccaacaccggcgcccaccatcgcgtcgcagcccctgtccctgcgcccagaggcgtgccggccagcggcggggggcgcagtgcacacgagggggctggacttcgcctgtgacatctacatctgggcgcccttggccgggacttgtggggtccttctcctgtcactggttatcaccctttactgcaaacggggcagaaagaaactcctgtatatattcaaacaaccatttatgagaccagtacaaactactcaagaggaagatggctgtagctgccgatttccagaagaagaagaaggaggatgtgaactgagagtgaagttcagcaggagcgcagacgcccccgcgtaccagcagggccagaaccagctctataacgagctgaatctaggacgaagagaggagtacgatgttttggacaagagacgtggccgggaccctgagatggggggaaagccgagaaggaagaaccctcaggaaggcctgtacaatgaactgcagaaagataagatggcggaggcctacagtgagattgggatgaaaggcgagcgccggaggggcaaggggcacgatggcctttaccagggtctcagtacagccaccaaggacacctacgacgcccttcacatgcaggccctgccccctcgctga

SEQ ID NO: 7620 - DNA, 1515 bp, Artificial Sequence
  Synthetic Polynucloetide
atggccttaccagtgaccgccttgctcctgccgctggccttgctgctccacgccgccaggccgcaactccagctgcaagagtctggccctggcctggtcaagcctagcgaaacactgagcctgacctgtaccgtgtctggcggctctatcagctccggcagctatttctggggctggatcagacaacctcctggcaaaggactggaatggatcggctccatctactacagcggcagcacctactacaaccccagcctgaagtccagagtgaccatctccgtggacaccagcaagaaccagttctccctgaagctgagcagcgtgacagccgccgataccgccgtgtattattgtgccagacatgacggcgctgtggccggcctgtttgattattggggacagggcaccctggtcaccgtgtcatctgctggcggaggcggaagtggaggcggaggatctggcggcggaggctctagctacgtgctgacacagcctccatccgtgtctgtggctccaggacagaccgccagaatcacatgcggcggcaacaacatcggcagcaagagcgtgcactggtatcagcagccacctggacaggctccagtggtggtggtgtacgacgacagcgatagacctagcggcatccccgagagattcagcggcagcaattccggcaataccgccacactgaccatcagcagagtggaagctggcgacgaggccgtgtactactgccaagtgtgggacagcagcagcgatcacgtggtgtttggcggcggaacaaagctgacagtgcttacgcgtgagcagaaactgatctcggaagaggatctggcgaagcccaccacgacgccagcgccgcgaccaccaacaccggcgcccaccatcgcgtcgcagcccctgtccctgcgcccagaggcgtgccggccagcggcggggggcgcagtgcacacgagggggctggacttcgcctgtgacatctacatctgggcgcccttggccgggacttgtggggtccttctcctgtcactggttatcaccctttactgcaaacggggcagaaagaaactcctgtatatattcaaacaaccatttatgagaccagtacaaactactcaagaggaagatggctgtagctgccgatttccagaagaagaagaaggaggatgtgaactgagagtgaagttcagcaggagcgcagacgcccccgcgtaccagcagggccagaaccagctctataacgagctgaatctaggacgaagagaggagtacgatgttttggacaagagacgtggccgggaccctgagatggggggaaagccgagaaggaagaaccctcaggaaggcctgtacaatgaactgcagaaagataagatggcggaggcctacagtgagattgggatgaaaggcgagcgccggaggggcaaggggcacgatggcctttaccagggtctcagtacagccaccaaggacacctacgacgcccttcacatgcaggccctgccccctcgctga

SEQ ID NO: 7621 - DNA, 2754 bp, Artificial Sequence
  Synthetic Polynucloetide
atggccttaccagtgaccgccttgctcctgccgctggccttgctgctccacgccgccaggccgagctacgtgctgacacagcctccatccgtgtctgtggctccaggacagaccgccagaatcacatgcggcggcaacaacatcggcagcaagagcgtgcactggtatcagcagccacctggacaggctccagtggtggtggtgtacgacgacagcgatagacctagcggcatccccgagagattcagcggcagcaattccggcaataccgccacactgaccatcagcagagtggaagctggcgacgaggccgtgtactactgccaagtgtgggacagcagcagcgatcacgtggtgtttggcggcggaacaaagctgacagtgcttggcggaggcggaagtggaggcggaggatctggcggcggaggctctcaactccagctgcaagagtctggccctggcctggtcaagcctagcgaaacactgagcctgacctgtaccgtgtctggcggctctatcagctccggcagctatttctggggctggatcagacaacctcctggcaaaggactggaatggatcggctccatctactacagcggcagcacctactacaaccccagcctgaagtccagagtgaccatctccgtggacaccagcaagaaccagttctccctgaagctgagcagcgtgacagccgccgataccgccgtgtattattgtgccagacatgacggcgctgtggccggcctgtttgattattggggacagggcaccctggtcaccgtgtcatctgctacgcgtgagcagaaactgatctcggaagaggatctggcgaagcccaccacgacgccagcgccgcgaccaccaacaccggcgcccaccatcgcgtcgcagcccctgtccctgcgcccagaggcgtgccggccagcggcggggggcgcagtgcacacgagggggctggacttcgcctgtgacatctacatctgggcgcccttggccgggacttgtggggtccttctcctgtcactggttatcaccctttactgcgggcgcgccagagtgaagttcagcaggagcgcagacgcccccgcgtaccagcagggccagaaccagctctataacgagctgaatctaggacgaagagaggagtacgatgttttggacaagagacgtggccgggaccctgagatggggggaaagccgagaaggaagaaccctcaggaaggcctgtacaatgaactgcagaaagataagatggcggaggcctacagtgagattgggatgaaaggcgagcgccggaggggcaaggggcacgatggcctttaccagggtctcagtacagccaccaaggacacctacgacgcccttcacatgcaggccctgccccctcgctctagaggatctggagcaacaaacttctcactactcaaacaagcaggtgacgtggaggagaatcccgggcctgggatccacatggccacttacgaggttctctgtgaggtggcgcggaaactgggcacggatgacagggaagtggtattgttcctcctaaacgtgttcatacctcaacccacactggcccaattaattggagctcttagagctttaaaggaggagggcaggttaacgtttcccctgttagcggaatgtctgtttcgtgcaggtcgcagagacctcttgcgcgacctgcttcacttagacccgcgttttttagagcgccacctagcgggcacaatgagttatttcagcccttatcagctcactgttctccacgtagacggggagctgtgtgcgagggatattaggtctttgatatttttaagcaaggacactatagggtctcgcagcacaccacagacattcttacactgggtgtactgtatggaaaacttagacctactgggtcccactgacgtggatgccctaatgtcaatgcttagatctttgtcaagagtagacctacagcgccaagtgcaaaccctaatgggccttcacctttccggcccatcacactcccaacactatcgccatacaccactcgagaccgatttctacgactacaaggacgacgatgacaagactagtggctccggcgagggcagaggaagtctactaacctgcggagatgtggaagaaaatcctggcccacatatgaccgagtacaagcccacggtgcgcctcgccacccgcgacgacgtccccagggccgtacgcaccctcgccgccgcgttcgccgactaccccgccacgcgccacaccgtcgatccggaccgccacatcgagcgggtcaccgagctgcaagaactcttcctcacgcgcgtcgggctcgacatcggcaaggtgtgggtcgcggacgacggcgccgcggtggcggtctggaccacgccggagagcgtcgaagcgggggcggtgttcgccgagatcggcccgcgcatggccgagttgagcggttcccggctggccgcgcagcaacagatggaaggcctcctggcgccgcaccggcccaaggagcccgcgtggttcctggccaccgtcggcgtctcgcccgaccaccagggcaagggtctgggcagcgccgtcgtgctccccggagtggaggcggccgagcgcgccggggtgcccgccttcctggagacctccgcgccccgcaacctccccttctacgagcggctcggcttcaccgtcaccgccgacgtcgaggtgcccgaaggaccgcgcacctggtgcatgacccgcaagcccggtgcctga

SEQ ID NO: 7622 - DNA, 2574 bp, Artificial Sequence
  Synthetic Polynucloetide
atggccttaccagtgaccgccttgctcctgccgctggccttgctgctccacgccgccaggccgagctacgtgctgacacagcctccatccgtgtctgtggctccaggacagaccgccagaatcacatgcggcggcaacaacatcggcagcaagagcgtgcactggtatcagcagccacctggacaggctccagtggtggtggtgtacgacgacagcgatagacctagcggcatccccgagagattcagcggcagcaattccggcaataccgccacactgaccatcagcagagtggaagctggcgacgaggccgtgtactactgccaagtgtgggacagcagcagcgatcacgtggtgtttggcggcggaacaaagctgacagtgcttctcgagatccagaaccctgatcctgccgtgtaccagctgcgggatagcaagagcagcgacaagagcgtgtgtctgttcaccgacttcgacagccagaccaacgtgtcccagagcaaggactccgacgtgtacatcaccgataagtgcgtgctggacatgcggagcatggacttcaagagcaactccgccgtggcctggtccaacaagtccgatttcgcctgcgccaacgccttcaacaacagcattatccccgaggacacattcttcccaagcagcgacgtgccctgcgacgtgaagctggtggaaaagagcttcgagacagacaccaacctgaacttccagaacctgagcgtgatcggcttcagaatcctgctgctgaaagtggccggctttaacctgctgatgaccctgcggctgtggtccagccgcgccaagagaagcggatctggcgtgaagcagaccctgaatttcgacctgctgaagctggctggcgacgtggaatccaacccaggccctactagtatggactggatttggcgcatccttttccttgtcggcgctgctaccggcgcgcattccttcgaacaactccagctgcaagagtctggccctggcctggtcaagcctagcgaaacactgagcctgacctgtaccgtgtctggcggctctatcagctccggcagctatttctggggctggatcagacaacctcctggcaaaggactggaatggatcggctccatctactacagcggcagcacctactacaaccccagcctgaagtccagagtgaccatctccgtggacaccagcaagaaccagttctccctgaagctgagcagcgtgacagccgccgataccgccgtgtattattgtgccagacatgacggcgctgtggccggcctgtttgattattggggacagggcaccctggtcaccgtgtcatctgctacgcgtgaggacctgaagaacgtgttcccacctgaggtggccgtgttcgagcctagcaaggccgagatcgcccacacccagaaagccaccctcgtgtgcctggctaccggcttctaccccgaccatgtggaactgtcttggtgggtcaacggcaaagaggtgcacagcggcgtgtgtaccgacccccagccactgaaagaacagcccgccctgaacgacagccggtactgcctgagcagcagactgagagtgtccgccaccttctggcagaacccccggaaccacttcagatgccaggtgcagttctacggcctgagcgagaacgacgagtggacccaggacagagccaagcccgtgacccagatcgtgtctgccgaagcctggggcagagccgattgcggcatcaccagcgccagctaccaccagggcgtgctgagcgccaccatcctgtacgagatcctgctgggcaaggccaccctgtacgccgtgctggtgtctgccctggtgctgatggctatggtcaagcggaaggacagccggggaagggccaagcgatctggatctggagcaacaaacttctcactactcaaacaagcaggtgacgtggaggagaatcccgggccttctagaggccatatgaccgagtacaagcccacggtgcgcctcgccacccgcgacgacgtccccagggccgtacgcaccctcgccgccgcgttcgccgactaccccgccacgcgccacaccgtcgatccggaccgccacatcgagcgggtcaccgagctgcaagaactcttcctcacgcgcgtcgggctcgacatcggcaaggtgtgggtcgcggacgacggcgccgcggtggcggtctggaccacgccggagagcgtcgaagcgggggcggtgttcgccgagatcggcccgcgcatggccgagttgagcggttcccggctggccgcgcagcaacagatggaaggcctcctggcgccgcaccggcccaaggagcccgcgtggttcctggccaccgtcggcgtctcgcccgaccaccagggcaagggtctgggcagcgccgtcgtgctccccggagtggaggcggccgagcgcgccggggtgcccgccttcctggagacctccgcgccccgcaacctccccttctacgagcggctcggcttcaccgtcaccgccgacgtcgaggtgcccgaaggaccgcgcacctggtgcatgacccgcaagcccggtgcctga

SEQ ID NO: 7623 - DNA, 2571 bp, Artificial Sequence
  Synthetic Polynucloetide
atggccttaccagtgaccgccttgctcctgccgctggccttgctgctccacgccgccaggccgagctacgtgctgacacagcctccatccgtgtctgtggctccaggacagaccgccagaatcacatgcggcggcaacaacatcggcagcaagagcgtgcactggtatcagcagccacctggacaggctccagtggtggtggtgtacgacgacagcgatagacctagcggcatccccgagagattcagcggcagcaattccggcaataccgccacactgaccatcagcagagtggaagctggcgacgaggccgtgtactactgccaagtgtgggacagcagcagcgatcacgtggtgtttggcggcggaacaaagctgacagtgcttctcgaggacctgaagaacgtgttcccacctgaggtggccgtgttcgagcctagcaaggccgagatcgcccacacccagaaagccaccctcgtgtgcctggctaccggcttctaccccgaccatgtggaactgtcttggtgggtcaacggcaaagaggtgcacagcggcgtgtgtaccgacccccagccactgaaagaacagcccgccctgaacgacagccggtactgcctgagcagcagactgagagtgtccgccaccttctggcagaacccccggaaccacttcagatgccaggtgcagttctacggcctgagcgagaacgacgagtggacccaggacagagccaagcccgtgacccagatcgtgtctgccgaagcctggggcagagccgattgcggcatcaccagcgccagctaccaccagggcgtgctgagcgccaccatcctgtacgagatcctgctgggcaaggccaccctgtacgccgtgctggtgtctgccctggtgctgatggctatggtcaagcggaaggacagccggggaagggccaagcgatctggatctggagcaacaaacttctcactactcaaacaagcaggtgacgtggaggagaatcccgggcctactagtatggactggatttggcgcatccttttccttgtcggcgctgctaccggcgcgcattccttcgaacaactccagctgcaagagtctggccctggcctggtcaagcctagcgaaacactgagcctgacctgtaccgtgtctggcggctctatcagctccggcagctatttctggggctggatcagacaacctcctggcaaaggactggaatggatcggctccatctactacagcggcagcacctactacaaccccagcctgaagtccagagtgaccatctccgtggacaccagcaagaaccagttctccctgaagctgagcagcgtgacagccgccgataccgccgtgtattattgtgccagacatgacggcgctgtggccggcctgtttgattattggggacagggcaccctggtcaccgtgtcatctgctacgcgtatccagaaccctgatcctgccgtgtaccagctgcgggatagcaagagcagcgacaagagcgtgtgtctgttcaccgacttcgacagccagaccaacgtgtcccagagcaaggactccgacgtgtacatcaccgataagtgcgtgctggacatgcggagcatggacttcaagagcaactccgccgtggcctggtccaacaagtccgatttcgcctgcgccaacgccttcaacaacagcattatccccgaggacacattcttcccaagcagcgacgtgccctgcgacgtgaagctggtggaaaagagcttcgagacagacaccaacctgaacttccagaacctgagcgtgatcggcttcagaatcctgctgctgaaagtggccggctttaacctgctgatgaccctgcggctgtggtccagccgcgccaagagaagcggatctggcgtgaagcagaccctgaatttcgacctgctgaagctggctggcgacgtggaatccaacccaggcccttctagaggccatatgaccgagtacaagcccacggtgcgcctcgccacccgcgacgacgtccccagggccgtacgcaccctcgccgccgcgttcgccgactaccccgccacgcgccacaccgtcgatccggaccgccacatcgagcgggtcaccgagctgcaagaactcttcctcacgcgcgtcgggctcgacatcggcaaggtgtgggtcgcggacgacggcgccgcggtggcggtctggaccacgccggagagcgtcgaagcgggggcggtgttcgccgagatcggcccgcgcatggccgagttgagcggttcccggctggccgcgcagcaacagatggaaggcctcctggcgccgcaccggcccaaggagcccgcgtggttcctggccaccgtcggcgtctcgcccgaccaccagggcaagggtctgggcagcgccgtcgtgctccccggagtggaggcggccgagcgcgccggggtgcccgccttcctggagacctccgcgccccgcaacctccccttctacgagcggctcggcttcaccgtcaccgccgacgtcgaggtgcccgaaggaccgcgcacctggtgcatgacccgcaagcccggtgcctga

SEQ ID NO: 7624 - DNA, 1869 bp, Artificial Sequence
  Synthetic Polynucloetide
atggccttaccagtgaccgccttgctcctgccgctggccttgctgctccacgccgccaggccgagctacgtgctgacacagcctccatccgtgtctgtggctccaggacagaccgccagaatcacatgcggcggcaacaacatcggcagcaagagcgtgcactggtatcagcagccacctggacaggctccagtggtggtggtgtacgacgacagcgatagacctagcggcatccccgagagattcagcggcagcaattccggcaataccgccacactgaccatcagcagagtggaagctggcgacgaggccgtgtactactgccaagtgtgggacagcagcagcgatcacgtggtgtttggcggcggaacaaagctgacagtgcttctcgaggacctgaagaacgtgttcccacctgaggtggccgtgttcgagcctagcgaggccgagatcagccacacccagaaagccaccctcgtgtgcctggctaccggcttctaccccgaccatgtggaactgtcttggtgggtcaacggcaaagaggtgcacagcggcgtgtgtaccgacccccagccactgaaagaacagcccgccctgaacgacagccggtactgcctgagcagcagactgagagtgtccgccaccttctggcagaacccccggaaccacttcagatgccaggtgcagttctacggcctgagcgagaacgacgagtggacccaggacagagccaagcccgtgacccagatcgtgtctgccgaagcctggggcagagccgattgcggctttaccagcgagagctaccagcagggcgtgctgagcgccaccatcctgtacgagatcctgctgggcaaggccaccctgtacgccgtgctggtgtctgccctggtgctgatggctatggtcaagcggaaggacagccggggaagggccaagcgatctggatctggagcaacaaacttctcactactcaaacaagcaggtgacgtggaggagaatcccgggcctactagtatggactggatttggcgcatccttttccttgtcggcgctgctaccggcgcgcattccttcgaacaactccagctgcaagagtctggccctggcctggtcaagcctagcgaaacactgagcctgacctgtaccgtgtctggcggctctatcagctccggcagctatttctggggctggatcagacaacctcctggcaaaggactggaatggatcggctccatctactacagcggcagcacctactacaaccccagcctgaagtccagagtgaccatctccgtggacaccagcaagaaccagttctccctgaagctgagcagcgtgacagccgccgataccgccgtgtattattgtgccagacatgacggcgctgtggccggcctgtttgattattggggacagggcaccctggtcaccgtgtcatctgctacgcgtatccagaaccctgatcctgccgtgtaccagctgcgggatagcaagagcagcgacaagagcgtgtgtctgttcaccgacttcgacagccagaccaacgtgtcccagagcaaggactccgacgtgtacatcaccgataagtgcgtgctggacatgcggagcatggacttcaagagcaactccgccgtggcctggtccaacaagtccgatttcgcctgcgccaacgccttcaacaacagcattatccccgaggacacattcttcccaagccccgagagcagctgcgacgtgaagctggtggaaaagagcttcgagacagacaccaacctgaacttccagaacctgagcgtgatcggcttcagaatcctgctgctgaaagtggccggctttaacctgctgatgaccctgcggctgtggtccagc

SEQ ID NO: 7625 - DNA, 2544 bp, Artificial Sequence
  Synthetic Polynucloetide
atggccttaccagtgaccgccttgctcctgccgctggccttgctgctccacgccgccaggccgagctacgtgctgacacagcctccatccgtgtctgtggctccaggacagaccgccagaatcacatgcggcggcaacaacatcggcagcaagagcgtgcactggtatcagcagccacctggacaggctccagtggtggtggtgtacgacgacagcgatagacctagcggcatccccgagagattcagcggcagcaattccggcaataccgccacactgaccatcagcagagtggaagctggcgacgaggccgtgtactactgccaagtgtgggacagcagcagcgatcacgtggtgtttggcggcggaacaaagctgacagtgcttctcgaggacctgaagaacgtgttcccacctgaggtggccgtgttcgagcctagcgaggccgagatcagccacacccagaaagccaccctcgtgtgcctggctaccggcttctaccccgaccatgtggaactgtcttggtgggtcaacggcaaagaggtgcacagcggcgtgtgtaccgacccccagccactgaaagaacagcccgccctgaacgacagccggtactgcctgagcagcagactgagagtgtccgccaccttctggcagaacccccggaaccacttcagatgccaggtgcagttctacggcctgagcgagaacgacgagtggacccaggacagagccaagcccgtgacccagatcgtgtctgccgaagcctggggcagagccgattgcggctttaccagcgagagctaccagcagggcgtgctgagcgccaccatcctgtacgagatcctgctgggcaaggccaccctgtacgccgtgctggtgtctgccctggtgctgatggctatggtcaagcggaaggacagccggggaagggccaagcgatctggatctggagcaacaaacttctcactactcaaacaagcaggtgacgtggaggagaatcccgggcctactagtatggactggatttggcgcatccttttccttgtcggcgctgctaccggcgcgcattccttcgaacaactccagctgcaagagtctggccctggcctggtcaagcctagcgaaacactgagcctgacctgtaccgtgtctggcggctctatcagctccggcagctatttctggggctggatcagacaacctcctggcaaaggactggaatggatcggctccatctactacagcggcagcacctactacaaccccagcctgaagtccagagtgaccatctccgtggacaccagcaagaaccagttctccctgaagctgagcagcgtgacagccgccgataccgccgtgtattattgtgccagacatgacggcgctgtggccggcctgtttgattattggggacagggcaccctggtcaccgtgtcatctgctacgcgtatccagaaccctgatcctgccgtgtaccagctgcgggatagcaagagcagcgacaagagcgtgtgtctgttcaccgacttcgacagccagaccaacgtgtcccagagcaaggactccgacgtgtacatcaccgataagtgcgtgctggacatgcggagcatggacttcaagagcaactccgccgtggcctggtccaacaagtccgatttcgcctgcgccaacgccttcaacaacagcattatccccgaggacacattcttcccaagccccgagagcagctgcgacgtgaagctggtggaaaagagcttcgagacagacaccaacctgaacttccagaacctgagcgtgatcggcttcagaatcctgctgctgaaagtggccggctttaacctgctgatgaccctgcggctgtggtccagccgcgccaagagaagcggatctggcgtgaagcagaccctgaatttcgacctgctgaagctggctggcgacgtggaatccaacccaggcccttctagaggcgggatccacaccatggctacctacgaggtgctgtgcgaggtggcaagaaagctgggcaccgacgacagagaagtggtgctgttcctgctgaacgtgttcatccctcagcctacactggcccagctgatcggtgcactgagagccctgaaagaggaaggccggctgacctttcctctgctggccgaatgcctgttcagagccggaagaagggatctgctgcgggacctgctgcatctggaccccagatttctggaaagacacctggccggcaccatgagctacttcagcccttaccagctgaccgtgctgcacgttgacggcgaactgtgcgccagagatattcggagcctgatcttcctgagcaaggacaccatcggcagccggtctacccctcagacatttctgcactgggtgtactgcatggaaaacctggacctgctcggccccacagatgtggatgccctgatgtccatgctgagaagcctgagcagagtggacctccagagacaggtgcagacactgatgggactgcacctgagcggacctagccacagccagcactacagacacacccct

SEQ ID NO: 7626 - DNA, 1881 bp, Artificial Sequence
  Synthetic Polynucloetide
atggccttaccagtgaccgccttgctcctgccgctggccttgctgctccacgccgccaggccgagctacgtgctgacacagcctccatccgtgtctgtggctccaggacagaccgccagaatcacatgcggcggcaacaacatcggcagcaagagcgtgcactggtatcagcagccacctggacaggctccagtggtggtggtgtacgacgacagcgatagacctagcggcatccccgagagattcagcggcagcaattccggcaataccgccacactgaccatcagcagagtggaagctggcgacgaggccgtgtactactgccaagtgtgggacagcagcagcgatcacgtggtgtttggcggcggaacaaagctgacagtgcttctcgagatccagaaccctgatcctgccgtgtaccagctgcgggatagcaagagcagcgacaagagcgtgtgtctgttcaccgacttcgacagccagaccaacgtgtcccagagcaaggactccgacgtgtacatcaccgataagtgcgtgctggacatgcggagcatggacttcaagagcaactccgccgtggcctggtccaacaagtccgatttcgcctgcgccaacgccttcaacaacagcattatccccgaggacacattcttcccaagccccgagagcagctgcgacgtgaagctggtggaaaagagcttcgagacagacaccaacctgaacttccagaacctgagcgtgatcggcttcagaatcctgctgctgaaagtggccggctttaacctgctgatgaccctgcggctgtggtccagccgcgccaagagaagcggatctggcgtgaagcagaccctgaatttcgacctgctgaagctggctggcgacgtggaatccaacccaggccctactagtatggactggatttggcgcatccttttccttgtcggcgctgctaccggcgcgcattccttcgaacaactccagctgcaagagtctggccctggcctggtcaagcctagcgaaacactgagcctgacctgtaccgtgtctggcggctctatcagctccggcagctatttctggggctggatcagacaacctcctggcaaaggactggaatggatcggctccatctactacagcggcagcacctactacaaccccagcctgaagtccagagtgaccatctccgtggacaccagcaagaaccagttctccctgaagctgagcagcgtgacagccgccgataccgccgtgtattattgtgccagacatgacggcgctgtggccggcctgtttgattattggggacagggcaccctggtcaccgtgtcatctgctacgcgtgaggacctgaagaacgtgttcccacctgaggtggccgtgttcgagcctagcgaggccgagatcagccacacccagaaagccaccctcgtgtgcctggctaccggcttctaccccgaccatgtggaactgtcttggtgggtcaacggcaaagaggtgcacagcggcgtgtgtaccgacccccagccactgaaagaacagcccgccctgaacgacagccggtactgcctgagcagcagactgagagtgtccgccaccttctggcagaacccccggaaccacttcagatgccaggtgcagttctacggcctgagcgagaacgacgagtggacccaggacagagccaagcccgtgacccagatcgtgtctgccgaagcctggggcagagccgattgcggctttaccagcgagagctaccagcagggcgtgctgagcgccaccatcctgtacgagatcctgctgggcaaggccaccctgtacgccgtgctggtgtctgccctggtgctgatggctatggtcaagcggaaggacagccgggga

SEQ ID NO: 7627 - DNA, 2547 bp, Artificial Sequence
  Synthetic Polynucloetide
atggccttaccagtgaccgccttgctcctgccgctggccttgctgctccacgccgccaggccgagctacgtgctgacacagcctccatccgtgtctgtggctccaggacagaccgccagaatcacatgcggcggcaacaacatcggcagcaagagcgtgcactggtatcagcagccacctggacaggctccagtggtggtggtgtacgacgacagcgatagacctagcggcatccccgagagattcagcggcagcaattccggcaataccgccacactgaccatcagcagagtggaagctggcgacgaggccgtgtactactgccaagtgtgggacagcagcagcgatcacgtggtgtttggcggcggaacaaagctgacagtgcttctcgagatccagaaccctgatcctgccgtgtaccagctgcgggatagcaagagcagcgacaagagcgtgtgtctgttcaccgacttcgacagccagaccaacgtgtcccagagcaaggactccgacgtgtacatcaccgataagtgcgtgctggacatgcggagcatggacttcaagagcaactccgccgtggcctggtccaacaagtccgatttcgcctgcgccaacgccttcaacaacagcattatccccgaggacacattcttcccaagccccgagagcagctgcgacgtgaagctggtggaaaagagcttcgagacagacaccaacctgaacttccagaacctgagcgtgatcggcttcagaatcctgctgctgaaagtggccggctttaacctgctgatgaccctgcggctgtggtccagccgcgccaagagaagcggatctggcgtgaagcagaccctgaatttcgacctgctgaagctggctggcgacgtggaatccaacccaggccctactagtatggactggatttggcgcatccttttccttgtcggcgctgctaccggcgcgcattccttcgaacaactccagctgcaagagtctggccctggcctggtcaagcctagcgaaacactgagcctgacctgtaccgtgtctggcggctctatcagctccggcagctatttctggggctggatcagacaacctcctggcaaaggactggaatggatcggctccatctactacagcggcagcacctactacaaccccagcctgaagtccagagtgaccatctccgtggacaccagcaagaaccagttctccctgaagctgagcagcgtgacagccgccgataccgccgtgtattattgtgccagacatgacggcgctgtggccggcctgtttgattattggggacagggcaccctggtcaccgtgtcatctgctacgcgtgaggacctgaagaacgtgttcccacctgaggtggccgtgttcgagcctagcgaggccgagatcagccacacccagaaagccaccctcgtgtgcctggctaccggcttctaccccgaccatgtggaactgtcttggtgggtcaacggcaaagaggtgcacagcggcgtgtgtaccgacccccagccactgaaagaacagcccgccctgaacgacagccggtactgcctgagcagcagactgagagtgtccgccaccttctggcagaacccccggaaccacttcagatgccaggtgcagttctacggcctgagcgagaacgacgagtggacccaggacagagccaagcccgtgacccagatcgtgtctgccgaagcctggggcagagccgattgcggctttaccagcgagagctaccagcagggcgtgctgagcgccaccatcctgtacgagatcctgctgggcaaggccaccctgtacgccgtgctggtgtctgccctggtgctgatggctatggtcaagcggaaggacagccggggaagggccaagcgatctggatctggagcaacaaacttctcactactcaaacaagcaggtgacgtggaggagaatcccgggccttctagaggcgggatccacaccatggctacctacgaggtgctgtgcgaggtggcaagaaagctgggcaccgacgacagagaagtggtgctgttcctgctgaacgtgttcatccctcagcctacactggcccagctgatcggtgcactgagagccctgaaagaggaaggccggctgacctttcctctgctggccgaatgcctgttcagagccggaagaagggatctgctgcgggacctgctgcatctggaccccagatttctggaaagacacctggccggcaccatgagctacttcagcccttaccagctgaccgtgctgcacgttgacggcgaactgtgcgccagagatattcggagcctgatcttcctgagcaaggacaccatcggcagccggtctacccctcagacatttctgcactgggtgtactgcatggaaaacctggacctgctcggccccacagatgtggatgccctgatgtccatgctgagaagcctgagcagagtggacctccagagacaggtgcagacactgatgggactgcacctgagcggacctagccacagccagcactacagacacacccct

SEQ ID NO: 7628 - DNA, 2706 bp, Artificial Sequence
  Synthetic Polynucloetide
atggccttaccagtgaccgccttgctcctgccgctggccttgctgctccacgccgccaggccgctcgaggggaaaccaattcccaaccctcttctgggactggattcaaccggcagcggcgaggacctgaagaacgtgttcccacctgaggtggccgtgttcgagcctagcaaggccgagatcgcccacacccagaaagccaccctcgtgtgcctggctaccggcttctaccccgaccatgtggaactgtcttggtgggtcaacggcaaagaggtgcacagcggcgtgtgtaccgacccccagccactgaaagaacagcccgccctgaacgacagccggtactgcctgagcagcagactgagagtgtccgccaccttctggcagaacccccggaaccacttcagatgccaggtgcagttctacggcctgagcgagaacgacgagtggacccaggacagagccaagcccgtgacccagatcgtgtctgccgaagcctggggcagagccgattgcggcatcaccagcgccagctaccaccagggcgtgctgagcgccaccatcctgtacgagatcctgctgggcaaggccaccctgtacgccgtgctggtgtctgccctggtgctgatggctatggtcaagcggaaggacagccggggaagggccaagcgatctggatctggagcaacaaacttctcactactcaaacaagcaggtgacgtggaggagaatcccgggcctactagcatggccttaccagtgaccgccttgctcctgccgctggccttgctgctccacgccgccaggccgagctacgtgctgacacagcctccatccgtgtctgtggctccaggacagaccgccagaatcacatgcggcggcaacaacatcggcagcaagagcgtgcactggtatcagcagccacctggacaggctccagtggtggtggtgtacgacgacagcgatagacctagcggcatccccgagagattcagcggcagcaattccggcaataccgccacactgaccatcagcagagtggaagctggcgacgaggccgtgtactactgccaagtgtgggacagcagcagcgatcacgtggtgtttggcggcggaacaaagctgacagtgcttggcggaggcggaagtggaggcggaggatctggcggcggaggctctcaactccagctgcaagagtctggccctggcctggtcaagcctagcgaaacactgagcctgacctgtaccgtgtctggcggctctatcagctccggcagctatttctggggctggatcagacaacctcctggcaaaggactggaatggatcggctccatctactacagcggcagcacctactacaaccccagcctgaagtccagagtgaccatctccgtggacaccagcaagaaccagttctccctgaagctgagcagcgtgacagccgccgataccgccgtgtattattgtgccagacatgacggcgctgtggccggcctgtttgattattggggacagggcaccctggtcaccgtgtcatctgctacgcgtgagcagaaactgatctcggaagaggatgggagcggcatccagaaccctgatcctgccgtgtaccagctgcgggatagcaagagcagcgacaagagcgtgtgtctgttcaccgacttcgacagccagaccaacgtgtcccagagcaaggactccgacgtgtacatcaccgataagtgcgtgctggacatgcggagcatggacttcaagagcaactccgccgtggcctggtccaacaagtccgatttcgcctgcgccaacgccttcaacaacagcattatccccgaggacacattcttcccaagcagcgacgtgccctgcgacgtgaagctggtggaaaagagcttcgagacagacaccaacctgaacttccagaacctgagcgtgatcggcttcagaatcctgctgctgaaagtggccggctttaacctgctgatgaccctgcggctgtggtccagccgcgccaagagaagcggatctggcgtgaagcagaccctgaatttcgacctgctgaagctggctggcgacgtggaatccaacccaggcccttctagaggccatatgaccgagtacaagcccacggtgcgcctcgccacccgcgacgacgtccccagggccgtacgcaccctcgccgccgcgttcgccgactaccccgccacgcgccacaccgtcgatccggaccgccacatcgagcgggtcaccgagctgcaagaactcttcctcacgcgcgtcgggctcgacatcggcaaggtgtgggtcgcggacgacggcgccgcggtggcggtctggaccacgccggagagcgtcgaagcgggggcggtgttcgccgagatcggcccgcgcatggccgagttgagcggttcccggctggccgcgcagcaacagatggaaggcctcctggcgccgcaccggcccaaggagcccgcgtggttcctggccaccgtcggcgtctcgcccgaccaccagggcaagggtctgggcagcgccgtcgtgctccccggagtggaggcggccgagcgcgccggggtgcccgccttcctggagacctccgcgccccgcaacctccccttctacgagcggctcggcttcaccgtcaccgccgacgtcgaggtgcccgaaggaccgcgcacctggtgcatgacccgcaagcccggtgcctga

SEQ ID NO: 7629 - DNA, 2709 bp, Artificial Sequence
  Synthetic Polynucloetide
atggccttaccagtgaccgccttgctcctgccgctggccttgctgctccacgccgccaggccgctcgagcagaaactgatctcggaagaggatctgggctccggcgatcgccctgatcctgccgtgtaccagctgcgggatagcaagagcagcgacaagagcgtgtgtctgttcaccgacttcgacagccagaccaacgtgtcccagagcaaggactccgacgtgtacatcaccgataagtgcgtgctggacatgcggagcatggacttcaagagcaactccgccgtggcctggtccaacaagtccgatttcgcctgcgccaacgccttcaacaacagcattatccccgaggacacattcttcccaagccccgagagcagctgcgacgtgaagctggtggaaaagagcttcgagacagacaccaacctgaacttccagaacctgagcgtgatcggcttcagaatcctgctgctgaaagtggccggctttaacctgctgatgaccctgcggctgtggtccagctctagtcgcgccaagagaagcggatctggcgtgaagcagaccctgaatttcgacctgctgaagctggctggcgacgtggaatccaacccaggccccactagcatggccttaccagtgaccgccttgctcctgccgctggccttgctgctccacgccgccaggccgagctacgtgctgacacagcctccatccgtgtctgtggctccaggacagaccgccagaatcacatgcggcggcaacaacatcggcagcaagagcgtgcactggtatcagcagccacctggacaggctccagtggtggtggtgtacgacgacagcgatagacctagcggcatccccgagagattcagcggcagcaattccggcaataccgccacactgaccatcagcagagtggaagctggcgacgaggccgtgtactactgccaagtgtgggacagcagcagcgatcacgtggtgtttggcggcggaacaaagctgacagtgcttggcggaggcggaagtggaggcggaggatctggcggcggaggctctcaactccagctgcaagagtctggccctggcctggtcaagcctagcgaaacactgagcctgacctgtaccgtgtctggcggctctatcagctccggcagctatttctggggctggatcagacaacctcctggcaaaggactggaatggatcggctccatctactacagcggcagcacctactacaaccccagcctgaagtccagagtgaccatctccgtggacaccagcaagaaccagttctccctgaagctgagcagcgtgacagccgccgataccgccgtgtattattgtgccagacatgacggcgctgtggccggcctgtttgattattggggacagggcaccctggtcaccgtgtcatctgctacgcgtgggaaaccaattcccaaccctcttctgggactggattcaaccggcagcggcgaggacctgaagaacgtgttcccacctgaggtggccgtgttcgagcctagcgaggccgagatcagccacacccagaaagccaccctcgtgtgcctggctaccggcttctaccccgaccatgtggaactgtcttggtgggtcaacggcaaagaggtgcacagcggcgtgtgtaccgacccccagccactgaaagaacagcccgccctgaacgacagccggtactgcctgagcagcagactgagagtgtccgccaccttctggcagaacccccggaaccacttcagatgccaggtgcagttctacggcctgagcgagaacgacgagtggacccaggacagagccaagcccgtgacccagatcgtgtctgccgaagcctggggcagagccgattgcggctttaccagcgagagctaccagcagggcgtgctgagcgccaccatcctgtacgagatcctgctgggcaaggccaccctgtacgccgtgctggtgtctgccctggtgctgatggctatggtcaagcggaaggacagccggggaagggccaagcgatctggatctggagcaacaaacttctcactactcaaacaagcaggtgacgtggaggagaatcccgggccttctagaggccatatgaccgagtacaagcccacggtgcgcctcgccacccgcgacgacgtccccagggccgtacgcaccctcgccgccgcgttcgccgactaccccgccacgcgccacaccgtcgatccggaccgccacatcgagcgggtcaccgagctgcaagaactcttcctcacgcgcgtcgggctcgacatcggcaaggtgtgggtcgcggacgacggcgccgcggtggcggtctggaccacgccggagagcgtcgaagcgggggcggtgttcgccgagatcggcccgcgcatggccgagttgagcggttcccggctggccgcgcagcaacagatggaaggcctcctggcgccgcaccggcccaaggagcccgcgtggttcctggccaccgtcggcgtctcgcccgaccaccagggcaagggtctgggcagcgccgtcgtgctccccggagtggaggcggccgagcgcgccggggtgcccgccttcctggagacctccgcgccccgcaacctccccttctacgagcggctcggcttcaccgtcaccgccgacgtcgaggtgcccgaaggaccgcgcacctggtgcatgacccgcaagcccggtgcctga

SEQ ID NO: 7630 - DNA, 2571 bp, Artificial Sequence
  Synthetic Polynucloetide
atggccttaccagtgaccgccttgctcctgccgctggccttgctgctccacgccgccaggccgagctacgtgctgacacagcctccatccgtgtctgtggctccaggacagaccgccagaatcacatgcggcggcaacaacatcggcagcaagagcgtgcactggtatcagcagccacctggacaggctccagtggtggtggtgtacgacgacagcgatagacctagcggcatccccgagagattcagcggcagcaattccggcaataccgccacactgaccatcagcagagtggaagctggcgacgaggccgtgtactactgccaagtgtgggacagcagcagcgatcacgtggtgtttggcggcggaacaaagctgacagtgcttctcgaggacctgaagaacgtgttcccacctgaggtggccgtgttcgagcctagcgaggccgagatcagccacacccagaaagccaccctcgtgtgcctggctaccggcttctaccccgaccatgtggaactgtcttggtgggtcaacggcaaagaggtgcacagcggcgtgtctaccgacccccagccactgaaagaacagcccgccctgaacgacagccggtactgcctgagcagcagactgagagtgtccgccaccttctggcagaacccccggaaccacttcagatgccaggtgcagttctacggcctgagcgagaacgacgagtggacccaggacagagccaagcccgtgacccagatcgtgtctgccgaagcctggggcagagccgattgcggctttaccagcgagagctaccagcagggcgtgctgagcgccaccatcctgtacgagatcctgctgggcaaggccaccctgtacgccgtgctggtgtctgccctggtgctgatggctatggtcaagcggaaggacagccggggaagggccaagcgatctggatctggagcaacaaacttctcactactcaaacaagcaggtgacgtggaggagaatcccgggcctactagtatggactggatttggcgcatccttttccttgtcggcgctgctaccggcgcgcattccttcgaacaactccagctgcaagagtctggccctggcctggtcaagcctagcgaaacactgagcctgacctgtaccgtgtctggcggctctatcagctccggcagctatttctggggctggatcagacaacctcctggcaaaggactggaatggatcggctccatctactacagcggcagcacctactacaaccccagcctgaagtccagagtgaccatctccgtggacaccagcaagaaccagttctccctgaagctgagcagcgtgacagccgccgataccgccgtgtattattgtgccagacatgacggcgctgtggccggcctgtttgattattggggacagggcaccctggtcaccgtgtcatctgctacgcgtatccagaaccctgatcctgccgtgtaccagctgcgggatagcaagagcagcgacaagagcgtgtgtctgttcaccgacttcgacagccagaccaacgtgtcccagagcaaggactccgacgtgtacatcaccgataagaccgtgctggacatgcggagcatggacttcaagagcaactccgccgtggcctggtccaacaagtccgatttcgcctgcgccaacgccttcaacaacagcattatccccgaggacacattcttcccaagccccgagagcagctgcgacgtgaagctggtggaaaagagcttcgagacagacaccaacctgaacttccagaacctgagcgtgatcggcttcagaatcctgctgctgaaagtggccggctttaacctgctgatgaccctgcggctgtggtccagccgcgccaagagaagcggatctggcgtgaagcagaccctgaatttcgacctgctgaagctggctggcgacgtggaatccaacccaggcccttctagaggccatatgaccgagtacaagcccacggtgcgcctcgccacccgcgacgacgtccccagggccgtacgcaccctcgccgccgcgttcgccgactaccccgccacgcgccacaccgtcgatccggaccgccacatcgagcgggtcaccgagctgcaagaactcttcctcacgcgcgtcgggctcgacatcggcaaggtgtgggtcgcggacgacggcgccgcggtggcggtctggaccacgccggagagcgtcgaagcgggggcggtgttcgccgagatcggcccgcgcatggccgagttgagcggttcccggctggccgcgcagcaacagatggaaggcctcctggcgccgcaccggcccaaggagcccgcgtggttcctggccaccgtcggcgtctcgcccgaccaccagggcaagggtctgggcagcgccgtcgtgctccccggagtggaggcggccgagcgcgccggggtgcccgccttcctggagacctccgcgccccgcaacctccccttctacgagcggctcggcttcaccgtcaccgccgacgtcgaggtgcccgaaggaccgcgcacctggtgcatgacccgcaagcccggtgcctga

SEQ ID NO: 7631 - DNA, 2817 bp, Artificial Sequence
  Synthetic Polynucloetide
atggccttaccagtgaccgccttgctcctgccgctggccttgctgctccacgccgccaggccgagctacgtgctgacacagcctccatccgtgtctgtggctccaggacagaccgccagaatcacatgcggcggcaacaacatcggcagcaagagcgtgcactggtatcagcagccacctggacaggctccagtggtggtggtgtacgacgacagcgatagacctagcggcatccccgagagattcagcggcagcaattccggcaataccgccacactgaccatcagcagagtggaagctggcgacgaggccgtgtactactgccaagtgtgggacagcagcagcgatcacgtggtgtttggcggcggaacaaagctgacagtgcttctcgaggacctgaagaacgtgttcccacctgaggtggccgtgttcgagcctagcgaggccgagatcagccacacccagaaagccaccctcgtgtgcctggctaccggcttctaccccgaccatgtggaactgtcttggtgggtcaacggcaaagaggtgcacagcggcgtgtctaccgacccccagccactgaaagaacagcccgccctgaacgacagccggtactgcctgagcagcagactgagagtgtccgccaccttctggcagaacccccggaaccacttcagatgccaggtgcagttctacggcctgagcgagaacgacgagtggacccaggacagagccaagcccgtgacccagatcgtgtctgccgaagcctggggcagagccgattgcggctttaccagcgagagctaccagcagggcgtgctgagcgccaccatcctgtacgagatcctgctgggcaaggccaccctgtacgccgtgctggtgtctgccctggtgctgatggctatggtcaagcggaaggacagccggggaagggccaagcgatctggatctggagcaacaaacttctcactactcaaacaagcaggtgacgtggaggagaatcccgggcctactagtatggactggatttggcgcatccttttccttgtcggcgctgctaccggcgcgcattccttcgaacaactccagctgcaagagtctggccctggcctggtcaagcctagcgaaacactgagcctgacctgtaccgtgtctggcggctctatcagctccggcagctatttctggggctggatcagacaacctcctggcaaaggactggaatggatcggctccatctactacagcggcagcacctactacaaccccagcctgaagtccagagtgaccatctccgtggacaccagcaagaaccagttctccctgaagctgagcagcgtgacagccgccgataccgccgtgtattattgtgccagacatgacggcgctgtggccggcctgtttgattattggggacagggcaccctggtcaccgtgtcatctgctacgcgtgagcagaaactgatctcggaagaggatgggagcggcaccccattcccttctctggcccctcccatcatgctgctggtggacggcaagcagcagatggtggtcgtgtgcctggtgctggatgtggccccacctggactggacagccccatctggtttagcgccggcaatggctctgccctggacgcctttacctacggcccaagccctgccaccgatggcacctggacaaatctggcccacctgagcctgcccagcgaggaactggcttcttgggagcctctcgtgtgccacacaggacctggcgctgagggacacagcagatccacccagcctatgcacctgtctggcgaggccagcaccgccagaacctgtcctcaggaacctctgagaggcacccctggcggagcactgtggctgggagtgctgagactgctgctgttcaagctgctgctgtttgacctgctgctgacctgctcctgtctgtgcgatcctgccggccctctgccttctcctgccaccaccacaagactgagagccctgggcagccacagactgcaccctgccacagagacaggcggcagagaggccacaagcagccctagaccccagcccagagacagaagatggggcgataccccccctggcagaaagcctggatctccagtccgcgccaagagaagcggatctggcgtgaagcagaccctgaatttcgacctgctgaagctggctggcgacgtggaatccaacccaggcccttctagaggccatatgaccgagtacaagcccacggtgcgcctcgccacccgcgacgacgtccccagggccgtacgcaccctcgccgccgcgttcgccgactaccccgccacgcgccacaccgtcgatccggaccgccacatcgagcgggtcaccgagctgcaagaactcttcctcacgcgcgtcgggctcgacatcggcaaggtgtgggtcgcggacgacggcgccgcggtggcggtctggaccacgccggagagcgtcgaagcgggggcggtgttcgccgagatcggcccgcgcatggccgagttgagcggttcccggctggccgcgcagcaacagatggaaggcctcctggcgccgcaccggcccaaggagcccgcgtggttcctggccaccgtcggcgtctcgcccgaccaccagggcaagggtctgggcagcgccgtcgtgctccccggagtggaggcggccgagcgcgccggggtgcccgccttcctggagacctccgcgccccgcaacctccccttctacgagcggctcggcttcaccgtcaccgccgacgtcgaggtgcccgaaggaccgcgcacctggtgcatgacccgcaagcccggtgcctga

SEQ ID NO: 7632 - DNA, 2871 bp, Artificial Sequence
  Synthetic Polynucloetide
atggccttaccagtgaccgccttgctcctgccgctggccttgctgctccacgccgccaggccgctcgaggacctgaagaacgtgttcccacctgaggtggccgtgttcgagcctagcgaggccgagatcagccacacccagaaagccaccctcgtgtgcctggctaccggcttctaccccgaccatgtggaactgtcttggtgggtcaacggcaaagaggtgcacagcggcgtgtctaccgacccccagccactgaaagaacagcccgccctgaacgacagccggtactgcctgagcagcagactgagagtgtccgccaccttctggcagaacccccggaaccacttcagatgccaggtgcagttctacggcctgagcgagaacgacgagtggacccaggacagagccaagcccgtgacccagatcgtgtctgccgaagcctggggcagagccgattgcggctttaccagcgagagctaccagcagggcgtgctgagcgccaccatcctgtacgagatcctgctgggcaaggccaccctgtacgccgtgctggtgtctgccctggtgctgatggctatggtcaagcggaaggacagccggggaagggccaagcgatctggatctggagcaacaaacttctcactactcaaacaagcaggtgacgtggaggagaatcccgggcctactagcatggccttaccagtgaccgccttgctcctgccgctggccttgctgctccacgccgccaggccgagctacgtgctgacacagcctccatccgtgtctgtggctccaggacagaccgccagaatcacatgcggcggcaacaacatcggcagcaagagcgtgcactggtatcagcagccacctggacaggctccagtggtggtggtgtacgacgacagcgatagacctagcggcatccccgagagattcagcggcagcaattccggcaataccgccacactgaccatcagcagagtggaagctggcgacgaggccgtgtactactgccaagtgtgggacagcagcagcgatcacgtggtgtttggcggcggaacaaagctgacagtgcttggcggaggcggaagtggaggcggaggatctggcggcggaggctctcaactccagctgcaagagtctggccctggcctggtcaagcctagcgaaacactgagcctgacctgtaccgtgtctggcggctctatcagctccggcagctatttctggggctggatcagacaacctcctggcaaaggactggaatggatcggctccatctactacagcggcagcacctactacaaccccagcctgaagtccagagtgaccatctccgtggacaccagcaagaaccagttctccctgaagctgagcagcgtgacagccgccgataccgccgtgtattattgtgccagacatgacggcgctgtggccggcctgtttgattattggggacagggcaccctggtcaccgtgtcatctgctacgcgtgagcagaaactgatctcggaagaggatctggggagcggcaccccattcccttctctggcccctcccatcatgctgctggtggacggcaagcagcagatggtggtcgtgtgcctggtgctggatgtggccccacctggactggacagccccatctggtttagcgccggcaatggctctgccctggacgcctttacctacggcccaagccctgccaccgatggcacctggacaaatctggcccacctgagcctgcccagcgaggaactggcttcttgggagcctctcgtgtgccacacaggacctggcgctgagggacacagcagatccacccagcctatgcacctgtctggcgaggccagcaccgccagaacctgtcctcaggaacctctgagaggcacccctggcggagcactgtggctgggagtgctgagactgctgctgttcaagctgctgctgtttgacctgctgctgacctgctcctgtctgtgcgatcctgccggccctctgccttctcctgccaccaccacaagactgagagccctgggcagccacagactgcaccctgccacagagacaggcggcagagaggccacaagcagccctagaccccagcccagagacagaagatggggcgataccccccctggcagaaagcctggatctccagtccgcgccaagagaagcggatctggcgtgaagcagaccctgaatttcgacctgctgaagctggctggcgacgtggaatccaacccaggcccttctagatctagaggccatatgaccgagtacaagcccacggtgcgcctcgccacccgcgacgacgtccccagggccgtacgcaccctcgccgccgcgttcgccgactaccccgccacgcgccacaccgtcgatccggaccgccacatcgagcgggtcaccgagctgcaagaactcttcctcacgcgcgtcgggctcgacatcggcaaggtgtgggtcgcggacgacggcgccgcggtggcggtctggaccacgccggagagcgtcgaagcgggggcggtgttcgccgagatcggcccgcgcatggccgagttgagcggttcccggctggccgcgcagcaacagatggaaggcctcctggcgccgcaccggcccaaggagcccgcgtggttcctggccaccgtcggcgtctcgcccgaccaccagggcaagggtctgggcagcgccgtcgtgctccccggagtggaggcggccgagcgcgccggggtgcccgccttcctggagacctccgcgccccgcaacctccccttctacgagcggctcggcttcaccgtcaccgccgacgtcgaggtgcccgaaggaccgcgcacctggtgcatgacccgcaagcccggtgcctga

SEQ ID NO: 7633 - DNA, 2682 bp, Artificial Sequence
  Synthetic Polynucloetide
atggccttaccagtgaccgccttgctcctgccgctggccttgctgctccacgccgccaggccgagctacgtgctgacacagcctccatccgtgtctgtggctccaggacagaccgccagaatcacatgcggcggcaacaacatcggcagcaagagcgtgcactggtatcagcagccacctggacaggctccagtggtggtggtgtacgacgacagcgatagacctagcggcatccccgagagattcagcggcagcaattccggcaataccgccacactgaccatcagcagagtggaagctggcgacgaggccgtgtactactgccaagtgtgggacagcagcagcgatcacgtggtgtttggcggcggaacaaagctgacagtgcttctcgaggggaaaccaattcccaaccctcttctgggactggattcaaccggcagcggcgacaagcagctggacgccgacgtgtcccccaagcctaccatcttcctgccctctatcgccgagacaaagctccagaaggccggcacctacctgtgcctgctggaaaagttcttcccagatgtgattaagatccactggcaggaaaagaagtccaacaccatcctgggcagccaggaaggcaacaccatgaagaccaacgacacctacatgaagttcagctggctgaccgtgcccgagaagtccctggacaaagaacacagatgcatcgtgcggcacgaaaacaacaagaacggcgtggaccaggaaatcatcttcccacccatcaagaccgatgtgattacaatggaccccaaggacaactgctccaaggacgccaacgataccctgctgctccagctgaccaacaccagcgcctactacatgtacttgttgctgctgctgaagtccgtggtgtacttcgccatcatcacatgctgcctgctgcggagaaccgccttctgctgcaacggcgagaagtctagggccaagcgatctggatctggagcaacaaacttctcactactcaaacaagcaggtgacgtggaggagaatcccgggcctactagtatggactggatttggcgcatccttttccttgtcggcgctgctaccggcgcgcattccttcgaacaactccagctgcaagagtctggccctggcctggtcaagcctagcgaaacactgagcctgacctgtaccgtgtctggcggctctatcagctccggcagctatttctggggctggatcagacaacctcctggcaaaggactggaatggatcggctccatctactacagcggcagcacctactacaaccccagcctgaagtccagagtgaccatctccgtggacaccagcaagaaccagttctccctgaagctgagcagcgtgacagccgccgataccgccgtgtattattgtgccagacatgacggcgctgtggccggcctgtttgattattggggacagggcaccctggtcaccgtgtcatctgctacgcgtgagcagaaactgatctcggaagaggatgggagcggcagccagcctcacaccaagcccagcgtgttcgtgatgaagaacggcaccaacgtggcctgcctcgtgaaagagttctaccccaaggacatcaggatcaacctggtgtccagcaagaagatcaccgagttcgaccccgccatcgtgatctcccccagcggcaagtacaacgccgtgaagctggggaagtacgaggacagcaacagcgtgacctgctccgtgcagcacgacaacaagaccgtgcacagcaccgactttgaagtgaaaaccgactccaccgaccacgtgaagcccaaagagacagagaacaccaagcagcccagcaagagctgccacaagcccaaggccatcgtgcacaccgagaaagtgaacatgatgagcctgaccgtgctgggcctgcggatgctgttcgccaaaaccgtggccgtgaacttcctgctgaccgccaagctgttcttcctccgcgccaagagaagcggatctggcgtgaagcagaccctgaatttcgacctgctgaagctggctggcgacgtggaatccaacccaggcccttctagaggccatatgaccgagtacaagcccacggtgcgcctcgccacccgcgacgacgtccccagggccgtacgcaccctcgccgccgcgttcgccgactaccccgccacgcgccacaccgtcgatccggaccgccacatcgagcgggtcaccgagctgcaagaactcttcctcacgcgcgtcgggctcgacatcggcaaggtgtgggtcgcggacgacggcgccgcggtggcggtctggaccacgccggagagcgtcgaagcgggggcggtgttcgccgagatcggcccgcgcatggccgagttgagcggttcccggctggccgcgcagcaacagatggaaggcctcctggcgccgcaccggcccaaggagcccgcgtggttcctggccaccgtcggcgtctcgcccgaccaccagggcaagggtctgggcagcgccgtcgtgctccccggagtggaggcggccgagcgcgccggggtgcccgccttcctggagacctccgcgccccgcaacctccccttctacgagcggctcggcttcaccgtcaccgccgacgtcgaggtgcccgaaggaccgcgcacctggtgcatgacccgcaagcccggtgcctga

SEQ ID NO: 7634 - DNA, 1893 bp, Artificial Sequence
  Synthetic Polynucloetide
atggccttaccagtgaccgccttgctcctgccgctggccttgctgctccacgccgccaggccgagctacgtgctgacacagcctccatccgtgtctgtggctccaggacagaccgccagaatcacatgcggcggcaacaacatcggcagcaagagcgtgcactggtatcagcagccacctggacaggctccagtggtggtggtgtacgacgacagcgatagacctagcggcatccccgagagattcagcggcagcaattccggcaataccgccacactgaccatcagcagagtggaagctggcgacgaggccgtgtactactgccaagtgtgggacagcagcagcgatcacgtggtgtttggcggcggaacaaagctgacagtgcttctcgagagccagcctcacaccaagcccagcgtgttcgtgatgaagaacggcaccaacgtggcctgcctcgtgaaagagttctaccccaaggacatcaggatcaacctggtgtccagcaagaagatcaccgagttcgaccccgccatcgtgatctcccccagcggcaagtacaacgccgtgaagctggggaagtacgaggacagcaacagcgtgacctgctccgtgcagcacgacaacaagaccgtgcacagcaccgactttgaagtgaaaaccgactccaccgaccacgtgaagcccaaagagacagagaacaccaagcagcccagcaagagctgccacaagcccaaggccatcgtgcacaccgagaaagtgaacatgatgagcctgaccgtgctgggcctgcggatgctgttcgccaaaaccgtggccgtgaacttcctgctgaccgccaagctgttcttcctcagggccaagcgatctggatctggagcaacaaacttctcactactcaaacaagcaggtgacgtggaggagaatcccgggcctactagtatggactggatttggcgcatccttttccttgtcggcgctgctaccggcgcgcattccttcgaacaactccagctgcaagagtctggccctggcctggtcaagcctagcgaaacactgagcctgacctgtaccgtgtctggcggctctatcagctccggcagctatttctggggctggatcagacaacctcctggcaaaggactggaatggatcggctccatctactacagcggcagcacctactacaaccccagcctgaagtccagagtgaccatctccgtggacaccagcaagaaccagttctccctgaagctgagcagcgtgacagccgccgataccgccgtgtattattgtgccagacatgacggcgctgtggccggcctgtttgattattggggacagggcaccctggtcaccgtgtcatctgctacgcgtgacaagcagctggacgccgacgtgtcccccaagcctaccatcttcctgccctctatcgccgagacaaagctccagaaggccggcacctacctgtgcctgctggaaaagttcttcccagatgtgattaagatccactggcaggaaaagaagtccaacaccatcctgggcagccaggaaggcaacaccatgaagaccaacgacacctacatgaagttcagctggctgaccgtgcccgagaagtccctggacaaagaacacagatgcatcgtgcggcacgaaaacaacaagaacggcgtggaccaggaaatcatcttcccacccatcaagaccgatgtgattacaatggaccccaaggacaactgctccaaggacgccaacgataccctgctgctccagctgaccaacaccagcgcctactacatgtacttgttgctgctgctgaagtccgtggtgtacttcgccatcatcacatgctgcctgctgcggagaaccgccttctgctgcaacggcgagaagtct

SEQ ID NO: 7635 - DNA, 2727 bp, Artificial Sequence
  Synthetic Polynucloetide
atggccttaccagtgaccgccttgctcctgccgctggccttgctgctccacgccgccaggccgctcgaggggaaaccaattcccaaccctcttctgggactggattcaaccggcagcggcgacaagcagctggacgccgacgtgtcccccaagcctaccatcttcctgccctctatcgccgagacaaagctccagaaggccggcacctacctgtgcctgctggaaaagttcttcccagatgtgattaagatccactggcaggaaaagaagtccaacaccatcctgggcagccaggaaggcaacaccatgaagaccaacgacacctacatgaagttcagctggctgaccgtgcccgagaagtccctggacaaagaacacagatgcatcgtgcggcacgaaaacaacaagaacggcgtggaccaggaaatcatcttcccacccatcaagaccgatgtgattacaatggaccccaaggacaactgctccaaggacgccaacgataccctgctgctccagctgaccaacaccagcgcctactacatgtacttgttgctgctgctgaagtccgtggtgtacttcgccatcatcacatgctgcctgctgcggagaaccgccttctgctgcaacggcgagaagtctagggccaagcgatctggatctggagcaacaaacttctcactactcaaacaagcaggtgacgtggaggagaatcccgggcctactagcatggccttaccagtgaccgccttgctcctgccgctggccttgctgctccacgccgccaggccgagctacgtgctgacacagcctccatccgtgtctgtggctccaggacagaccgccagaatcacatgcggcggcaacaacatcggcagcaagagcgtgcactggtatcagcagccacctggacaggctccagtggtggtggtgtacgacgacagcgatagacctagcggcatccccgagagattcagcggcagcaattccggcaataccgccacactgaccatcagcagagtggaagctggcgacgaggccgtgtactactgccaagtgtgggacagcagcagcgatcacgtggtgtttggcggcggaacaaagctgacagtgcttggcggaggcggaagtggaggcggaggatctggcggcggaggctctcaactccagctgcaagagtctggccctggcctggtcaagcctagcgaaacactgagcctgacctgtaccgtgtctggcggctctatcagctccggcagctatttctggggctggatcagacaacctcctggcaaaggactggaatggatcggctccatctactacagcggcagcacctactacaaccccagcctgaagtccagagtgaccatctccgtggacaccagcaagaaccagttctccctgaagctgagcagcgtgacagccgccgataccgccgtgtattattgtgccagacatgacggcgctgtggccggcctgtttgattattggggacagggcaccctggtcaccgtgtcatctgctacgcgtgagcagaaactgatctcggaagaggatgggagcggcagccagcctcacaccaagcccagcgtgttcgtgatgaagaacggcaccaacgtggcctgcctcgtgaaagagttctaccccaaggacatcaggatcaacctggtgtccagcaagaagatcaccgagttcgaccccgccatcgtgatctcccccagcggcaagtacaacgccgtgaagctggggaagtacgaggacagcaacagcgtgacctgctccgtgcagcacgacaacaagaccgtgcacagcaccgactttgaagtgaaaaccgactccaccgaccacgtgaagcccaaagagacagagaacaccaagcagcccagcaagagctgccacaagcccaaggccatcgtgcacaccgagaaagtgaacatgatgagcctgaccgtgctgggcctgcggatgctgttcgccaaaaccgtggccgtgaacttcctgctgaccgccaagctgttcttcctccgcgccaagagaagcggatctggcgtgaagcagaccctgaatttcgacctgctgaagctggctggcgacgtggaatccaacccaggcccttctagaggccatatgaccgagtacaagcccacggtgcgcctcgccacccgcgacgacgtccccagggccgtacgcaccctcgccgccgcgttcgccgactaccccgccacgcgccacaccgtcgatccggaccgccacatcgagcgggtcaccgagctgcaagaactcttcctcacgcgcgtcgggctcgacatcggcaaggtgtgggtcgcggacgacggcgccgcggtggcggtctggaccacgccggagagcgtcgaagcgggggcggtgttcgccgagatcggcccgcgcatggccgagttgagcggttcccggctggccgcgcagcaacagatggaaggcctcctggcgccgcaccggcccaaggagcccgcgtggttcctggccaccgtcggcgtctcgcccgaccaccagggcaagggtctgggcagcgccgtcgtgctccccggagtggaggcggccgagcgcgccggggtgcccgccttcctggagacctccgcgccccgcaacctccccttctacgagcggctcggcttcaccgtcaccgccgacgtcgaggtgcccgaaggaccgcgcacctggtgcatgacccgcaagcccggtgcctga

SEQ ID NO: 7636 - DNA, 3102 bp, Artificial Sequence
  Synthetic Polynucloetide
atggccttaccagtgaccgccttgctcctgccgctggccttgctgctccacgccgccaggccgagctacgtgctgacacagcctccatccgtgtctgtggctccaggacagaccgccagaatcacatgcggcggcaacaacatcggcagcaagagcgtgcactggtatcagcagccacctggacaggctccagtggtggtggtgtacgacgacagcgatagacctagcggcatccccgagagattcagcggcagcaattccggcaataccgccacactgaccatcagcagagtggaagctggcgacgaggccgtgtactactgccaagtgtgggacagcagcagcgatcacgtggtgtttggcggcggaacaaagctgacagtgcttggacagcctaaggccaatcctaccgtgacactgttccctccaagcagcgaagaactccaggccaacaaggccacacttgtgtgcctgatctccgacttctaccctggggctgtgacagtggcttggaaggccgatggatctcctgtgaaagccggcgtggaaaccaccaagccatccaagcagagcaacaacaaatacgccgccagctcctacctgagcctgacacctgagcagtggaagtcccacagatcctacagctgccaagtgacccacgaaggcagcaccgtggaaaagacagtggcccctacagagtgcagcggatcccagagcttcggcctgctggaccccaagctgtgctacctgctggatggcatcctgttcatctacggcgtgatcctgaccgccctgttcctgagagtgaagttcagcagaagcgccgacgcccctgcctaccagcagggacagaaccaactgtacaacgagctgaacctgggcagacgggaagagtacgacgtgctggacaagcggagaggcagggaccctgagatgggcggaaagccccagcggagaaagaacccccaggaaggactgtataacgaactccagaaagacaagatggccgaagcctacagcgagatcggcatgaagggcgagcggagaagaggcaagggccacgatggcctgtaccagggcctgagcaccgccaccaaggacacctatgacgccctgcacatgcaggccctgcctccaagaagggccaagcgatctggatctggagcaacaaacttctcactactcaaacaagcaggtgacgtggaggagaatcccgggcctactagtatggactggatttggcgcatccttttccttgtcggcgctgctaccggcgcgcattccttcgaacaactccagctgcaagagtctggccctggcctggtcaagcctagcgaaacactgagcctgacctgtaccgtgtctggcggctctatcagctccggcagctatttctggggctggatcagacaacctcctggcaaaggactggaatggatcggctccatctactacagcggcagcacctactacaaccccagcctgaagtccagagtgaccatctccgtggacaccagcaagaaccagttctccctgaagctgagcagcgtgacagccgccgataccgccgtgtattattgtgccagacatgacggcgctgtggccggcctgtttgattattggggacagggcaccctggtcaccgtgtcatctgctgcctctacaaagggaccctccgtgtttcctctggctcccagcagcaagtctacaagcggaggaacagccgctctgggctgcctggtcaaggattactttcccgagcctgtgaccgtgtcctggaatagcggagcactgacaagcggcgtgcacacctttccagccgtgctgcaaagcagcggcctgtactctctgagcagcgtggtcacagtgcctagctctagcctgggcacccagacctacatctgcaatgtgaaccacaagcctagcaacaccaaggtggacaagagagtggaacccaagagctgtggtacccagagttttgggttgttggaccctaaattgtgctatctgttggacggaatcctgttcatttacggagtgatcctgaccgcattgttcctgcgggttaagttttccagatccgcagacgcacccgcttaccaacaagggcagaaccaactctacaatgaacttaatttggggcggagggaagagtacgacgttctggacaaaaggaggggacgagatcccgagatgggcggaaagcctcagcgaaggaagaatccgcaagaggggctttataacgaactccagaaagataaaatggcagaagcctatagtgagattgggatgaagggagaaaggaggaggggtaaaggtcacgatgggttgtaccaaggattgagcacagccactaaagatacctatgatgcgctccacatgcaggccctgccgccaagacgcgccaagagaagcggatctggcgtgaagcagaccctgaatttcgacctgctgaagctggctggcgacgtggaatccaacccaggcccttctagaggccatatgaccgagtacaagcccacggtgcgcctcgccacccgcgacgacgtccccagggccgtacgcaccctcgccgccgcgttcgccgactaccccgccacgcgccacaccgtcgatccggaccgccacatcgagcgggtcaccgagctgcaagaactcttcctcacgcgcgtcgggctcgacatcggcaaggtgtgggtcgcggacgacggcgccgcggtggcggtctggaccacgccggagagcgtcgaagcgggggcggtgttcgccgagatcggcccgcgcatggccgagttgagcggttcccggctggccgcgcagcaacagatggaaggcctcctggcgccgcaccggcccaaggagcccgcgtggttcctggccaccgtcggcgtctcgcccgaccaccagggcaagggtctgggcagcgccgtcgtgctccccggagtggaggcggccgagcgcgccggggtgcccgccttcctggagacctccgcgccccgcaacctccccttctacgagcggctcggcttcaccgtcaccgccgacgtcgaggtgcccgaaggaccgcgcacctggtgcatgacccgcaagcccggtgcctga

SEQ ID NO: 7637 - DNA, 2457 bp, Artificial Sequence
  Synthetic Polynucloetide
atggccttaccagtgaccgccttgctcctgccgctggccttgctgctccacgccgccaggccgagctacgtgctgacacagcctccatccgtgtctgtggctccaggacagaccgccagaatcacatgcggcggcaacaacatcggcagcaagagcgtgcactggtatcagcagccacctggacaggctccagtggtggtggtgtacgacgacagcgatagacctagcggcatccccgagagattcagcggcagcaattccggcaataccgccacactgaccatcagcagagtggaagctggcgacgaggccgtgtactactgccaagtgtgggacagcagcagcgatcacgtggtgtttggcggcggaacaaagctgacagtgcttctcgaggacctgaagaacgtgttcccacctgaggtggccgtgttcgagcctagcgaggccgagatcagccacacccagaaagccaccctcgtgtgcctggctaccggcttctaccccgaccatgtggaactgtcttggtgggtcaacggcaaagaggtgcacagcggcgtgtctaccgacccccagccactgaaagaacagcccgccctgaacgacagccggtactgcctgagcagcagactgagagtgtccgccaccttctggcagaacccccggaaccacttcagatgccaggtgcagttctacggcctgagcgagaacgacgagtggacccaggacagagccaagcccgtgacccagatcgtgtctgccgaagcctggggcagagccgattgcggatcccagagcttcggcctgctggaccccaagctgtgctacctgctggatggcatcctgttcatctacggcgtgatcctgaccgccctgttcctgagagtgaagttcagcagaagcgccgacgcccctgcctaccagcagggacagaaccaactgtacaacgagctgaacctgggcagacgggaagagtacgacgtgctggacaagcggagaggcagggaccctgagatgggcggaaagccccagcggagaaagaacccccaggaaggactgtataacgaactccagaaagacaagatggccgaagcctacagcgagatcggcatgaagggcgagcggagaagaggcaagggccacgatggcctgtaccagggcctgagcaccgccaccaaggacacctatgacgccctgcacatgcaggccctgcctccaagaagggccaagcgatctggatctggagcaacaaacttctcactactcaaacaagcaggtgacgtggaggagaatcccgggcctactagtatggactggatttggcgcatccttttccttgtcggcgctgctaccggcgcgcattccttcgaacaactccagctgcaagagtctggccctggcctggtcaagcctagcgaaacactgagcctgacctgtaccgtgtctggcggctctatcagctccggcagctatttctggggctggatcagacaacctcctggcaaaggactggaatggatcggctccatctactacagcggcagcacctactacaaccccagcctgaagtccagagtgaccatctccgtggacaccagcaagaaccagttctccctgaagctgagcagcgtgacagccgccgataccgccgtgtattattgtgccagacatgacggcgctgtggccggcctgtttgattattggggacagggcaccctggtcaccgtgtcatctgctacgcgtatccagaaccctgatcctgccgtgtaccagctgcgggatagcaagagcagcgacaagagcgtgtgtctgttcaccgacttcgacagccagaccaacgtgtcccagagcaaggactccgacgtgtacatcaccgataagaccgtgctggacatgcggagcatggacttcaagagcaactccgccgtggcctggtccaacaagtccgatttcgcctgcgccaacgccttcaacaacagcattatccccgaggacacattcttcccaagccccgagagcagctgcggtacccagagttttgggttgttggaccctaaattgtgctatctgttggacggaatcctgttcatttacggagtgatcctgaccgcattgttcctgcgggttaagttttccagatccgcagacgcacccgcttaccaacaagggcagaaccaactctacaatgaacttaatttggggcggagggaagagtacgacgttctggacaaaaggaggggacgagatcccgagatgggcggaaagcctcagcgaaggaagaatccgcaagaggggctttataacgaactccagaaagataaaatggcagaagcctatagtgagattgggatgaagggagaaaggaggaggggtaaaggtcacgatgggttgtaccaaggattgagcacagccactaaagatacctatgatgcgctccacatgcaggccctgccgccaaga

SEQ ID NO: 7638 - DNA, 2457 bp, Artificial Sequence
  Synthetic Polynucloetide
atggccttaccagtgaccgccttgctcctgccgctggccttgctgctccacgccgccaggccgagctacgtgctgacacagcctccatccgtgtctgtggctccaggacagaccgccagaatcacatgcggcggcaacaacatcggcagcaagagcgtgcactggtatcagcagccacctggacaggctccagtggtggtggtgtacgacgacagcgatagacctagcggcatccccgagagattcagcggcagcaattccggcaataccgccacactgaccatcagcagagtggaagctggcgacgaggccgtgtactactgccaagtgtgggacagcagcagcgatcacgtggtgtttggcggcggaacaaagctgacagtgcttctcgaggacctgaagaacgtgttcccacctgaggtggccgtgttcgagcctagcaaggccgagatcgcccacacccagaaagccaccctcgtgtgcctggctaccggcttctaccccgaccatgtggaactgtcttggtgggtcaacggcaaagaggtgcacagcggcgtgtgtaccgacccccagccactgaaagaacagcccgccctgaacgacagccggtactgcctgagcagcagactgagagtgtccgccaccttctggcagaacccccggaaccacttcagatgccaggtgcagttctacggcctgagcgagaacgacgagtggacccaggacagagccaagcccgtgacccagatcgtgtctgccgaagcctggggcagagccgattgcggatcccagagcttcggcctgctggaccccaagctgtgctacctgctggatggcatcctgttcatctacggcgtgatcctgaccgccctgttcctgagagtgaagttcagcagaagcgccgacgcccctgcctaccagcagggacagaaccaactgtacaacgagctgaacctgggcagacgggaagagtacgacgtgctggacaagcggagaggcagggaccctgagatgggcggaaagccccagcggagaaagaacccccaggaaggactgtataacgaactccagaaagacaagatggccgaagcctacagcgagatcggcatgaagggcgagcggagaagaggcaagggccacgatggcctgtaccagggcctgagcaccgccaccaaggacacctatgacgccctgcacatgcaggccctgcctccaagaagggccaagcgatctggatctggagcaacaaacttctcactactcaaacaagcaggtgacgtggaggagaatcccgggcctactagtatggactggatttggcgcatccttttccttgtcggcgctgctaccggcgcgcattccttcgaacaactccagctgcaagagtctggccctggcctggtcaagcctagcgaaacactgagcctgacctgtaccgtgtctggcggctctatcagctccggcagctatttctggggctggatcagacaacctcctggcaaaggactggaatggatcggctccatctactacagcggcagcacctactacaaccccagcctgaagtccagagtgaccatctccgtggacaccagcaagaaccagttctccctgaagctgagcagcgtgacagccgccgataccgccgtgtattattgtgccagacatgacggcgctgtggccggcctgtttgattattggggacagggcaccctggtcaccgtgtcatctgctacgcgtatccagaaccctgatcctgccgtgtaccagctgcgggatagcaagagcagcgacaagagcgtgtgtctgttcaccgacttcgacagccagaccaacgtgtcccagagcaaggactccgacgtgtacatcaccgataagtgcgtgctggacatgcggagcatggacttcaagagcaactccgccgtggcctggtccaacaagtccgatttcgcctgcgccaacgccttcaacaacagcattatccccgaggacacattcttcccaagcagcgacgtgccctgcggtacccagagttttgggttgttggaccctaaattgtgctatctgttggacggaatcctgttcatttacggagtgatcctgaccgcattgttcctgcgggttaagttttccagatccgcagacgcacccgcttaccaacaagggcagaaccaactctacaatgaacttaatttggggcggagggaagagtacgacgttctggacaaaaggaggggacgagatcccgagatgggcggaaagcctcagcgaaggaagaatccgcaagaggggctttataacgaactccagaaagataaaatggcagaagcctatagtgagattgggatgaagggagaaaggaggaggggtaaaggtcacgatgggttgtaccaaggattgagcacagccactaaagatacctatgatgcgctccacatgcaggccctgccgccaaga

SEQ ID NO: 7639 - DNA, 2670 bp, Artificial Sequence
  Synthetic Polynucloetide
atggccttaccagtgaccgccttgctcctgccgctggccttgctgctccacgccgccaggccgagctacgtgctgacacagcctccatccgtgtctgtggctccaggacagaccgccagaatcacatgcggcggcaacaacatcggcagcaagagcgtgcactggtatcagcagccacctggacaggctccagtggtggtggtgtacgacgacagcgatagacctagcggcatccccgagagattcagcggcagcaattccggcaataccgccacactgaccatcagcagagtggaagctggcgacgaggccgtgtactactgccaagtgtgggacagcagcagcgatcacgtggtgtttggcggcggaacaaagctgacagtgcttctcgaggggaaaccaattcccaaccctcttctgggactggattcaaccggcagcggcgaggacctgaagaacgtgttcccacctgaggtggccgtgttcgagcctagcgaggccgagatcagccacacccagaaagccaccctcgtgtgcctggctaccggcttctaccccgaccatgtggaactgtcttggtgggtcaacggcaaagaggtgcacagcggcgtgtctaccgacccccagccactgaaagaacagcccgccctgaacgacagccggtactgcctgagcagcagactgagagtgtccgccaccttctggcagaacccccggaaccacttcagatgccaggtgcagttctacggcctgagcgagaacgacgagtggacccaggacagagccaagcccgtgacccagatcgtgtctgccgaagcctggggcagagccgattgcggatcccagagcttcggcctgctggaccccaagctgtgctacctgctggatggcatcctgttcatctacggcgtgatcctgaccgccctgttcctgagagtgaagttcagcagaagcgccgacgcccctgcctaccagcagggacagaaccaactgtacaacgagctgaacctgggcagacgggaagagtacgacgtgctggacaagcggagaggcagggaccctgagatgggcggaaagccccagcggagaaagaacccccaggaaggactgtataacgaactccagaaagacaagatggccgaagcctacagcgagatcggcatgaagggcgagcggagaagaggcaagggccacgatggcctgtaccagggcctgagcaccgccaccaaggacacctatgacgccctgcacatgcaggccctgcctccaagaagggccaagcgatctggatctggagcaacaaacttctcactactcaaacaagcaggtgacgtggaggagaatcccgggcctactagtatggactggatttggcgcatccttttccttgtcggcgctgctaccggcgcgcattccttcgaacaactccagctgcaagagtctggccctggcctggtcaagcctagcgaaacactgagcctgacctgtaccgtgtctggcggctctatcagctccggcagctatttctggggctggatcagacaacctcctggcaaaggactggaatggatcggctccatctactacagcggcagcacctactacaaccccagcctgaagtccagagtgaccatctccgtggacaccagcaagaaccagttctccctgaagctgagcagcgtgacagccgccgataccgccgtgtattattgtgccagacatgacggcgctgtggccggcctgtttgattattggggacagggcaccctggtcaccgtgtcatctgctacgcgtgagcagaaactgatctcggaagaggatgggagcggcatccagaaccctgatcctgccgtgtaccagctgcgggatagcaagagcagcgacaagagcgtgtgtctgttcaccgacttcgacagccagaccaacgtgtcccagagcaaggactccgacgtgtacatcaccgataagaccgtgctggacatgcggagcatggacttcaagagcaactccgccgtggcctggtccaacaagtccgatttcgcctgcgccaacgccttcaacaacagcattatccccgaggacacattcttcccaagccccgagagcagctgcggtacccagagttttgggttgttggaccctaaattgtgctatctgttggacggaatcctgttcatttacggagtgatcctgaccgcattgttcctgaggagcaagcggtcacggctgctccacagcgattacatgaatatgacaccacgaagaccgggtcctactcgcaaacactaccaaccctacgcacctccccgcgactttgcagcgtaccgatctcgggttaagttttccagatccgcagacgcacccgcttaccaacaagggcagaaccaactctacaatgaacttaatttggggcggagggaagagtacgacgttctggacaaaaggaggggacgagatcccgagatgggcggaaagcctcagcgaaggaagaatccgcaagaggggctttataacgaactccagaaagataaaatggcagaagcctatagtgagattgggatgaagggagaaaggaggaggggtaaaggtcacgatgggttgtaccaaggattgagcacagccactaaagatacctatgatgcgctccacatgcaggccctgccgccaaga

SEQ ID NO: 7640 - DNA, 2793 bp, Artificial Sequence
  Synthetic Polynucloetide
atggccttaccagtgaccgccttgctcctgccgctggccttgctgctccacgccgccaggccgagctacgtgctgacacagcctccatccgtgtctgtggctccaggacagaccgccagaatcacatgcggcggcaacaacatcggcagcaagagcgtgcactggtatcagcagccacctggacaggctccagtggtggtggtgtacgacgacagcgatagacctagcggcatccccgagagattcagcggcagcaattccggcaataccgccacactgaccatcagcagagtggaagctggcgacgaggccgtgtactactgccaagtgtgggacagcagcagcgatcacgtggtgtttggcggcggaacaaagctgacagtgcttctcgaggggaaaccaattcccaaccctcttctgggactggattcaaccggcagcggcgaggacctgaagaacgtgttcccacctgaggtggccgtgttcgagcctagcgaggccgagatcagccacacccagaaagccaccctcgtgtgcctggctaccggcttctaccccgaccatgtggaactgtcttggtgggtcaacggcaaagaggtgcacagcggcgtgtctaccgacccccagccactgaaagaacagcccgccctgaacgacagccggtactgcctgagcagcagactgagagtgtccgccaccttctggcagaacccccggaaccacttcagatgccaggtgcagttctacggcctgagcgagaacgacgagtggacccaggacagagccaagcccgtgacccagatcgtgtctgccgaagcctggggcagagccgattgcggatcccagagcttcggcctgctggaccccaagctgtgctacctgctggatggcatcctgttcatctacggcgtgatcctgaccgccctgttcctgaggagtaagaggagcaggctcctgcacagtgactacatgaacatgactccacgccgccccggacccacccgcaagcattaccagccctatgccccaccacgcgacttcgcagcctatcgctccagagtgaagttcagcagaagcgccgacgcccctgcctaccagcagggacagaaccaactgtacaacgagctgaacctgggcagacgggaagagtacgacgtgctggacaagcggagaggcagggaccctgagatgggcggaaagccccagcggagaaagaacccccaggaaggactgtataacgaactccagaaagacaagatggccgaagcctacagcgagatcggcatgaagggcgagcggagaagaggcaagggccacgatggcctgtaccagggcctgagcaccgccaccaaggacacctatgacgccctgcacatgcaggccctgcctccaagaagggccaagcgatctggatctggagcaacaaacttctcactactcaaacaagcaggtgacgtggaggagaatcccgggcctactagtatggactggatttggcgcatccttttccttgtcggcgctgctaccggcgcgcattccttcgaacaactccagctgcaagagtctggccctggcctggtcaagcctagcgaaacactgagcctgacctgtaccgtgtctggcggctctatcagctccggcagctatttctggggctggatcagacaacctcctggcaaaggactggaatggatcggctccatctactacagcggcagcacctactacaaccccagcctgaagtccagagtgaccatctccgtggacaccagcaagaaccagttctccctgaagctgagcagcgtgacagccgccgataccgccgtgtattattgtgccagacatgacggcgctgtggccggcctgtttgattattggggacagggcaccctggtcaccgtgtcatctgctacgcgtgagcagaaactgatctcggaagaggatgggagcggcatccagaaccctgatcctgccgtgtaccagctgcgggatagcaagagcagcgacaagagcgtgtgtctgttcaccgacttcgacagccagaccaacgtgtcccagagcaaggactccgacgtgtacatcaccgataagaccgtgctggacatgcggagcatggacttcaagagcaactccgccgtggcctggtccaacaagtccgatttcgcctgcgccaacgccttcaacaacagcattatccccgaggacacattcttcccaagccccgagagcagctgcggtacccagagttttgggttgttggaccctaaattgtgctatctgttggacggaatcctgttcatttacggagtgatcctgaccgcattgttcctgaggagcaagcggtcacggctgctccacagcgattacatgaatatgacaccacgaagaccgggtcctactcgcaaacactaccaaccctacgcacctccccgcgactttgcagcgtaccgatctcgggttaagttttccagatccgcagacgcacccgcttaccaacaagggcagaaccaactctacaatgaacttaatttggggcggagggaagagtacgacgttctggacaaaaggaggggacgagatcccgagatgggcggaaagcctcagcgaaggaagaatccgcaagaggggctttataacgaactccagaaagataaaatggcagaagcctatagtgagattgggatgaagggagaaaggaggaggggtaaaggtcacgatgggttgtaccaaggattgagcacagccactaaagatacctatgatgcgctccacatgcaggccctgccgccaaga

SEQ ID NO: 7641 - DNA, 2676 bp, Artificial Sequence
  Synthetic Polynucloetide
atggccttaccagtgaccgccttgctcctgccgctggccttgctgctccacgccgccaggccgagctacgtgctgacacagcctccatccgtgtctgtggctccaggacagaccgccagaatcacatgcggcggcaacaacatcggcagcaagagcgtgcactggtatcagcagccacctggacaggctccagtggtggtggtgtacgacgacagcgatagacctagcggcatccccgagagattcagcggcagcaattccggcaataccgccacactgaccatcagcagagtggaagctggcgacgaggccgtgtactactgccaagtgtgggacagcagcagcgatcacgtggtgtttggcggcggaacaaagctgacagtgcttctcgaggggaaaccaattcccaaccctcttctgggactggattcaaccggcagcggcgaggacctgaagaacgtgttcccacctgaggtggccgtgttcgagcctagcgaggccgagatcagccacacccagaaagccaccctcgtgtgcctggctaccggcttctaccccgaccatgtggaactgtcttggtgggtcaacggcaaagaggtgcacagcggcgtgtctaccgacccccagccactgaaagaacagcccgccctgaacgacagccggtactgcctgagcagcagactgagagtgtccgccaccttctggcagaacccccggaaccacttcagatgccaggtgcagttctacggcctgagcgagaacgacgagtggacccaggacagagccaagcccgtgacccagatcgtgtctgccgaagcctggggcagagccgattgcggatcccagagcttcggcctgctggaccccaagctgtgctacctgctggatggcatcctgttcatctacggcgtgatcctgaccgccctgttcctgagagtgaagttcagcagaagcgccgacgcccctgcctaccagcagggacagaaccaactgtacaacgagctgaacctgggcagacgggaagagtacgacgtgctggacaagcggagaggcagggaccctgagatgggcggaaagccccagcggagaaagaacccccaggaaggactgtataacgaactccagaaagacaagatggccgaagcctacagcgagatcggcatgaagggcgagcggagaagaggcaagggccacgatggcctgtaccagggcctgagcaccgccaccaaggacacctatgacgccctgcacatgcaggccctgcctccaagaagggccaagcgatctggatctggagcaacaaacttctcactactcaaacaagcaggtgacgtggaggagaatcccgggcctactagtatggactggatttggcgcatccttttccttgtcggcgctgctaccggcgcgcattccttcgaacaactccagctgcaagagtctggccctggcctggtcaagcctagcgaaacactgagcctgacctgtaccgtgtctggcggctctatcagctccggcagctatttctggggctggatcagacaacctcctggcaaaggactggaatggatcggctccatctactacagcggcagcacctactacaaccccagcctgaagtccagagtgaccatctccgtggacaccagcaagaaccagttctccctgaagctgagcagcgtgacagccgccgataccgccgtgtattattgtgccagacatgacggcgctgtggccggcctgtttgattattggggacagggcaccctggtcaccgtgtcatctgctacgcgtgagcagaaactgatctcggaagaggatctggggagcggcatccagaaccctgatcctgccgtgtaccagctgcgggatagcaagagcagcgacaagagcgtgtgtctgttcaccgacttcgacagccagaccaacgtgtcccagagcaaggactccgacgtgtacatcaccgataagaccgtgctggacatgcggagcatggacttcaagagcaactccgccgtggcctggtccaacaagtccgatttcgcctgcgccaacgccttcaacaacagcattatccccgaggacacattcttcccaagccccgagagcagctgcggtacccagagttttgggttgttggaccctaaattgtgctatctgttggacggaatcctgttcatttacggagtgatcctgaccgcattgttcctgaagagaggccggaagaagctgctgtacatcttcaagcagcctttcatgcggcccgtgcagaccacccaggaagaggacggctgctcctgccggttccccgaggaagaagaaggcggctgcgagctgcgggttaagttttccagatccgcagacgcacccgcttaccaacaagggcagaaccaactctacaatgaacttaatttggggcggagggaagagtacgacgttctggacaaaaggaggggacgagatcccgagatgggcggaaagcctcagcgaaggaagaatccgcaagaggggctttataacgaactccagaaagataaaatggcagaagcctatagtgagattgggatgaagggagaaaggaggaggggtaaaggtcacgatgggttgtaccaaggattgagcacagccactaaagatacctatgatgcgctccacatgcaggccctgccgccaaga

SEQ ID NO: 7642 - DNA, 2802 bp, Artificial Sequence
  Synthetic Polynucloetide
atggccttaccagtgaccgccttgctcctgccgctggccttgctgctccacgccgccaggccgagctacgtgctgacacagcctccatccgtgtctgtggctccaggacagaccgccagaatcacatgcggcggcaacaacatcggcagcaagagcgtgcactggtatcagcagccacctggacaggctccagtggtggtggtgtacgacgacagcgatagacctagcggcatccccgagagattcagcggcagcaattccggcaataccgccacactgaccatcagcagagtggaagctggcgacgaggccgtgtactactgccaagtgtgggacagcagcagcgatcacgtggtgtttggcggcggaacaaagctgacagtgcttctcgaggggaaaccaattcccaaccctcttctgggactggattcaaccggcagcggcgaggacctgaagaacgtgttcccacctgaggtggccgtgttcgagcctagcgaggccgagatcagccacacccagaaagccaccctcgtgtgcctggctaccggcttctaccccgaccatgtggaactgtcttggtgggtcaacggcaaagaggtgcacagcggcgtgtctaccgacccccagccactgaaagaacagcccgccctgaacgacagccggtactgcctgagcagcagactgagagtgtccgccaccttctggcagaacccccggaaccacttcagatgccaggtgcagttctacggcctgagcgagaacgacgagtggacccaggacagagccaagcccgtgacccagatcgtgtctgccgaagcctggggcagagccgattgcggatcccagagcttcggcctgctggaccccaagctgtgctacctgctggatggcatcctgttcatctacggcgtgatcctgaccgccctgttcctgaaacggggcagaaagaaactcctgtatatattcaaacaaccatttatgagaccagtacaaactactcaagaggaagatggctgtagctgccgatttccagaagaagaagaaggaggatgtgaactgagagtgaagttcagcagaagcgccgacgcccctgcctaccagcagggacagaaccaactgtacaacgagctgaacctgggcagacgggaagagtacgacgtgctggacaagcggagaggcagggaccctgagatgggcggaaagccccagcggagaaagaacccccaggaaggactgtataacgaactccagaaagacaagatggccgaagcctacagcgagatcggcatgaagggcgagcggagaagaggcaagggccacgatggcctgtaccagggcctgagcaccgccaccaaggacacctatgacgccctgcacatgcaggccctgcctccaagaagggccaagcgatctggatctggagcaacaaacttctcactactcaaacaagcaggtgacgtggaggagaatcccgggcctactagtatggactggatttggcgcatccttttccttgtcggcgctgctaccggcgcgcattccttcgaacaactccagctgcaagagtctggccctggcctggtcaagcctagcgaaacactgagcctgacctgtaccgtgtctggcggctctatcagctccggcagctatttctggggctggatcagacaacctcctggcaaaggactggaatggatcggctccatctactacagcggcagcacctactacaaccccagcctgaagtccagagtgaccatctccgtggacaccagcaagaaccagttctccctgaagctgagcagcgtgacagccgccgataccgccgtgtattattgtgccagacatgacggcgctgtggccggcctgtttgattattggggacagggcaccctggtcaccgtgtcatctgctacgcgtgagcagaaactgatctcggaagaggatctggggagcggcatccagaaccctgatcctgccgtgtaccagctgcgggatagcaagagcagcgacaagagcgtgtgtctgttcaccgacttcgacagccagaccaacgtgtcccagagcaaggactccgacgtgtacatcaccgataagaccgtgctggacatgcggagcatggacttcaagagcaactccgccgtggcctggtccaacaagtccgatttcgcctgcgccaacgccttcaacaacagcattatccccgaggacacattcttcccaagccccgagagcagctgcggtacccagagttttgggttgttggaccctaaattgtgctatctgttggacggaatcctgttcatttacggagtgatcctgaccgcattgttcctgaagagaggccggaagaagctgctgtacatcttcaagcagcctttcatgcggcccgtgcagaccacccaggaagaggacggctgctcctgccggttccccgaggaagaagaaggcggctgcgagctgcgggttaagttttccagatccgcagacgcacccgcttaccaacaagggcagaaccaactctacaatgaacttaatttggggcggagggaagagtacgacgttctggacaaaaggaggggacgagatcccgagatgggcggaaagcctcagcgaaggaagaatccgcaagaggggctttataacgaactccagaaagataaaatggcagaagcctatagtgagattgggatgaagggagaaaggaggaggggtaaaggtcacgatgggttgtaccaaggattgagcacagccactaaagatacctatgatgcgctccacatgcaggccctgccgccaaga

SEQ ID NO: 7643 - DNA, 2475 bp, Artificial Sequence
  Synthetic Polynucloetide
atggccttaccagtgaccgccttgctcctgccgctggccttgctgctccacgccgccaggccgagctacgtgctgacacagcctccatccgtgtctgtggctccaggacagaccgccagaatcacatgcggcggcaacaacatcggcagcaagagcgtgcactggtatcagcagccacctggacaggctccagtggtggtggtgtacgacgacagcgatagacctagcggcatccccgagagattcagcggcagcaattccggcaataccgccacactgaccatcagcagagtggaagctggcgacgaggccgtgtactactgccaagtgtgggacagcagcagcgatcacgtggtgtttggcggcggaacaaagctgacagtgcttctcgagcagagcttcggcctgctggaccccaagctgtgctacctgctggatggcatcctgttcatctacggcgtgatcctgaccgccctgttcctgagagtgaagttcagcagaagcgccgacgcccctgcctaccagcagggacagaaccaactgtacaacgagctgaacctgggcagacgggaagagtacgacgtgctggacaagcggagaggcagggaccctgagatgggcggaaagccccagcggagaaagaacccccaggaaggactgtataacgaactccagaaagacaagatggccgaagcctacagcgagatcggcatgaagggcgagcggagaagaggcaagggccacgatggcctgtaccagggcctgagcaccgccaccaaggacacctatgacgccctgcacatgcaggccctgcctccaagaagggccaagcgatctggatctggagcaacaaacttctcactactcaaacaagcaggtgacgtggaggagaatcccgggcctactagtatggactggatttggcgcatccttttccttgtcggcgctgctaccggcgcgcattccttcgaacaactccagctgcaagagtctggccctggcctggtcaagcctagcgaaacactgagcctgacctgtaccgtgtctggcggctctatcagctccggcagctatttctggggctggatcagacaacctcctggcaaaggactggaatggatcggctccatctactacagcggcagcacctactacaaccccagcctgaagtccagagtgaccatctccgtggacaccagcaagaaccagttctccctgaagctgagcagcgtgacagccgccgataccgccgtgtattattgtgccagacatgacggcgctgtggccggcctgtttgattattggggacagggcaccctggtcaccgtgtcatctgctacgcgtcagagttttgggttgttggaccctaaattgtgctatctgttggacggaatcctgttcatttacggagtgatcctgaccgcattgttcctgcgggttaagttttccagatccgcagacgcacccgcttaccaacaagggcagaaccaactctacaatgaacttaatttggggcggagggaagagtacgacgttctggacaaaaggaggggacgagatcccgagatgggcggaaagcctcagcgaaggaagaatccgcaagaggggctttataacgaactccagaaagataaaatggcagaagcctatagtgagattgggatgaagggagaaaggaggaggggtaaaggtcacgatgggttgtaccaaggattgagcacagccactaaagatacctatgatgcgctccacatgcaggccctgccgccaagacgcgccaagagaagcggatctggcgtgaagcagaccctgaatttcgacctgctgaagctggctggcgacgtggaatccaacccaggcccttctagaggccatatgaccgagtacaagcccacggtgcgcctcgccacccgcgacgacgtccccagggccgtacgcaccctcgccgccgcgttcgccgactaccccgccacgcgccacaccgtcgatccggaccgccacatcgagcgggtcaccgagctgcaagaactcttcctcacgcgcgtcgggctcgacatcggcaaggtgtgggtcgcggacgacggcgccgcggtggcggtctggaccacgccggagagcgtcgaagcgggggcggtgttcgccgagatcggcccgcgcatggccgagttgagcggttcccggctggccgcgcagcaacagatggaaggcctcctggcgccgcaccggcccaaggagcccgcgtggttcctggccaccgtcggcgtctcgcccgaccaccagggcaagggtctgggcagcgccgtcgtgctccccggagtggaggcggccgagcgcgccggggtgcccgccttcctggagacctccgcgccccgcaacctccccttctacgagcggctcggcttcaccgtcaccgccgacgtcgaggtgcccgaaggaccgcgcacctggtgcatgacccgcaagcccggtgcctga

SEQ ID NO: 7644 - DNA, 1947 bp, Artificial Sequence
  Synthetic Polynucloetide
atggccttaccagtgaccgccttgctcctgccgctggccttgctgctccacgccgccaggccgagctacgtgctgacacagcctccatccgtgtctgtggctccaggacagaccgccagaatcacatgcggcggcaacaacatcggcagcaagagcgtgcactggtatcagcagccacctggacaggctccagtggtggtggtgtacgacgacagcgatagacctagcggcatccccgagagattcagcggcagcaattccggcaataccgccacactgaccatcagcagagtggaagctggcgacgaggccgtgtactactgccaagtgtgggacagcagcagcgatcacgtggtgtttggcggcggaacaaagctgacagtgcttctcgagggacagcctaaggccaatcctaccgtgacactgttccctccaagcagcgaagaactccaggccaacaaggccacacttgtgtgcctgatctccgacttctaccctggggctgtgacagtggcttggaaggccgatggatctcctgtgaaagccggcgtggaaaccaccaagccatccaagcagagcaacaacaaatacgccgccagctcctacctgagcctgacacctgagcagtggaagtcccacagatcctacagctgccaagtgacccacgaaggcagcaccgtggaaaagacagtggcccctacagagtgcagccccatcaagaccgatgtgattacaatggaccccaaggacaactgctccaaggacgccaacgataccctgctgctccagctgaccaacaccagcgcctactacatgtacttgttgctgctgctgaagtccgtggtgtacttcgccatcatcacatgctgcctgctgcggagaaccgccttctgctgcaacggcgagaagtctagggccaagcgatctggatctggagcaacaaacttctcactactcaaacaagcaggtgacgtggaggagaatcccgggcctactagtatggactggatttggcgcatccttttccttgtcggcgctgctaccggcgcgcattccttcgaacaactccagctgcaagagtctggccctggcctggtcaagcctagcgaaacactgagcctgacctgtaccgtgtctggcggctctatcagctccggcagctatttctggggctggatcagacaacctcctggcaaaggactggaatggatcggctccatctactacagcggcagcacctactacaaccccagcctgaagtccagagtgaccatctccgtggacaccagcaagaaccagttctccctgaagctgagcagcgtgacagccgccgataccgccgtgtattattgtgccagacatgacggcgctgtggccggcctgtttgattattggggacagggcaccctggtcaccgtgtcatctgctacgcgtgcctctacaaagggaccctccgtgtttcctctggctcccagcagcaagtctacaagcggaggaacagccgctctgggctgcctggtcaaggattactttcccgagcctgtgaccgtgtcctggaatagcggagcactgacaagcggcgtgcacacctttccagccgtgctgcaaagcagcggcctgtactctctgagcagcgtggtcacagtgcctagctctagcctgggcacccagacctacatctgcaatgtgaaccacaagcctagcaacaccaaggtggacaagagagtggaacccaagagctgtgaagtgaaaaccgactccaccgaccacgtgaagcccaaagagacagagaacaccaagcagcccagcaagagctgccacaagcccaaggccatcgtgcacaccgagaaagtgaacatgatgagcctgaccgtgctgggcctgcggatgctgttcgccaaaaccgtggccgtgaacttcctgctgaccgccaagctgttcttcctc

SEQ ID NO: 7645 - DNA, 1881 bp, Artificial Sequence
  Synthetic Polynucloetide
atggccttaccagtgaccgccttgctcctgccgctggccttgctgctccacgccgccaggccgagctacgtgctgacacagcctccatccgtgtctgtggctccaggacagaccgccagaatcacatgcggcggcaacaacatcggcagcaagagcgtgcactggtatcagcagccacctggacaggctccagtggtggtggtgtacgacgacagcgatagacctagcggcatccccgagagattcagcggcagcaattccggcaataccgccacactgaccatcagcagagtggaagctggcgacgaggccgtgtactactgccaagtgtgggacagcagcagcgatcacgtggtgtttggcggcggaacaaagctgacagtgcttctcgagggacagcctaaggccaatcctaccgtgacactgttccctccaagcagcgaagaactccaggccaacaaggccacacttgtgtgcctgatctccgacttctaccctggggctgtgacagtggcttggaaggccgatggatctcctgtgaaagccggcgtggaaaccaccaagccatccaagcagagcaacaacaaatacgccgccagctcctacctgagcctgacacctgagcagtggaagtcccacagatcctacagctgccaagtgacccacgaaggcagcaccgtggaaaagacagtggcccctacagagtgcagcggcagagccgattgcggcatcaccagcgccagctaccaccagggcgtgctgagcgccaccatcctgtacgagatcctgctgggcaaggccaccctgtacgccgtgctggtgtctgccctggtgctgatggctatggtcaagcggaaggacagccggggaagggccaagcgatctggatctggagcaacaaacttctcactactcaaacaagcaggtgacgtggaggagaatcccgggcctactagtatggactggatttggcgcatccttttccttgtcggcgctgctaccggcgcgcattccttcgaacaactccagctgcaagagtctggccctggcctggtcaagcctagcgaaacactgagcctgacctgtaccgtgtctggcggctctatcagctccggcagctatttctggggctggatcagacaacctcctggcaaaggactggaatggatcggctccatctactacagcggcagcacctactacaaccccagcctgaagtccagagtgaccatctccgtggacaccagcaagaaccagttctccctgaagctgagcagcgtgacagccgccgataccgccgtgtattattgtgccagacatgacggcgctgtggccggcctgtttgattattggggacagggcaccctggtcaccgtgtcatctgctacgcgtgcctctacaaagggaccctccgtgtttcctctggctcccagcagcaagtctacaagcggaggaacagccgctctgggctgcctggtcaaggattactttcccgagcctgtgaccgtgtcctggaatagcggagcactgacaagcggcgtgcacacctttccagccgtgctgcaaagcagcggcctgtactctctgagcagcgtggtcacagtgcctagctctagcctgggcacccagacctacatctgcaatgtgaaccacaagcctagcaacaccaaggtggacaagagagtggaacccaagagctgtatccccgaggacacattcttcccaagcagcgacgtgccctgcgacgtgaagctggtggaaaagagcttcgagacagacaccaacctgaacttccagaacctgagcgtgatcggcttcagaatcctgctgctgaaagtggccggctttaacctgctgatgaccctgcggctgtggtccagc

SEQ ID NO: 7646 - DNA, 1881 bp, Artificial Sequence
  Synthetic Polynucloetide
atggccttaccagtgaccgccttgctcctgccgctggccttgctgctccacgccgccaggccgagctacgtgctgacacagcctccatccgtgtctgtggctccaggacagaccgccagaatcacatgcggcggcaacaacatcggcagcaagagcgtgcactggtatcagcagccacctggacaggctccagtggtggtggtgtacgacgacagcgatagacctagcggcatccccgagagattcagcggcagcaattccggcaataccgccacactgaccatcagcagagtggaagctggcgacgaggccgtgtactactgccaagtgtgggacagcagcagcgatcacgtggtgtttggcggcggaacaaagctgacagtgcttctcgagggacagcctaaggccaatcctaccgtgacactgttccctccaagcagcgaagaactccaggccaacaaggccacacttgtgtgcctgatctccgacttctaccctggggctgtgacagtggcttggaaggccgatggatctcctgtgaaagccggcgtggaaaccaccaagccatccaagcagagcaacaacaaatacgccgccagctcctacctgagcctgacacctgagcagtggaagtcccacagatcctacagctgccaagtgacccacgaaggcagcaccgtggaaaagacagtggcccctacagagtgcagcggcagagccgattgcggctttaccagcgagagctaccagcagggcgtgctgagcgccaccatcctgtacgagatcctgctgggcaaggccaccctgtacgccgtgctggtgtctgccctggtgctgatggctatggtcaagcggaaggacagccggggaagggccaagcgatctggatctggagcaacaaacttctcactactcaaacaagcaggtgacgtggaggagaatcccgggcctactagtatggactggatttggcgcatccttttccttgtcggcgctgctaccggcgcgcattccttcgaacaactccagctgcaagagtctggccctggcctggtcaagcctagcgaaacactgagcctgacctgtaccgtgtctggcggctctatcagctccggcagctatttctggggctggatcagacaacctcctggcaaaggactggaatggatcggctccatctactacagcggcagcacctactacaaccccagcctgaagtccagagtgaccatctccgtggacaccagcaagaaccagttctccctgaagctgagcagcgtgacagccgccgataccgccgtgtattattgtgccagacatgacggcgctgtggccggcctgtttgattattggggacagggcaccctggtcaccgtgtcatctgctacgcgtgcctctacaaagggaccctccgtgtttcctctggctcccagcagcaagtctacaagcggaggaacagccgctctgggctgcctggtcaaggattactttcccgagcctgtgaccgtgtcctggaatagcggagcactgacaagcggcgtgcacacctttccagccgtgctgcaaagcagcggcctgtactctctgagcagcgtggtcacagtgcctagctctagcctgggcacccagacctacatctgcaatgtgaaccacaagcctagcaacaccaaggtggacaagagagtggaacccaagagctgtatccccgaggacacattcttcccaagccccgagagcagctgcgacgtgaagctggtggaaaagagcttcgagacagacaccaacctgaacttccagaacctgagcgtgatcggcttcagaatcctgctgctgaaagtggccggctttaacctgctgatgaccctgcggctgtggtccagc

SEQ ID NO: 7647 - DNA, 1359 bp, Artificial Sequence
  Synthetic Polynucloetide
atggccttaccagtgaccgccttgctcctgccgctggccttgctgctccacgccgccaggccgagctacgtgctgacacagcctccatccgtgtctgtggctccaggacagaccgccagaatcacatgcggcggcaacaacatcggcagcaagagcgtgcactggtatcagcagccacctggacaggctccagtggtggtggtgtacgacgacagcgatagacctagcggcatccccgagagattcagcggcagcaattccggcaataccgccacactgaccatcagcagagtggaagctggcgacgaggccgtgtactactgccaagtgtgggacagcagcagcgatcacgtggtgtttggcggcggaacaaagctgacagtgcttggcggaggcggaagtggaggcggaggatctggcggcggaggctctcaactccagctgcaagagtctggccctggcctggtcaagcctagcgaaacactgagcctgacctgtaccgtgtctggcggctctatcagctccggcagctatttctggggctggatcagacaacctcctggcaaaggactggaatggatcggctccatctactacagcggcagcacctactacaaccccagcctgaagtccagagtgaccatctccgtggacaccagcaagaaccagttctccctgaagctgagcagcgtgacagccgccgataccgccgtgtattattgtgccagacatgacggcgctgtggccggcctgtttgattattggggacagggcaccctggtcaccgtgtcatctgctacgcgtgacggtaacgaggagatgggaggaatcactcaaaccccttacaaagtctcaatttcaggaacaactgttatccttacatgtccccagtatcctggcagcgagatcctttggcagcataacgacaagaatatagggggagatgaagacgataagaatatcggatctgacgaggatcacttgagcctgaaagagttctccgagcttgaacaaagcggatattatgtgtgctatccgcgcgggtcaaagccggaagacgctaacttttacctttatctccgagccagagtgtgcgaaaattgcatggaaatggacgttatgtccgttgctacaatagttatcgtagatatatgcatcacgggtggactgcttctgctggtttattattggtccaagaatagaaaggccaaagctaaacccgtgaccagaggcgctggcgcaggcggaaggcaaaggggacaaaacaaagaacggccaccaccagtgccaaatccagattatgagcctattcggaaaggacagagggacctgtactctggcctgaatcagagaagaatc

SEQ ID NO: 7648 - DNA, 1254 bp, Artificial Sequence
  Synthetic Polynucloetide
atggccttaccagtgaccgccttgctcctgccgctggccttgctgctccacgccgccaggccgagctacgtgctgacacagcctccatccgtgtctgtggctccaggacagaccgccagaatcacatgcggcggcaacaacatcggcagcaagagcgtgcactggtatcagcagccacctggacaggctccagtggtggtggtgtacgacgacagcgatagacctagcggcatccccgagagattcagcggcagcaattccggcaataccgccacactgaccatcagcagagtggaagctggcgacgaggccgtgtactactgccaagtgtgggacagcagcagcgatcacgtggtgtttggcggcggaacaaagctgacagtgcttggcggaggcggaagtggaggcggaggatctggcggcggaggctctcaactccagctgcaagagtctggccctggcctggtcaagcctagcgaaacactgagcctgacctgtaccgtgtctggcggctctatcagctccggcagctatttctggggctggatcagacaacctcctggcaaaggactggaatggatcggctccatctactacagcggcagcacctactacaaccccagcctgaagtccagagtgaccatctccgtggacaccagcaagaaccagttctccctgaagctgagcagcgtgacagccgccgataccgccgtgtattattgtgccagacatgacggcgctgtggccggcctgtttgattattggggacagggcaccctggtcaccgtgtcatctgctacgcgtttcaagatccccatcgaggaactggaagatcgggtgttcgtgaactgcaacacctctatcacctgggtggaaggcaccgtgggaacactgctgagcgacatcaccagactggacctcggcaagcggattctggaccctcggggcatctacagatgcaacggcaccgacatctacaaggacaaagaaagcaccgtgcaggtccactacagaatgtgccagtcctgcgtggaactggaccctgctacagtggccggcatcatcgtgaccgatgtgatcgctactctgctgctggctctgggagtgttctgcttcgccggacacgaaacaggcagactgtctggcgctgccgatacacaggccctgctgagaaacgaccaagtgtatcagcccctgcgcgacagagatgatgcccagtattctcacctcggcggcaactgggctagaaacaag

SEQ ID NO: 7649 - DNA, 1284 bp, Artificial Sequence
  Synthetic Polynucloetide
atggccttaccagtgaccgccttgctcctgccgctggccttgctgctccacgccgccaggccgagctacgtgctgacacagcctccatccgtgtctgtggctccaggacagaccgccagaatcacatgcggcggcaacaacatcggcagcaagagcgtgcactggtatcagcagccacctggacaggctccagtggtggtggtgtacgacgacagcgatagacctagcggcatccccgagagattcagcggcagcaattccggcaataccgccacactgaccatcagcagagtggaagctggcgacgaggccgtgtactactgccaagtgtgggacagcagcagcgatcacgtggtgtttggcggcggaacaaagctgacagtgcttggcggaggcggaagtggaggcggaggatctggcggcggaggctctcaactccagctgcaagagtctggccctggcctggtcaagcctagcgaaacactgagcctgacctgtaccgtgtctggcggctctatcagctccggcagctatttctggggctggatcagacaacctcctggcaaaggactggaatggatcggctccatctactacagcggcagcacctactacaaccccagcctgaagtccagagtgaccatctccgtggacaccagcaagaaccagttctccctgaagctgagcagcgtgacagccgccgataccgccgtgtattattgtgccagacatgacggcgctgtggccggcctgtttgattattggggacagggcaccctggtcaccgtgtcatctgctacgcgtcagagcatcaagggcaaccacctggtcaaggtgtacgactaccaagaggacggcagcgtgctgctgacatgtgatgccgaggccaagaacatcacctggtttaaggacggcaagatgatcggcttcctgaccgaggacaagaagaagtggaacctgggcagcaacgctaaggaccccagaggcatgtatcagtgcaagggcagccagaacaagagcaagcccctccaggtgtactaccggatgtgccagaactgcatcgagctgaacgccgctaccatcagcggctttctgttcgccgagatcgtgtccatcttcgtgctggccgtgggcgtgtactttatcgctggacaggatggcgtgcggcagagcagagcttccgataagcaaaccctgctgcctaacgaccagctgtaccagcctctgaaggacagagaggacgaccagtacagccacctccagggcaatcagctgagaagaaac

SEQ ID NO: 7650 - DNA, 1233 bp, Artificial Sequence
  Synthetic Polynucloetide
atggccttaccagtgaccgccttgctcctgccgctggccttgctgctccacgccgccaggccgagctacgtgctgacacagcctccatccgtgtctgtggctccaggacagaccgccagaatcacatgcggcggcaacaacatcggcagcaagagcgtgcactggtatcagcagccacctggacaggctccagtggtggtggtgtacgacgacagcgatagacctagcggcatccccgagagattcagcggcagcaattccggcaataccgccacactgaccatcagcagagtggaagctggcgacgaggccgtgtactactgccaagtgtgggacagcagcagcgatcacgtggtgtttggcggcggaacaaagctgacagtgcttggcggaggcggaagtggaggcggaggatctggcggcggaggctctcaactccagctgcaagagtctggccctggcctggtcaagcctagcgaaacactgagcctgacctgtaccgtgtctggcggctctatcagctccggcagctatttctggggctggatcagacaacctcctggcaaaggactggaatggatcggctccatctactacagcggcagcacctactacaaccccagcctgaagtccagagtgaccatctccgtggacaccagcaagaaccagttctccctgaagctgagcagcgtgacagccgccgataccgccgtgtattattgtgccagacatgacggcgctgtggccggcctgtttgattattggggacagggcaccctggtcaccgtgtcatctgctacgcgtcagagttttgggttgttggaccctaaattgtgctatctgttggacggaatcctgttcatttacggagtgatcctgaccgcattgttcctgcgggttaagttttccagatccgcagacgcacccgcttaccaacaagggcagaaccaactctacaatgaacttaatttggggcggagggaagagtacgacgttctggacaaaaggaggggacgagatcccgagatgggcggaaagcctcagcgaaggaagaatccgcaagaggggctttataacgaactccagaaagataaaatggcagaagcctatagtgagattgggatgaagggagaaaggaggaggggtaaaggtcacgatgggttgtaccaaggattgagcacagccactaaagatacctatgatgcgctccacatgcaggccctgccgccaaga

SEQ ID NO: 7651 - DNA, 1359 bp, Artificial Sequence
  Synthetic Polynucloetide
atggccttaccagtgaccgccttgctcctgccgctggccttgctgctccacgccgccaggccgcaactccagctgcaagagtctggccctggcctggtcaagcctagcgaaacactgagcctgacctgtaccgtgtctggcggctctatcagctccggcagctatttctggggctggatcagacaacctcctggcaaaggactggaatggatcggctccatctactacagcggcagcacctactacaaccccagcctgaagtccagagtgaccatctccgtggacaccagcaagaaccagttctccctgaagctgagcagcgtgacagccgccgataccgccgtgtattattgtgccagacatgacggcgctgtggccggcctgtttgattattggggacagggcaccctggtcaccgtgtcatctgctggcggaggcggaagtggaggcggaggatctggcggcggaggctctagctacgtgctgacacagcctccatccgtgtctgtggctccaggacagaccgccagaatcacatgcggcggcaacaacatcggcagcaagagcgtgcactggtatcagcagccacctggacaggctccagtggtggtggtgtacgacgacagcgatagacctagcggcatccccgagagattcagcggcagcaattccggcaataccgccacactgaccatcagcagagtggaagctggcgacgaggccgtgtactactgccaagtgtgggacagcagcagcgatcacgtggtgtttggcggcggaacaaagctgacagtgcttacgcgtgacggtaacgaggagatgggaggaatcactcaaaccccttacaaagtctcaatttcaggaacaactgttatccttacatgtccccagtatcctggcagcgagatcctttggcagcataacgacaagaatatagggggagatgaagacgataagaatatcggatctgacgaggatcacttgagcctgaaagagttctccgagcttgaacaaagcggatattatgtgtgctatccgcgcgggtcaaagccggaagacgctaacttttacctttatctccgagccagagtgtgcgaaaattgcatggaaatggacgttatgtccgttgctacaatagttatcgtagatatatgcatcacgggtggactgcttctgctggtttattattggtccaagaatagaaaggccaaagctaaacccgtgaccagaggcgctggcgcaggcggaaggcaaaggggacaaaacaaagaacggccaccaccagtgccaaatccagattatgagcctattcggaaaggacagagggacctgtactctggcctgaatcagagaagaatc

SEQ ID NO: 7652 - DNA, 1254 bp, Artificial Sequence
  Synthetic Polynucloetide
atggccttaccagtgaccgccttgctcctgccgctggccttgctgctccacgccgccaggccgcaactccagctgcaagagtctggccctggcctggtcaagcctagcgaaacactgagcctgacctgtaccgtgtctggcggctctatcagctccggcagctatttctggggctggatcagacaacctcctggcaaaggactggaatggatcggctccatctactacagcggcagcacctactacaaccccagcctgaagtccagagtgaccatctccgtggacaccagcaagaaccagttctccctgaagctgagcagcgtgacagccgccgataccgccgtgtattattgtgccagacatgacggcgctgtggccggcctgtttgattattggggacagggcaccctggtcaccgtgtcatctgctggcggaggcggaagtggaggcggaggatctggcggcggaggctctagctacgtgctgacacagcctccatccgtgtctgtggctccaggacagaccgccagaatcacatgcggcggcaacaacatcggcagcaagagcgtgcactggtatcagcagccacctggacaggctccagtggtggtggtgtacgacgacagcgatagacctagcggcatccccgagagattcagcggcagcaattccggcaataccgccacactgaccatcagcagagtggaagctggcgacgaggccgtgtactactgccaagtgtgggacagcagcagcgatcacgtggtgtttggcggcggaacaaagctgacagtgcttacgcgtttcaagatccccatcgaggaactggaagatcgggtgttcgtgaactgcaacacctctatcacctgggtggaaggcaccgtgggaacactgctgagcgacatcaccagactggacctcggcaagcggattctggaccctcggggcatctacagatgcaacggcaccgacatctacaaggacaaagaaagcaccgtgcaggtccactacagaatgtgccagtcctgcgtggaactggaccctgctacagtggccggcatcatcgtgaccgatgtgatcgctactctgctgctggctctgggagtgttctgcttcgccggacacgaaacaggcagactgtctggcgctgccgatacacaggccctgctgagaaacgaccaagtgtatcagcccctgcgcgacagagatgatgcccagtattctcacctcggcggcaactgggctagaaacaag

SEQ ID NO: 7653 - DNA, 1284 bp, Artificial Sequence
  Synthetic Polynucloetide
atggccttaccagtgaccgccttgctcctgccgctggccttgctgctccacgccgccaggccgcaactccagctgcaagagtctggccctggcctggtcaagcctagcgaaacactgagcctgacctgtaccgtgtctggcggctctatcagctccggcagctatttctggggctggatcagacaacctcctggcaaaggactggaatggatcggctccatctactacagcggcagcacctactacaaccccagcctgaagtccagagtgaccatctccgtggacaccagcaagaaccagttctccctgaagctgagcagcgtgacagccgccgataccgccgtgtattattgtgccagacatgacggcgctgtggccggcctgtttgattattggggacagggcaccctggtcaccgtgtcatctgctggcggaggcggaagtggaggcggaggatctggcggcggaggctctagctacgtgctgacacagcctccatccgtgtctgtggctccaggacagaccgccagaatcacatgcggcggcaacaacatcggcagcaagagcgtgcactggtatcagcagccacctggacaggctccagtggtggtggtgtacgacgacagcgatagacctagcggcatccccgagagattcagcggcagcaattccggcaataccgccacactgaccatcagcagagtggaagctggcgacgaggccgtgtactactgccaagtgtgggacagcagcagcgatcacgtggtgtttggcggcggaacaaagctgacagtgcttacgcgtcagagcatcaagggcaaccacctggtcaaggtgtacgactaccaagaggacggcagcgtgctgctgacatgtgatgccgaggccaagaacatcacctggtttaaggacggcaagatgatcggcttcctgaccgaggacaagaagaagtggaacctgggcagcaacgctaaggaccccagaggcatgtatcagtgcaagggcagccagaacaagagcaagcccctccaggtgtactaccggatgtgccagaactgcatcgagctgaacgccgctaccatcagcggctttctgttcgccgagatcgtgtccatcttcgtgctggccgtgggcgtgtactttatcgctggacaggatggcgtgcggcagagcagagcttccgataagcaaaccctgctgcctaacgaccagctgtaccagcctctgaaggacagagaggacgaccagtacagccacctccagggcaatcagctgagaagaaac

SEQ ID NO: 7654 - DNA, 1233 bp, Artificial Sequence
  Synthetic Polynucloetide
atggccttaccagtgaccgccttgctcctgccgctggccttgctgctccacgccgccaggccgcaactccagctgcaagagtctggccctggcctggtcaagcctagcgaaacactgagcctgacctgtaccgtgtctggcggctctatcagctccggcagctatttctggggctggatcagacaacctcctggcaaaggactggaatggatcggctccatctactacagcggcagcacctactacaaccccagcctgaagtccagagtgaccatctccgtggacaccagcaagaaccagttctccctgaagctgagcagcgtgacagccgccgataccgccgtgtattattgtgccagacatgacggcgctgtggccggcctgtttgattattggggacagggcaccctggtcaccgtgtcatctgctggcggaggcggaagtggaggcggaggatctggcggcggaggctctagctacgtgctgacacagcctccatccgtgtctgtggctccaggacagaccgccagaatcacatgcggcggcaacaacatcggcagcaagagcgtgcactggtatcagcagccacctggacaggctccagtggtggtggtgtacgacgacagcgatagacctagcggcatccccgagagattcagcggcagcaattccggcaataccgccacactgaccatcagcagagtggaagctggcgacgaggccgtgtactactgccaagtgtgggacagcagcagcgatcacgtggtgtttggcggcggaacaaagctgacagtgcttacgcgtcagagttttgggttgttggaccctaaattgtgctatctgttggacggaatcctgttcatttacggagtgatcctgaccgcattgttcctgcgggttaagttttccagatccgcagacgcacccgcttaccaacaagggcagaaccaactctacaatgaacttaatttggggcggagggaagagtacgacgttctggacaaaaggaggggacgagatcccgagatgggcggaaagcctcagcgaaggaagaatccgcaagaggggctttataacgaactccagaaagataaaatggcagaagcctatagtgagattgggatgaagggagaaaggaggaggggtaaaggtcacgatgggttgtaccaaggattgagcacagccactaaagatacctatgatgcgctccacatgcaggccctgccgccaaga

SEQ ID NO: 7655 - DNA, 1935 bp, Artificial Sequence
  Synthetic Polynucloetide
atggccttaccagtgaccgccttgctcctgccgctggccttgctgctccacgccgccaggccgagctacgtgctgacacagcctccatccgtgtctgtggctccaggacagaccgccagaatcacatgcggcggcaacaacatcggcagcaagagcgtgcactggtatcagcagccacctggacaggctccagtggtggtggtgtacgacgacagcgatagacctagcggcatccccgagagattcagcggcagcaattccggcaataccgccacactgaccatcagcagagtggaagctggcgacgaggccgtgtactactgccaagtgtgggacagcagcagcgatcacgtggtgtttggcggcggaacaaagctgacagtgcttggcggaggcggaagtggaggcggaggatctggcggcggaggctctcaactccagctgcaagagtctggccctggcctggtcaagcctagcgaaacactgagcctgacctgtaccgtgtctggcggctctatcagctccggcagctatttctggggctggatcagacaacctcctggcaaaggactggaatggatcggctccatctactacagcggcagcacctactacaaccccagcctgaagtccagagtgaccatctccgtggacaccagcaagaaccagttctccctgaagctgagcagcgtgacagccgccgataccgccgtgtattattgtgccagacatgacggcgctgtggccggcctgtttgattattggggacagggcaccctggtcaccgtgtcatctgctacgcgtgggagcggcatccagaaccctgatcctgccgtgtaccagctgcgggatagcaagagcagcgacaagagcgtgtgtctgttcaccgacttcgacagccagaccaacgtgtcccagagcaaggactccgacgtgtacatcaccgataagaccgtgctggacatgcggagcatggacttcaagagcaactccgccgtggcctggtccaacaagtccgatttcgcctgcgccaacgccttcaacaacagcattatccccgaggacacattcttcccaagccccgagagcagctgcgacgtgaagctggtggaaaagagcttcgagacagacaccaacctgaacttccagaacctgagcgtgatcggcttcagaatcctgctgctgaaagtggccggctttaacctgctgatgaccctgcggctgtggtccagccgcgccaagagaagcggatctggcgtgaagcagaccctgaatttcgacctgctgaagctggctggcgacgtggaatccaacccaggcccttctagaggccatatgaccgagtacaagcccacggtgcgcctcgccacccgcgacgacgtccccagggccgtacgcaccctcgccgccgcgttcgccgactaccccgccacgcgccacaccgtcgatccggaccgccacatcgagcgggtcaccgagctgcaagaactcttcctcacgcgcgtcgggctcgacatcggcaaggtgtgggtcgcggacgacggcgccgcggtggcggtctggaccacgccggagagcgtcgaagcgggggcggtgttcgccgagatcggcccgcgcatggccgagttgagcggttcccggctggccgcgcagcaacagatggaaggcctcctggcgccgcaccggcccaaggagcccgcgtggttcctggccaccgtcggcgtctcgcccgaccaccagggcaagggtctgggcagcgccgtcgtgctccccggagtggaggcggccgagcgcgccggggtgcccgccttcctggagacctccgcgccccgcaacctccccttctacgagcggctcggcttcaccgtcaccgccgacgtcgaggtgcccgaaggaccgcgcacctggtgcatgacccgcaagcccggtgcctga

SEQ ID NO: 7656 - DNA, 2031 bp, Artificial Sequence
  Synthetic Polynucloetide
atggccttaccagtgaccgccttgctcctgccgctggccttgctgctccacgccgccaggccgagctacgtgctgacacagcctccatccgtgtctgtggctccaggacagaccgccagaatcacatgcggcggcaacaacatcggcagcaagagcgtgcactggtatcagcagccacctggacaggctccagtggtggtggtgtacgacgacagcgatagacctagcggcatccccgagagattcagcggcagcaattccggcaataccgccacactgaccatcagcagagtggaagctggcgacgaggccgtgtactactgccaagtgtgggacagcagcagcgatcacgtggtgtttggcggcggaacaaagctgacagtgcttggcggaggcggaagtggaggcggaggatctggcggcggaggctctcaactccagctgcaagagtctggccctggcctggtcaagcctagcgaaacactgagcctgacctgtaccgtgtctggcggctctatcagctccggcagctatttctggggctggatcagacaacctcctggcaaaggactggaatggatcggctccatctactacagcggcagcacctactacaaccccagcctgaagtccagagtgaccatctccgtggacaccagcaagaaccagttctccctgaagctgagcagcgtgacagccgccgataccgccgtgtattattgtgccagacatgacggcgctgtggccggcctgtttgattattggggacagggcaccctggtcaccgtgtcatctgctctcgaggacctgaagaacgtgttcccacctgaggtggccgtgttcgagcctagcgaggccgagatcagccacacccagaaagccaccctcgtgtgcctggctaccggcttctaccccgaccatgtggaactgtcttggtgggtcaacggcaaagaggtgcacagcggcgtgtctaccgacccccagccactgaaagaacagcccgccctgaacgacagccggtactgcctgagcagcagactgagagtgtccgccaccttctggcagaacccccggaaccacttcagatgccaggtgcagttctacggcctgagcgagaacgacgagtggacccaggacagagccaagcccgtgacccagatcgtgtctgccgaagcctggggcagagccgattgcggctttaccagcgagagctaccagcagggcgtgctgagcgccaccatcctgtacgagatcctgctgggcaaggccaccctgtacgccgtgctggtgtctgccctggtgctgatggctatggtcaagcggaaggacagccggggaagggccaagcgatctggatctggagcaacaaacttctcactactcaaacaagcaggtgacgtggaggagaatcccgggcctactagaggccatatgaccgagtacaagcccacggtgcgcctcgccacccgcgacgacgtccccagggccgtacgcaccctcgccgccgcgttcgccgactaccccgccacgcgccacaccgtcgatccggaccgccacatcgagcgggtcaccgagctgcaagaactcttcctcacgcgcgtcgggctcgacatcggcaaggtgtgggtcgcggacgacggcgccgcggtggcggtctggaccacgccggagagcgtcgaagcgggggcggtgttcgccgagatcggcccgcgcatggccgagttgagcggttcccggctggccgcgcagcaacagatggaaggcctcctggcgccgcaccggcccaaggagcccgcgtggttcctggccaccgtcggcgtctcgcccgaccaccagggcaagggtctgggcagcgccgtcgtgctccccggagtggaggcggccgagcgcgccggggtgcccgccttcctggagacctccgcgccccgcaacctccccttctacgagcggctcggcttcaccgtcaccgccgacgtcgaggtgcccgaaggaccgcgcacctggtgcatgacccgcaagcccggtgcctga

SEQ ID NO: 7657 - DNA, 2181 bp, Artificial Sequence
  Synthetic Polynucloetide
atggccttaccagtgaccgccttgctcctgccgctggccttgctgctccacgccgccaggccgagctacgtgctgacacagcctccatccgtgtctgtggctccaggacagaccgccagaatcacatgcggcggcaacaacatcggcagcaagagcgtgcactggtatcagcagccacctggacaggctccagtggtggtggtgtacgacgacagcgatagacctagcggcatccccgagagattcagcggcagcaattccggcaataccgccacactgaccatcagcagagtggaagctggcgacgaggccgtgtactactgccaagtgtgggacagcagcagcgatcacgtggtgtttggcggcggaacaaagctgacagtgcttggcggaggcggaagtggaggcggaggatctggcggcggaggctctcaactccagctgcaagagtctggccctggcctggtcaagcctagcgaaacactgagcctgacctgtaccgtgtctggcggctctatcagctccggcagctatttctggggctggatcagacaacctcctggcaaaggactggaatggatcggctccatctactacagcggcagcacctactacaaccccagcctgaagtccagagtgaccatctccgtggacaccagcaagaaccagttctccctgaagctgagcagcgtgacagccgccgataccgccgtgtattattgtgccagacatgacggcgctgtggccggcctgtttgattattggggacagggcaccctggtcaccgtgtcatctgctacgcgtgagcagaaactgatctcggaagaggatctggggagcggcaccccattcccttctctggcccctcccatcatgctgctggtggacggcaagcagcagatggtggtcgtgtgcctggtgctggatgtggccccacctggactggacagccccatctggtttagcgccggcaatggctctgccctggacgcctttacctacggcccaagccctgccaccgatggcacctggacaaatctggcccacctgagcctgcccagcgaggaactggcttcttgggagcctctcgtgtgccacacaggacctggcgctgagggacacagcagatccacccagcctatgcacctgtctggcgaggccagcaccgccagaacctgtcctcaggaacctctgagaggcacccctggcggagcactgtggctgggagtgctgagactgctgctgttcaagctgctgctgtttgacctgctgctgacctgctcctgtctgtgcgatcctgccggccctctgccttctcctgccaccaccacaagactgagagccctgggcagccacagactgcaccctgccacagagacaggcggcagagaggccacaagcagccctagaccccagcccagagacagaagatggggcgataccccccctggcagaaagcctggatctccagtccgcgccaagagaagcggatctggcgtgaagcagaccctgaatttcgacctgctgaagctggctggcgacgtggaatccaacccaggcccttctagatctagaggccatatgaccgagtacaagcccacggtgcgcctcgccacccgcgacgacgtccccagggccgtacgcaccctcgccgccgcgttcgccgactaccccgccacgcgccacaccgtcgatccggaccgccacatcgagcgggtcaccgagctgcaagaactcttcctcacgcgcgtcgggctcgacatcggcaaggtgtgggtcgcggacgacggcgccgcggtggcggtctggaccacgccggagagcgtcgaagcgggggcggtgttcgccgagatcggcccgcgcatggccgagttgagcggttcccggctggccgcgcagcaacagatggaaggcctcctggcgccgcaccggcccaaggagcccgcgtggttcctggccaccgtcggcgtctcgcccgaccaccagggcaagggtctgggcagcgccgtcgtgctccccggagtggaggcggccgagcgcgccggggtgcccgccttcctggagacctccgcgccccgcaacctccccttctacgagcggctcggcttcaccgtcaccgccgacgtcgaggtgcccgaaggaccgcgcacctggtgcatgacccgcaagcccggtgcctga

SEQ ID NO: 7658 - DNA, 1620 bp, Artificial Sequence; identical to SEQ ID NO: 7451
  Synthetic Polynucloetide

SEQ ID NO: 7659 - DNA, 927 bp, Artificial Sequence; identical to SEQ ID NO: 7452
  Synthetic Polynucloetide

SEQ ID NO: 7660 - DNA, 1356 bp, Artificial Sequence
  Synthetic Polynucloetide
atggactggatttggcgcatccttttccttgtcggcgctgctaccggcgcgcattccttcgaacaactccagctgcaagagtctggccctggcctggtcaagcctagcgaaacactgagcctgacctgtaccgtgtctggcggctctatcagctccggcagctatttctggggctggatcagacaacctcctggcaaaggactggaatggatcggctccatctactacagcggcagcacctactacaaccccagcctgaagtccagagtgaccatctccgtggacaccagcaagaaccagttctccctgaagctgagcagcgtgacagccgccgataccgccgtgtattattgtgccagacatgacggcgctgtggccggcctgtttgattattggggacagggcaccctggtcaccgtgtcatctgctacgcgtatccagaaccctgatcctgccgtgtaccagctgcgggatagcaagagcagcgacaagagcgtgtgtctgttcaccgacttcgacagccagaccaacgtgtcccagagcaaggactccgacgtgtacatcaccgataagaccgtgctggacatgcggagcatggacttcaagagcaactccgccgtggcctggtccaacaagtccgatttcgcctgcgccaacgccttcaacaacagcattatccccgaggacacattcttcccaagccccgagagcagctgcgacgtgaagctggtggaaaagagcttcgagacagacaccaacctgaacttccagaacctgagcgtgatcggcttcagaatcctgctgctgaaagtggccggctttaacctgctgatgaccctgcggctgtggtccagccgcgccaagagaagcggatctggcgtgaagcagaccctgaatttcgacctgctgaagctggctggcgacgtggaatccaacccaggcccttctagaggccatatggccaagcctttgtctcaagaagaatccaccctcattgaaagagcaacggctacaatcaacagcatccccatctctgaagactacagcgtcgccagcgcagctctctctagcgacggccgcatcttcactggtgtcaatgtatatcattttactgggggaccttgtgcagaactcgtggtgctgggcactgctgctgctgcggcagctggcaacctgacttgtatcgtcgcgatcggaaatgagaacaggggcatcttgagcccctgcggacggtgccgacaggtgcttctcgatctgcatcctgggatcaaagccatagtgaaggacagtgatggacagccgacggcagttgggattcgtgaattgctgccctctggttatgtgtgggagggctga

SEQ ID NO: 7661 - DNA, 855 bp, Artificial Sequence
  Synthetic Polynucloetide
atggactggatttggcgcatccttttccttgtcggcgctgctaccggcgcgcattccttcgaacaactccagctgcaagagtctggccctggcctggtcaagcctagcgaaacactgagcctgacctgtaccgtgtctggcggctctatcagctccggcagctatttctggggctggatcagacaacctcctggcaaaggactggaatggatcggctccatctactacagcggcagcacctactacaaccccagcctgaagtccagagtgaccatctccgtggacaccagcaagaaccagttctccctgaagctgagcagcgtgacagccgccgataccgccgtgtattattgtgccagacatgacggcgctgtggccggcctgtttgattattggggacagggcaccctggtcaccgtgtcatctgctacgcgtatccagaaccctgatcctgccgtgtaccagctgcgggatagcaagagcagcgacaagagcgtgtgtctgttcaccgacttcgacagccagaccaacgtgtcccagagcaaggactccgacgtgtacatcaccgataagaccgtgctggacatgcggagcatggacttcaagagcaactccgccgtggcctggtccaacaagtccgatttcgcctgcgccaacgccttcaacaacagcattatccccgaggacacattcttcccaagccccgagagcagctgcgacgtgaagctggtggaaaagagcttcgagacagacaccaacctgaacttccagaacctgagcgtgatcggcttcagaatcctgctgctgaaagtggccggctttaacctgctgatgaccctgcggctgtggtccagc

SEQ ID NO: 7662 - DNA, 1674 bp, Artificial Sequence; identical to SEQ ID NO: 7455
  Synthetic Polynucloetide

SEQ ID NO: 7663 - DNA, 984 bp, Artificial Sequence; identical to SEQ ID NO: 7456
  Synthetic Polynucloetide

SEQ ID NO: 7664 - DNA, 1392 bp, Artificial Sequence
  Synthetic Polynucloetide
atggactggatttggcgcatccttttccttgtcggcgctgctaccggcgcgcattccttcgaacaactccagctgcaagagtctggccctggcctggtcaagcctagcgaaacactgagcctgacctgtaccgtgtctggcggctctatcagctccggcagctatttctggggctggatcagacaacctcctggcaaaggactggaatggatcggctccatctactacagcggcagcacctactacaaccccagcctgaagtccagagtgaccatctccgtggacaccagcaagaaccagttctccctgaagctgagcagcgtgacagccgccgataccgccgtgtattattgtgccagacatgacggcgctgtggccggcctgtttgattattggggacagggcaccctggtcaccgtgtcatctgctacgcgtgagcagaaactgatctcggaagaggatgggagcggcatccagaaccctgatcctgccgtgtaccagctgcgggatagcaagagcagcgacaagagcgtgtgtctgttcaccgacttcgacagccagaccaacgtgtcccagagcaaggactccgacgtgtacatcaccgataagtgcgtgctggacatgcggagcatggacttcaagagcaactccgccgtggcctggtccaacaagtccgatttcgcctgcgccaacgccttcaacaacagcattatccccgaggacacattcttcccaagccccgagagcagctgcgacgtgaagctggtggaaaagagcttcgagacagacaccaacctgaacttccagaacctgagcgtgatcggcttcagaatcctgctgctgaaagtggccggctttaacctgctgatgaccctgcggctgtggtccagccgcgccaagagaagcggatctggcgtgaagcagaccctgaatttcgacctgctgaagctggctggcgacgtggaatccaacccaggcccttctagaggccatatggccaagcctttgtctcaagaagaatccaccctcattgaaagagcaacggctacaatcaacagcatccccatctctgaagactacagcgtcgccagcgcagctctctctagcgacggccgcatcttcactggtgtcaatgtatatcattttactgggggaccttgtgcagaactcgtggtgctgggcactgctgctgctgcggcagctggcaacctgacttgtatcgtcgcgatcggaaatgagaacaggggcatcttgagcccctgcggacggtgccgacaggtgcttctcgatctgcatcctgggatcaaagccatagtgaaggacagtgatggacagccgacggcagttgggattcgtgaattgctgccctctggttatgtgtgggagggctga

SEQ ID NO: 7665 - DNA, 894 bp, Artificial Sequence
  Synthetic Polynucloetide
atggactggatttggcgcatccttttccttgtcggcgctgctaccggcgcgcattccttcgaacaactccagctgcaagagtctggccctggcctggtcaagcctagcgaaacactgagcctgacctgtaccgtgtctggcggctctatcagctccggcagctatttctggggctggatcagacaacctcctggcaaaggactggaatggatcggctccatctactacagcggcagcacctactacaaccccagcctgaagtccagagtgaccatctccgtggacaccagcaagaaccagttctccctgaagctgagcagcgtgacagccgccgataccgccgtgtattattgtgccagacatgacggcgctgtggccggcctgtttgattattggggacagggcaccctggtcaccgtgtcatctgctacgcgtgagcagaaactgatctcggaagaggatgggagcggcatccagaaccctgatcctgccgtgtaccagctgcgggatagcaagagcagcgacaagagcgtgtgtctgttcaccgacttcgacagccagaccaacgtgtcccagagcaaggactccgacgtgtacatcaccgataagtgcgtgctggacatgcggagcatggacttcaagagcaactccgccgtggcctggtccaacaagtccgatttcgcctgcgccaacgccttcaacaacagcattatccccgaggacacattcttcccaagccccgagagcagctgcgacgtgaagctggtggaaaagagcttcgagacagacaccaacctgaacttccagaacctgagcgtgatcggcttcagaatcctgctgctgaaagtggccggctttaacctgctgatgaccctgcggctgtggtccagctga

SEQ ID NO: 7666 - DNA, 1935 bp, Artificial Sequence
  Synthetic Polynucloetide
atggccttaccagtgaccgccttgctcctgccgctggccttgctgctccacgccgccaggccgagctacgtgctgacacagcctccatccgtgtctgtggctccaggacagaccgccagaatcacatgcggcggcaacaacatcggcagcaagagcgtgcactggtatcagcagccacctggacaggctccagtggtggtggtgtacgacgacagcgatagacctagcggcatccccgagagattcagcggcagcaattccggcaataccgccacactgaccatcagcagagtggaagctggcgacgaggccgtgtactactgccaagtgtgggacagcagcagcgatcacgtggtgtttggcggcggaacaaagctgacagtgcttggcggaggcggaagtggaggcggaggatctggcggcggaggctctcaactccagctgcaagagtctggccctggcctggtcaagcctagcgaaacactgagcctgacctgtaccgtgtctggcggctctatcagctccggcagctatttctggggctggatcagacaacctcctggcaaaggactggaatggatcggctccatctactacagcggcagcacctactacaaccccagcctgaagtccagagtgaccatctccgtggacaccagcaagaaccagttctccctgaagctgagcagcgtgacagccgccgataccgccgtgtattattgtgccagacatgacggcgctgtggccggcctgtttgattattggggacagggcaccctggtcaccgtgtcatctgctacgcgtgggagcggcatccagaaccctgatcctgccgtgtaccagctgcgggatagcaagagcagcgacaagagcgtgtgtctgttcaccgacttcgacagccagaccaacgtgtcccagagcaaggactccgacgtgtacatcaccgataagaccgtgctggacatgcggagcatggacttcaagagcaactccgccgtggcctggtccaacaagtccgatttcgcctgcgccaacgccttcaacaacagcattatccccgaggacacattcttcccaagcagcgacgtgccctgcgacgtgaagctggtggaaaagagcttcgagacagacaccaacctgaacttccagaacctgagcgtgatcggcttcagaatcctgctgctgaaagtggccggctttaacctgctgatgaccctgcggctgtggtccagccgcgccaagagaagcggatctggcgtgaagcagaccctgaatttcgacctgctgaagctggctggcgacgtggaatccaacccaggcccttctagaggccatatgaccgagtacaagcccacggtgcgcctcgccacccgcgacgacgtccccagggccgtacgcaccctcgccgccgcgttcgccgactaccccgccacgcgccacaccgtcgatccggaccgccacatcgagcgggtcaccgagctgcaagaactcttcctcacgcgcgtcgggctcgacatcggcaaggtgtgggtcgcggacgacggcgccgcggtggcggtctggaccacgccggagagcgtcgaagcgggggcggtgttcgccgagatcggcccgcgcatggccgagttgagcggttcccggctggccgcgcagcaacagatggaaggcctcctggcgccgcaccggcccaaggagcccgcgtggttcctggccaccgtcggcgtctcgcccgaccaccagggcaagggtctgggcagcgccgtcgtgctccccggagtggaggcggccgagcgcgccggggtgcccgccttcctggagacctccgcgccccgcaacctccccttctacgagcggctcggcttcaccgtcaccgccgacgtcgaggtgcccgaaggaccgcgcacctggtgcatgacccgcaagcccggtgcctga

SEQ ID NO: 7667 - DNA, 2031 bp, Artificial Sequence
  Synthetic Polynucloetide
atggccttaccagtgaccgccttgctcctgccgctggccttgctgctccacgccgccaggccgagctacgtgctgacacagcctccatccgtgtctgtggctccaggacagaccgccagaatcacatgcggcggcaacaacatcggcagcaagagcgtgcactggtatcagcagccacctggacaggctccagtggtggtggtgtacgacgacagcgatagacctagcggcatccccgagagattcagcggcagcaattccggcaataccgccacactgaccatcagcagagtggaagctggcgacgaggccgtgtactactgccaagtgtgggacagcagcagcgatcacgtggtgtttggcggcggaacaaagctgacagtgcttggcggaggcggaagtggaggcggaggatctggcggcggaggctctcaactccagctgcaagagtctggccctggcctggtcaagcctagcgaaacactgagcctgacctgtaccgtgtctggcggctctatcagctccggcagctatttctggggctggatcagacaacctcctggcaaaggactggaatggatcggctccatctactacagcggcagcacctactacaaccccagcctgaagtccagagtgaccatctccgtggacaccagcaagaaccagttctccctgaagctgagcagcgtgacagccgccgataccgccgtgtattattgtgccagacatgacggcgctgtggccggcctgtttgattattggggacagggcaccctggtcaccgtgtcatctgctctcgaggacctgaagaacgtgttcccacctgaggtggccgtgttcgagcctagcaaggccgagatcgcccacacccagaaagccaccctcgtgtgcctggctaccggcttctaccccgaccatgtggaactgtcttggtgggtcaacggcaaagaggtgcacagcggcgtgtctaccgacccccagccactgaaagaacagcccgccctgaacgacagccggtactgcctgagcagcagactgagagtgtccgccaccttctggcagaacccccggaaccacttcagatgccaggtgcagttctacggcctgagcgagaacgacgagtggacccaggacagagccaagcccgtgacccagatcgtgtctgccgaagcctggggcagagccgattgcggcatcaccagcgccagctaccaccagggcgtgctgagcgccaccatcctgtacgagatcctgctgggcaaggccaccctgtacgccgtgctggtgtctgccctggtgctgatggctatggtcaagcggaaggacagccggggaagggccaagcgatctggatctggagcaacaaacttctcactactcaaacaagcaggtgacgtggaggagaatcccgggcctactagaggccatatgaccgagtacaagcccacggtgcgcctcgccacccgcgacgacgtccccagggccgtacgcaccctcgccgccgcgttcgccgactaccccgccacgcgccacaccgtcgatccggaccgccacatcgagcgggtcaccgagctgcaagaactcttcctcacgcgcgtcgggctcgacatcggcaaggtgtgggtcgcggacgacggcgccgcggtggcggtctggaccacgccggagagcgtcgaagcgggggcggtgttcgccgagatcggcccgcgcatggccgagttgagcggttcccggctggccgcgcagcaacagatggaaggcctcctggcgccgcaccggcccaaggagcccgcgtggttcctggccaccgtcggcgtctcgcccgaccaccagggcaagggtctgggcagcgccgtcgtgctccccggagtggaggcggccgagcgcgccggggtgcccgccttcctggagacctccgcgccccgcaacctccccttctacgagcggctcggcttcaccgtcaccgccgacgtcgaggtgcccgaaggaccgcgcacctggtgcatgacccgcaagcccggtgcctga

SEQ ID NO: 7668 - DNA, 2100 bp, Artificial Sequence
  Synthetic Polynucloetide
atggccttaccagtgaccgccttgctcctgccgctggccttgctgctccacgccgccaggccgagctacgtgctgacacagcctccatccgtgtctgtggctccaggacagaccgccagaatcacatgcggcggcaacaacatcggcagcaagagcgtgcactggtatcagcagccacctggacaggctccagtggtggtggtgtacgacgacagcgatagacctagcggcatccccgagagattcagcggcagcaattccggcaataccgccacactgaccatcagcagagtggaagctggcgacgaggccgtgtactactgccaagtgtgggacagcagcagcgatcacgtggtgtttggcggcggaacaaagctgacagtgcttggcggaggcggaagtggaggcggaggatctggcggcggaggctctcaactccagctgcaagagtctggccctggcctggtcaagcctagcgaaacactgagcctgacctgtaccgtgtctggcggctctatcagctccggcagctatttctggggctggatcagacaacctcctggcaaaggactggaatggatcggctccatctactacagcggcagcacctactacaaccccagcctgaagtccagagtgaccatctccgtggacaccagcaagaaccagttctccctgaagctgagcagcgtgacagccgccgataccgccgtgtattattgtgccagacatgacggcgctgtggccggcctgtttgattattggggacagggcaccctggtcaccgtgtcatctgctacgcgtgggtctggaggcggaggcagcggcggaggcgggagcggcgacggtaacgaggagatgggaggaatcactcaaaccccttacaaagtctcaatttcaggaacaactgttatccttacatgtccccagtatcctggcagcgagatcctttggcagcataacgacaagaatatagggggagatgaagacgataagaatatcggatctgacgaggatcacttgagcctgaaagagttctccgagcttgaacaaagcggatattatgtgtgctatccgcgcgggtcaaagccggaagacgctaacttttacctttatctccgagccagagtgtgcgaaaattgcatggaaatggacgttatgtccgttgctacaatagttatcgtagatatatgcatcacgggtggactgcttctgctggtttattattggtccaagaatagaaaggccaaagctaaacccgtgaccagaggcgctggcgcaggcggaaggcaaaggggacaaaacaaagaacggccaccaccagtgccaaatccagattatgagcctattcggaaaggacagagggacctgtactctggcctgaatcagagaagaatccgcgccaagagaagcggatctggcgtgaagcagaccctgaatttcgacctgctgaagctggctggcgacgtggaatccaacccaggcccttctagaggccatatgaccgagtacaagcccacggtgcgcctcgccacccgcgacgacgtccccagggccgtacgcaccctcgccgccgcgttcgccgactaccccgccacgcgccacaccgtcgatccggaccgccacatcgagcgggtcaccgagctgcaagaactcttcctcacgcgcgtcgggctcgacatcggcaaggtgtgggtcgcggacgacggcgccgcggtggcggtctggaccacgccggagagcgtcgaagcgggggcggtgttcgccgagatcggcccgcgcatggccgagttgagcggttcccggctggccgcgcagcaacagatggaaggcctcctggcgccgcaccggcccaaggagcccgcgtggttcctggccaccgtcggcgtctcgcccgaccaccagggcaagggtctgggcagcgccgtcgtgctccccggagtggaggcggccgagcgcgccggggtgcccgccttcctggagacctccgcgccccgcaacctccccttctacgagcggctcggcttcaccgtcaccgccgacgtcgaggtgcccgaaggaccgcgcacctggtgcatgacccgcaagcccggtgcctga

SEQ ID NO: 7669 - DNA, 1995 bp, Artificial Sequence
  Synthetic Polynucloetide
atggccttaccagtgaccgccttgctcctgccgctggccttgctgctccacgccgccaggccgagctacgtgctgacacagcctccatccgtgtctgtggctccaggacagaccgccagaatcacatgcggcggcaacaacatcggcagcaagagcgtgcactggtatcagcagccacctggacaggctccagtggtggtggtgtacgacgacagcgatagacctagcggcatccccgagagattcagcggcagcaattccggcaataccgccacactgaccatcagcagagtggaagctggcgacgaggccgtgtactactgccaagtgtgggacagcagcagcgatcacgtggtgtttggcggcggaacaaagctgacagtgcttggcggaggcggaagtggaggcggaggatctggcggcggaggctctcaactccagctgcaagagtctggccctggcctggtcaagcctagcgaaacactgagcctgacctgtaccgtgtctggcggctctatcagctccggcagctatttctggggctggatcagacaacctcctggcaaaggactggaatggatcggctccatctactacagcggcagcacctactacaaccccagcctgaagtccagagtgaccatctccgtggacaccagcaagaaccagttctccctgaagctgagcagcgtgacagccgccgataccgccgtgtattattgtgccagacatgacggcgctgtggccggcctgtttgattattggggacagggcaccctggtcaccgtgtcatctgctacgcgtgggtctggaggcggaggcagcggcggaggcgggagcggcttcaagatccccatcgaggaactggaagatcgggtgttcgtgaactgcaacacctctatcacctgggtggaaggcaccgtgggaacactgctgagcgacatcaccagactggacctcggcaagcggattctggaccctcggggcatctacagatgcaacggcaccgacatctacaaggacaaagaaagcaccgtgcaggtccactacagaatgtgccagtcctgcgtggaactggaccctgctacagtggccggcatcatcgtgaccgatgtgatcgctactctgctgctggctctgggagtgttctgcttcgccggacacgaaacaggcagactgtctggcgctgccgatacacaggccctgctgagaaacgaccaagtgtatcagcccctgcgcgacagagatgatgcccagtattctcacctcggcggcaactgggctagaaacaagcgcgccaagagaagcggatctggcgtgaagcagaccctgaatttcgacctgctgaagctggctggcgacgtggaatccaacccaggcccttctagaggccatatgaccgagtacaagcccacggtgcgcctcgccacccgcgacgacgtccccagggccgtacgcaccctcgccgccgcgttcgccgactaccccgccacgcgccacaccgtcgatccggaccgccacatcgagcgggtcaccgagctgcaagaactcttcctcacgcgcgtcgggctcgacatcggcaaggtgtgggtcgcggacgacggcgccgcggtggcggtctggaccacgccggagagcgtcgaagcgggggcggtgttcgccgagatcggcccgcgcatggccgagttgagcggttcccggctggccgcgcagcaacagatggaaggcctcctggcgccgcaccggcccaaggagcccgcgtggttcctggccaccgtcggcgtctcgcccgaccaccagggcaagggtctgggcagcgccgtcgtgctccccggagtggaggcggccgagcgcgccggggtgcccgccttcctggagacctccgcgccccgcaacctccccttctacgagcggctcggcttcaccgtcaccgccgacgtcgaggtgcccgaaggaccgcgcacctggtgcatgacccgcaagcccggtgcctga

SEQ ID NO: 7670 - DNA, 2025 bp, Artificial Sequence
  Synthetic Polynucloetide
atggccttaccagtgaccgccttgctcctgccgctggccttgctgctccacgccgccaggccgagctacgtgctgacacagcctccatccgtgtctgtggctccaggacagaccgccagaatcacatgcggcggcaacaacatcggcagcaagagcgtgcactggtatcagcagccacctggacaggctccagtggtggtggtgtacgacgacagcgatagacctagcggcatccccgagagattcagcggcagcaattccggcaataccgccacactgaccatcagcagagtggaagctggcgacgaggccgtgtactactgccaagtgtgggacagcagcagcgatcacgtggtgtttggcggcggaacaaagctgacagtgcttggcggaggcggaagtggaggcggaggatctggcggcggaggctctcaactccagctgcaagagtctggccctggcctggtcaagcctagcgaaacactgagcctgacctgtaccgtgtctggcggctctatcagctccggcagctatttctggggctggatcagacaacctcctggcaaaggactggaatggatcggctccatctactacagcggcagcacctactacaaccccagcctgaagtccagagtgaccatctccgtggacaccagcaagaaccagttctccctgaagctgagcagcgtgacagccgccgataccgccgtgtattattgtgccagacatgacggcgctgtggccggcctgtttgattattggggacagggcaccctggtcaccgtgtcatctgctacgcgtgggtctggaggcggaggcagcggcggaggcgggagcggccagagcatcaagggcaaccacctggtcaaggtgtacgactaccaagaggacggcagcgtgctgctgacatgtgatgccgaggccaagaacatcacctggtttaaggacggcaagatgatcggcttcctgaccgaggacaagaagaagtggaacctgggcagcaacgctaaggaccccagaggcatgtatcagtgcaagggcagccagaacaagagcaagcccctccaggtgtactaccggatgtgccagaactgcatcgagctgaacgccgctaccatcagcggctttctgttcgccgagatcgtgtccatcttcgtgctggccgtgggcgtgtactttatcgctggacaggatggcgtgcggcagagcagagcttccgataagcaaaccctgctgcctaacgaccagctgtaccagcctctgaaggacagagaggacgaccagtacagccacctccagggcaatcagctgagaagaaaccgcgccaagagaagcggatctggcgtgaagcagaccctgaatttcgacctgctgaagctggctggcgacgtggaatccaacccaggcccttctagaggccatatgaccgagtacaagcccacggtgcgcctcgccacccgcgacgacgtccccagggccgtacgcaccctcgccgccgcgttcgccgactaccccgccacgcgccacaccgtcgatccggaccgccacatcgagcgggtcaccgagctgcaagaactcttcctcacgcgcgtcgggctcgacatcggcaaggtgtgggtcgcggacgacggcgccgcggtggcggtctggaccacgccggagagcgtcgaagcgggggcggtgttcgccgagatcggcccgcgcatggccgagttgagcggttcccggctggccgcgcagcaacagatggaaggcctcctggcgccgcaccggcccaaggagcccgcgtggttcctggccaccgtcggcgtctcgcccgaccaccagggcaagggtctgggcagcgccgtcgtgctccccggagtggaggcggccgagcgcgccggggtgcccgccttcctggagacctccgcgccccgcaacctccccttctacgagcggctcggcttcaccgtcaccgccgacgtcgaggtgcccgaaggaccgcgcacctggtgcatgacccgcaagcccggtgcctga

SEQ ID NO: 7671 - DNA, 1974 bp, Artificial Sequence
  Synthetic Polynucloetide
atggccttaccagtgaccgccttgctcctgccgctggccttgctgctccacgccgccaggccgagctacgtgctgacacagcctccatccgtgtctgtggctccaggacagaccgccagaatcacatgcggcggcaacaacatcggcagcaagagcgtgcactggtatcagcagccacctggacaggctccagtggtggtggtgtacgacgacagcgatagacctagcggcatccccgagagattcagcggcagcaattccggcaataccgccacactgaccatcagcagagtggaagctggcgacgaggccgtgtactactgccaagtgtgggacagcagcagcgatcacgtggtgtttggcggcggaacaaagctgacagtgcttggcggaggcggaagtggaggcggaggatctggcggcggaggctctcaactccagctgcaagagtctggccctggcctggtcaagcctagcgaaacactgagcctgacctgtaccgtgtctggcggctctatcagctccggcagctatttctggggctggatcagacaacctcctggcaaaggactggaatggatcggctccatctactacagcggcagcacctactacaaccccagcctgaagtccagagtgaccatctccgtggacaccagcaagaaccagttctccctgaagctgagcagcgtgacagccgccgataccgccgtgtattattgtgccagacatgacggcgctgtggccggcctgtttgattattggggacagggcaccctggtcaccgtgtcatctgctacgcgtgggtctggaggcggaggcagcggcggaggcgggagcggccagagttttgggttgttggaccctaaattgtgctatctgttggacggaatcctgttcatttacggagtgatcctgaccgcattgttcctgcgggttaagttttccagatccgcagacgcacccgcttaccaacaagggcagaaccaactctacaatgaacttaatttggggcggagggaagagtacgacgttctggacaaaaggaggggacgagatcccgagatgggcggaaagcctcagcgaaggaagaatccgcaagaggggctttataacgaactccagaaagataaaatggcagaagcctatagtgagattgggatgaagggagaaaggaggaggggtaaaggtcacgatgggttgtaccaaggattgagcacagccactaaagatacctatgatgcgctccacatgcaggccctgccgccaagacgcgccaagagaagcggatctggcgtgaagcagaccctgaatttcgacctgctgaagctggctggcgacgtggaatccaacccaggcccttctagaggccatatgaccgagtacaagcccacggtgcgcctcgccacccgcgacgacgtccccagggccgtacgcaccctcgccgccgcgttcgccgactaccccgccacgcgccacaccgtcgatccggaccgccacatcgagcgggtcaccgagctgcaagaactcttcctcacgcgcgtcgggctcgacatcggcaaggtgtgggtcgcggacgacggcgccgcggtggcggtctggaccacgccggagagcgtcgaagcgggggcggtgttcgccgagatcggcccgcgcatggccgagttgagcggttcccggctggccgcgcagcaacagatggaaggcctcctggcgccgcaccggcccaaggagcccgcgtggttcctggccaccgtcggcgtctcgcccgaccaccagggcaagggtctgggcagcgccgtcgtgctccccggagtggaggcggccgagcgcgccggggtgcccgccttcctggagacctccgcgccccgcaacctccccttctacgagcggctcggcttcaccgtcaccgccgacgtcgaggtgcccgaaggaccgcgcacctggtgcatgacccgcaagcccggtgcctga

SEQ ID NO: 7672 - DNA, 2274 bp, Artificial Sequence
  Synthetic Polynucloetide
atggccttaccagtgaccgccttgctcctgccgctggccttgctgctccacgccgccaggccggaagtgcagctggttgaatctggcggaggactggttcagcctggcggatctctgagactgtcttgtgccgccagcggcttcagcttcagcgacttttggatgagctgggtccgacaggcccctggcaaaggacttgaatgggtcgccacaatcagccaggccggcagcgagaaggactacgtggactctgtgaagggcagattcaccatcagccgggacaacgccaagaagtccctgtacctccagatgaacagcctgagagccgaggacaccgccgtgtactattgtgcctctggcgtgtacagcttcgactacagaggccagggcaccctggtcacagtctcttctggtaccggcggaggcggatctggcggcggaggtagcggtggcggaggatctgaattcagctacgtgctgacacagcctccatccgtgtctgtggctccaggacagaccgccagaatcacatgcggcggcaacaacatcggcagcaagagcgtgcactggtatcagcagccacctggacaggctccagtggtggtggtgtacgacgacagcgatagacctagcggcatccccgagagattcagcggcagcaattccggcaataccgccacactgaccatcagcagagtggaagctggcgacgaggccgtgtactactgccaagtgtgggacagcagcagcgatcacgtggtgtttggcggcggaacaaagctgacagtgcttctcgaggacctgaagaacgtgttcccacctgaggtggccgtgttcgagcctagcgaggccgagatcagccacacccagaaagccaccctcgtgtgcctggctaccggcttctaccccgaccatgtggaactgtcttggtgggtcaacggcaaagaggtgcacagcggcgtgtgtaccgacccccagccactgaaagaacagcccgccctgaacgacagccggtactgcctgagcagcagactgagagtgtccgccaccttctggcagaacccccggaaccacttcagatgccaggtgcagttctacggcctgagcgagaacgacgagtggacccaggacagagccaagcccgtgacccagatcgtgtctgccgaagcctggggcagagccgattgcggctttaccagcgagagctaccagcagggcgtgctgagcgccaccatcctgtacgagatcctgctgggcaaggccaccctgtacgccgtgctggtgtctgccctggtgctgatggctatggtcaagcggaaggacagccggggaagggccaagcgatctggatctggagcaacaaacttctcactactcaaacaagcaggtgacgtggaggagaatcccgggcctactagtatggactggatttggcgcatccttttccttgtcggcgctgctaccggcgcgcattccttcgaacaactccagctgcaagagtctggccctggcctggtcaagcctagcgaaacactgagcctgacctgtaccgtgtctggcggctctatcagctccggcagctatttctggggctggatcagacaacctcctggcaaaggactggaatggatcggctccatctactacagcggcagcacctactacaaccccagcctgaagtccagagtgaccatctccgtggacaccagcaagaaccagttctccctgaagctgagcagcgtgacagccgccgataccgccgtgtattattgtgccagacatgacggcgctgtggccggcctgtttgattattggggacagggcaccctggtcaccgtgtcatctgctacgcgtatccagaaccctgatcctgccgtgtaccagctgcgggatagcaagagcagcgacaagagcgtgtgtctgttcaccgacttcgacagccagaccaacgtgtcccagagcaaggactccgacgtgtacatcaccgataagtgcgtgctggacatgcggagcatggacttcaagagcaactccgccgtggcctggtccaacaagtccgatttcgcctgcgccaacgccttcaacaacagcattatccccgaggacacattcttcccaagccccgagagcagctgcgacgtgaagctggtggaaaagagcttcgagacagacaccaacctgaacttccagaacctgagcgtgatcggcttcagaatcctgctgctgaaagtggccggctttaacctgctgatgaccctgcggctgtggtccagc

SEQ ID NO: 7673 - DNA, 2286 bp, Artificial Sequence
  Synthetic Polynucloetide
atggccttaccagtgaccgccttgctcctgccgctggccttgctgctccacgccgccaggccggaagtgcagctggttgaatctggcggaggactggttcagcctggcggatctctgagactgtcttgtgccgccagcggcttcagcttcagcgacttttggatgagctgggtccgacaggcccctggcaaaggacttgaatgggtcgccacaatcagccaggccggcagcgagaaggactacgtggactctgtgaagggcagattcaccatcagccgggacaacgccaagaagtccctgtacctccagatgaacagcctgagagccgaggacaccgccgtgtactattgtgcctctggcgtgtacagcttcgactacagaggccagggcaccctggtcacagtctcttctggtaccggcggaggcggatctggcggcggaggtagcggtggcggaggatctgaattcagctacgtgctgacacagcctccatccgtgtctgtggctccaggacagaccgccagaatcacatgcggcggcaacaacatcggcagcaagagcgtgcactggtatcagcagccacctggacaggctccagtggtggtggtgtacgacgacagcgatagacctagcggcatccccgagagattcagcggcagcaattccggcaataccgccacactgaccatcagcagagtggaagctggcgacgaggccgtgtactactgccaagtgtgggacagcagcagcgatcacgtggtgtttggcggcggaacaaagctgacagtgcttctcgagatccagaaccctgatcctgccgtgtaccagctgcgggatagcaagagcagcgacaagagcgtgtgtctgttcaccgacttcgacagccagaccaacgtgtcccagagcaaggactccgacgtgtacatcaccgataagtgcgtgctggacatgcggagcatggacttcaagagcaactccgccgtggcctggtccaacaagtccgatttcgcctgcgccaacgccttcaacaacagcattatccccgaggacacattcttcccaagccccgagagcagctgcgacgtgaagctggtggaaaagagcttcgagacagacaccaacctgaacttccagaacctgagcgtgatcggcttcagaatcctgctgctgaaagtggccggctttaacctgctgatgaccctgcggctgtggtccagccgcgccaagagaagcggatctggcgtgaagcagaccctgaatttcgacctgctgaagctggctggcgacgtggaatccaacccaggccctactagtatggactggatttggcgcatccttttccttgtcggcgctgctaccggcgcgcattccttcgaacaactccagctgcaagagtctggccctggcctggtcaagcctagcgaaacactgagcctgacctgtaccgtgtctggcggctctatcagctccggcagctatttctggggctggatcagacaacctcctggcaaaggactggaatggatcggctccatctactacagcggcagcacctactacaaccccagcctgaagtccagagtgaccatctccgtggacaccagcaagaaccagttctccctgaagctgagcagcgtgacagccgccgataccgccgtgtattattgtgccagacatgacggcgctgtggccggcctgtttgattattggggacagggcaccctggtcaccgtgtcatctgctacgcgtgaggacctgaagaacgtgttcccacctgaggtggccgtgttcgagcctagcgaggccgagatcagccacacccagaaagccaccctcgtgtgcctggctaccggcttctaccccgaccatgtggaactgtcttggtgggtcaacggcaaagaggtgcacagcggcgtgtgtaccgacccccagccactgaaagaacagcccgccctgaacgacagccggtactgcctgagcagcagactgagagtgtccgccaccttctggcagaacccccggaaccacttcagatgccaggtgcagttctacggcctgagcgagaacgacgagtggacccaggacagagccaagcccgtgacccagatcgtgtctgccgaagcctggggcagagccgattgcggctttaccagcgagagctaccagcagggcgtgctgagcgccaccatcctgtacgagatcctgctgggcaaggccaccctgtacgccgtgctggtgtctgccctggtgctgatggctatggtcaagcggaaggacagccgggga

SEQ ID NO: 7674 - DNA, 2862 bp, Artificial Sequence
  Synthetic Polynucloetide
atggccttaccagtgaccgccttgctcctgccgctggccttgctgctccacgccgccaggccggaagtgcagctggttgaatctggcggaggactggttcagcctggcggatctctgagactgtcttgtgccgccagcggcttcagcttcagcgacttttggatgagctgggtccgacaggcccctggcaaaggacttgaatgggtcgccacaatcagccaggccggcagcgagaaggactacgtggactctgtgaagggcagattcaccatcagccgggacaacgccaagaagtccctgtacctccagatgaacagcctgagagccgaggacaccgccgtgtactattgtgcctctggcgtgtacagcttcgactacagaggccagggcaccctggtcacagtctcttctggtaccggcggaggcggatctggcggcggaggtagcggtggcggaggatctgaattcagctacgtgctgacacagcctccatccgtgtctgtggctccaggacagaccgccagaatcacatgcggcggcaacaacatcggcagcaagagcgtgcactggtatcagcagccacctggacaggctccagtggtggtggtgtacgacgacagcgatagacctagcggcatccccgagagattcagcggcagcaattccggcaataccgccacactgaccatcagcagagtggaagctggcgacgaggccgtgtactactgccaagtgtgggacagcagcagcgatcacgtggtgtttggcggcggaacaaagctgacagtgcttctcgaggacctgaagaacgtgttcccacctgaggtggccgtgttcgagcctagcgaggccgagatcagccacacccagaaagccaccctcgtgtgcctggctaccggcttctaccccgaccatgtggaactgtcttggtgggtcaacggcaaagaggtgcacagcggcgtgtctaccgacccccagccactgaaagaacagcccgccctgaacgacagccggtactgcctgagcagcagactgagagtgtccgccaccttctggcagaacccccggaaccacttcagatgccaggtgcagttctacggcctgagcgagaacgacgagtggacccaggacagagccaagcccgtgacccagatcgtgtctgccgaagcctggggcagagccgattgcggatcccagagcttcggcctgctggaccccaagctgtgctacctgctggatggcatcctgttcatctacggcgtgatcctgaccgccctgttcctgagagtgaagttcagcagaagcgccgacgcccctgcctaccagcagggacagaaccaactgtacaacgagctgaacctgggcagacgggaagagtacgacgtgctggacaagcggagaggcagggaccctgagatgggcggaaagccccagcggagaaagaacccccaggaaggactgtataacgaactccagaaagacaagatggccgaagcctacagcgagatcggcatgaagggcgagcggagaagaggcaagggccacgatggcctgtaccagggcctgagcaccgccaccaaggacacctatgacgccctgcacatgcaggccctgcctccaagaagggccaagcgatctggatctggagcaacaaacttctcactactcaaacaagcaggtgacgtggaggagaatcccgggcctactagtatggactggatttggcgcatccttttccttgtcggcgctgctaccggcgcgcattccttcgaacaactccagctgcaagagtctggccctggcctggtcaagcctagcgaaacactgagcctgacctgtaccgtgtctggcggctctatcagctccggcagctatttctggggctggatcagacaacctcctggcaaaggactggaatggatcggctccatctactacagcggcagcacctactacaaccccagcctgaagtccagagtgaccatctccgtggacaccagcaagaaccagttctccctgaagctgagcagcgtgacagccgccgataccgccgtgtattattgtgccagacatgacggcgctgtggccggcctgtttgattattggggacagggcaccctggtcaccgtgtcatctgctacgcgtatccagaaccctgatcctgccgtgtaccagctgcgggatagcaagagcagcgacaagagcgtgtgtctgttcaccgacttcgacagccagaccaacgtgtcccagagcaaggactccgacgtgtacatcaccgataagaccgtgctggacatgcggagcatggacttcaagagcaactccgccgtggcctggtccaacaagtccgatttcgcctgcgccaacgccttcaacaacagcattatccccgaggacacattcttcccaagccccgagagcagctgcggtacccagagttttgggttgttggaccctaaattgtgctatctgttggacggaatcctgttcatttacggagtgatcctgaccgcattgttcctgcgggttaagttttccagatccgcagacgcacccgcttaccaacaagggcagaaccaactctacaatgaacttaatttggggcggagggaagagtacgacgttctggacaaaaggaggggacgagatcccgagatgggcggaaagcctcagcgaaggaagaatccgcaagaggggctttataacgaactccagaaagataaaatggcagaagcctatagtgagattgggatgaagggagaaaggaggaggggtaaaggtcacgatgggttgtaccaaggattgagcacagccactaaagatacctatgatgcgctccacatgcaggccctgccgccaaga

SEQ ID NO: 7675 - DNA, 2352 bp, Artificial Sequence
  Synthetic Polynucloetide
atggccttaccagtgaccgccttgctcctgccgctggccttgctgctccacgccgccaggccggaagtgcagctggttgaatctggcggaggactggttcagcctggcggatctctgagactgtcttgtgccgccagcggcttcagcttcagcgacttttggatgagctgggtccgacaggcccctggcaaaggacttgaatgggtcgccacaatcagccaggccggcagcgagaaggactacgtggactctgtgaagggcagattcaccatcagccgggacaacgccaagaagtccctgtacctccagatgaacagcctgagagccgaggacaccgccgtgtactattgtgcctctggcgtgtacagcttcgactacagaggccagggcaccctggtcacagtctcttctggtaccggcggaggcggatctggcggcggaggtagcggtggcggaggatctgaattcagctacgtgctgacacagcctccatccgtgtctgtggctccaggacagaccgccagaatcacatgcggcggcaacaacatcggcagcaagagcgtgcactggtatcagcagccacctggacaggctccagtggtggtggtgtacgacgacagcgatagacctagcggcatccccgagagattcagcggcagcaattccggcaataccgccacactgaccatcagcagagtggaagctggcgacgaggccgtgtactactgccaagtgtgggacagcagcagcgatcacgtggtgtttggcggcggaacaaagctgacagtgcttctcgagggacagcctaaggccaatcctaccgtgacactgttccctccaagcagcgaagaactccaggccaacaaggccacacttgtgtgcctgatctccgacttctaccctggggctgtgacagtggcttggaaggccgatggatctcctgtgaaagccggcgtggaaaccaccaagccatccaagcagagcaacaacaaatacgccgccagctcctacctgagcctgacacctgagcagtggaagtcccacagatcctacagctgccaagtgacccacgaaggcagcaccgtggaaaagacagtggcccctacagagtgcagccccatcaagaccgatgtgattacaatggaccccaaggacaactgctccaaggacgccaacgataccctgctgctccagctgaccaacaccagcgcctactacatgtacttgttgctgctgctgaagtccgtggtgtacttcgccatcatcacatgctgcctgctgcggagaaccgccttctgctgcaacggcgagaagtctagggccaagcgatctggatctggagcaacaaacttctcactactcaaacaagcaggtgacgtggaggagaatcccgggcctactagtatggactggatttggcgcatccttttccttgtcggcgctgctaccggcgcgcattccttcgaacaactccagctgcaagagtctggccctggcctggtcaagcctagcgaaacactgagcctgacctgtaccgtgtctggcggctctatcagctccggcagctatttctggggctggatcagacaacctcctggcaaaggactggaatggatcggctccatctactacagcggcagcacctactacaaccccagcctgaagtccagagtgaccatctccgtggacaccagcaagaaccagttctccctgaagctgagcagcgtgacagccgccgataccgccgtgtattattgtgccagacatgacggcgctgtggccggcctgtttgattattggggacagggcaccctggtcaccgtgtcatctgctacgcgtgcctctacaaagggaccctccgtgtttcctctggctcccagcagcaagtctacaagcggaggaacagccgctctgggctgcctggtcaaggattactttcccgagcctgtgaccgtgtcctggaatagcggagcactgacaagcggcgtgcacacctttccagccgtgctgcaaagcagcggcctgtactctctgagcagcgtggtcacagtgcctagctctagcctgggcacccagacctacatctgcaatgtgaaccacaagcctagcaacaccaaggtggacaagagagtggaacccaagagctgtgaagtgaaaaccgactccaccgaccacgtgaagcccaaagagacagagaacaccaagcagcccagcaagagctgccacaagcccaaggccatcgtgcacaccgagaaagtgaacatgatgagcctgaccgtgctgggcctgcggatgctgttcgccaaaaccgtggccgtgaacttcctgctgaccgccaagctgttcttcctc

SEQ ID NO: 7676 - DNA, 2295 bp, Artificial Sequence
  Synthetic Polynucloetide
atggccttaccagtgaccgccttgctcctgccgctggccttgctgctccacgccgccaggccggaagtgcagctggttgaatctggcggaggactggttcagcctggcggatctctgagactgtcttgtgccgccagcggcttcagcttcagcgacttttggatgagctgggtccgacaggcccctggcaaaggacttgaatgggtcgccacaatcagccaggccggcagcgagaaggactacgtggactctgtgaagggcagattcaccatcagccgggacaacgccaagaagtccctgtacctccagatgaacagcctgagagccgaggacaccgccgtgtactattgtgcctctggcgtgtacagcttcgactacagaggccagggcaccctggtcacagtctcttctggtaccggcggaggcggatctggcggcggaggtagcggtggcggaggatctgaattcagctacgtgctgacacagcctccatccgtgtctgtggctccaggacagaccgccagaatcacatgcggcggcaacaacatcggcagcaagagcgtgcactggtatcagcagccacctggacaggctccagtggtggtggtgtacgacgacagcgatagacctagcggcatccccgagagattcagcggcagcaattccggcaataccgccacactgaccatcagcagagtggaagctggcgacgaggccgtgtactactgccaagtgtgggacagcagcagcgatcacgtggtgtttggcggcggaacaaagctgacagtgcttctcgagggacagcctaaggccaatcctaccgtgacactgttccctccaagcagcgaagaactccaggccaacaaggccacacttgtgtgcctgatctccgacttctaccctggggctgtgacagtggcttggaaggccgatggatctcctgtgaaagccggcgtggaaaccaccaagccatccaagcagagcaacaacaaatacgccgccagctcctacctgagcctgacacctgagcagtggaagtcccacagatcctacagctgccaagtgacccacgaaggcagcaccgtggaaaagacagtggcccctacagagtgcagcggcagagccgattgcggctttaccagcgagagctaccagcagggcgtgctgagcgccaccatcctgtacgagatcctgctgggcaaggccaccctgtacgccgtgctggtgtctgccctggtgctgatggctatggtcaagcggaaggacagccggggacgcgccaagagaagcggatctggcgtgaagcagaccctgaatttcgacctgctgaagctggctggcgacgtggaatccaacccaggccctactagtatggactggatttggcgcatccttttccttgtcggcgctgctaccggcgcgcattccttcgaacaactccagctgcaagagtctggccctggcctggtcaagcctagcgaaacactgagcctgacctgtaccgtgtctggcggctctatcagctccggcagctatttctggggctggatcagacaacctcctggcaaaggactggaatggatcggctccatctactacagcggcagcacctactacaaccccagcctgaagtccagagtgaccatctccgtggacaccagcaagaaccagttctccctgaagctgagcagcgtgacagccgccgataccgccgtgtattattgtgccagacatgacggcgctgtggccggcctgtttgattattggggacagggcaccctggtcaccgtgtcatctgctacgcgtgcctctacaaagggaccctccgtgtttcctctggctcccagcagcaagtctacaagcggaggaacagccgctctgggctgcctggtcaaggattactttcccgagcctgtgaccgtgtcctggaatagcggagcactgacaagcggcgtgcacacctttccagccgtgctgcaaagcagcggcctgtactctctgagcagcgtggtcacagtgcctagctctagcctgggcacccagacctacatctgcaatgtgaaccacaagcctagcaacaccaaggtggacaagagagtggaacccaagagctgtatccccgaggacacattcttcccaagccccgagagcagctgcgacgtgaagctggtggaaaagagcttcgagacagacaccaacctgaacttccagaacctgagcgtgatcggcttcagaatcctgctgctgaaagtggccggctttaacctgctgatgaccctgcggctgtggtccagc

SEQ ID NO: 7677 - DNA, 2697 bp, Artificial Sequence
  Synthetic Polynucloetide
atggccttaccagtgaccgccttgctcctgccgctggccttgctgctccacgccgccaggccggaagtgcagctggttgaatctggcggaggactggttcagcctggcggatctctgagactgtcttgtgccgccagcggcttcagcttcagcgacttttggatgagctgggtccgacaggcccctggcaaaggacttgaatgggtcgccacaatcagccaggccggcagcgagaaggactacgtggactctgtgaagggcagattcaccatcagccgggacaacgccaagaagtccctgtacctccagatgaacagcctgagagccgaggacaccgccgtgtactattgtgcctctggcgtgtacagcttcgactacagaggccagggcaccctggtcacagtctcttctggtaccggcggaggcggatctggcggcggaggtagcggtggcggaggatctgaattcagctacgtgctgacacagcctccatccgtgtctgtggctccaggacagaccgccagaatcacatgcggcggcaacaacatcggcagcaagagcgtgcactggtatcagcagccacctggacaggctccagtggtggtggtgtacgacgacagcgatagacctagcggcatccccgagagattcagcggcagcaattccggcaataccgccacactgaccatcagcagagtggaagctggcgacgaggccgtgtactactgccaagtgtgggacagcagcagcgatcacgtggtgtttggcggcggaacaaagctgacagtgcttctcgagatccagaaccctgatcctgccgtgtaccagctgcgggatagcaagagcagcgacaagagcgtgtgtctgttcaccgacttcgacagccagaccaacgtgtcccagagcaaggactccgacgtgtacatcaccgataagtgcgtgctggacatgcggagcatggacttcaagagcaactccgccgtggcctggtccaacaagtccgatttcgcctgcgccaacgccttcaacaacagcattatccccgaggacacattcttcccaagccccgagagcagctgcgacgtgaagctggtggaaaagagcttcgagacagacaccaacctgaacttccagaacctgagcgtgatcggcttcagaatcctgctgctgaaagtggccggctttaacctgctgatgaccctgcggctgtggtccagccgcgccaagagaagcggatctggcgtgaagcagaccctgaatttcgacctgctgaagctggctggcgacgtggaatccaacccaggccctactagtatggactggatttggcgcatccttttccttgtcggcgctgctaccggcgcgcattccgggccccagctccagctgcaagagtctggacctggcctggtcaagcctagcgagacactgagcctgacctgtaccgtgtccggcgatagcatcagcagcggcgattactactggggctggatcagacagcctcctggcaaaggactggaatggatcggccacatctactacagcggcgtgacctactacaaccccagcctgaagtccagagtgaccatcagcgtggacaccagccggaaccagttctccctgaagctgtctagcgtgacagccgccgataccgccgtgtactactgcaccagagaggacagcagcaactggcggagtagaggccagggaacactggtcacagttagctctggatccggcggaggcggaagtggaggcggaggatctggcggcggaggctctttcgaacaactccagctgcaagagtctggccctggcctggtcaagcctagcgaaacactgagcctgacctgtaccgtgtctggcggctctatcagctccggcagctatttctggggctggatcagacaacctcctggcaaaggactggaatggatcggctccatctactacagcggcagcacctactacaaccccagcctgaagtccagagtgaccatctccgtggacaccagcaagaaccagttctccctgaagctgagcagcgtgacagccgccgataccgccgtgtattattgtgccagacatgacggcgctgtggccggcctgtttgattattggggacagggcaccctggtcaccgtgtcatctgctacgcgtgaggacctgaagaacgtgttcccacctgaggtggccgtgttcgagcctagcgaggccgagatcagccacacccagaaagccaccctcgtgtgcctggctaccggcttctaccccgaccatgtggaactgtcttggtgggtcaacggcaaagaggtgcacagcggcgtgtgtaccgacccccagccactgaaagaacagcccgccctgaacgacagccggtactgcctgagcagcagactgagagtgtccgccaccttctggcagaacccccggaaccacttcagatgccaggtgcagttctacggcctgagcgagaacgacgagtggacccaggacagagccaagcccgtgacccagatcgtgtctgccgaagcctggggcagagccgattgcggctttaccagcgagagctaccagcagggcgtgctgagcgccaccatcctgtacgagatcctgctgggcaaggccaccctgtacgccgtgctggtgtctgccctggtgctgatggctatggtcaagcggaaggacagccgggga

SEQ ID NO: 7678 - DNA, 3273 bp, Artificial Sequence
  Synthetic Polynucloetide
atggccttaccagtgaccgccttgctcctgccgctggccttgctgctccacgccgccaggccggaagtgcagctggttgaatctggcggaggactggttcagcctggcggatctctgagactgtcttgtgccgccagcggcttcagcttcagcgacttttggatgagctgggtccgacaggcccctggcaaaggacttgaatgggtcgccacaatcagccaggccggcagcgagaaggactacgtggactctgtgaagggcagattcaccatcagccgggacaacgccaagaagtccctgtacctccagatgaacagcctgagagccgaggacaccgccgtgtactattgtgcctctggcgtgtacagcttcgactacagaggccagggcaccctggtcacagtctcttctggtaccggcggaggcggatctggcggcggaggtagcggtggcggaggatctgaattcagctacgtgctgacacagcctccatccgtgtctgtggctccaggacagaccgccagaatcacatgcggcggcaacaacatcggcagcaagagcgtgcactggtatcagcagccacctggacaggctccagtggtggtggtgtacgacgacagcgatagacctagcggcatccccgagagattcagcggcagcaattccggcaataccgccacactgaccatcagcagagtggaagctggcgacgaggccgtgtactactgccaagtgtgggacagcagcagcgatcacgtggtgtttggcggcggaacaaagctgacagtgcttctcgaggacctgaagaacgtgttcccacctgaggtggccgtgttcgagcctagcgaggccgagatcagccacacccagaaagccaccctcgtgtgcctggctaccggcttctaccccgaccatgtggaactgtcttggtgggtcaacggcaaagaggtgcacagcggcgtgtctaccgacccccagccactgaaagaacagcccgccctgaacgacagccggtactgcctgagcagcagactgagagtgtccgccaccttctggcagaacccccggaaccacttcagatgccaggtgcagttctacggcctgagcgagaacgacgagtggacccaggacagagccaagcccgtgacccagatcgtgtctgccgaagcctggggcagagccgattgcggatcccagagcttcggcctgctggaccccaagctgtgctacctgctggatggcatcctgttcatctacggcgtgatcctgaccgccctgttcctgagagtgaagttcagcagaagcgccgacgcccctgcctaccagcagggacagaaccaactgtacaacgagctgaacctgggcagacgggaagagtacgacgtgctggacaagcggagaggcagggaccctgagatgggcggaaagccccagcggagaaagaacccccaggaaggactgtataacgaactccagaaagacaagatggccgaagcctacagcgagatcggcatgaagggcgagcggagaagaggcaagggccacgatggcctgtaccagggcctgagcaccgccaccaaggacacctatgacgccctgcacatgcaggccctgcctccaagaagggccaagcgatctggatctggagcaacaaacttctcactactcaaacaagcaggtgacgtggaggagaatcccgggcctactagtatggactggatttggcgcatccttttccttgtcggcgctgctaccggcgcgcattccgggccccagctccagctgcaagagtctggacctggcctggtcaagcctagcgagacactgagcctgacctgtaccgtgtccggcgatagcatcagcagcggcgattactactggggctggatcagacagcctcctggcaaaggactggaatggatcggccacatctactacagcggcgtgacctactacaaccccagcctgaagtccagagtgaccatcagcgtggacaccagccggaaccagttctccctgaagctgtctagcgtgacagccgccgataccgccgtgtactactgcaccagagaggacagcagcaactggcggagtagaggccagggaacactggtcacagttagctctggatccggcggaggcggaagtggaggcggaggatctggcggcggaggctctttcgaacaactccagctgcaagagtctggccctggcctggtcaagcctagcgaaacactgagcctgacctgtaccgtgtctggcggctctatcagctccggcagctatttctggggctggatcagacaacctcctggcaaaggactggaatggatcggctccatctactacagcggcagcacctactacaaccccagcctgaagtccagagtgaccatctccgtggacaccagcaagaaccagttctccctgaagctgagcagcgtgacagccgccgataccgccgtgtattattgtgccagacatgacggcgctgtggccggcctgtttgattattggggacagggcaccctggtcaccgtgtcatctgctacgcgtatccagaaccctgatcctgccgtgtaccagctgcgggatagcaagagcagcgacaagagcgtgtgtctgttcaccgacttcgacagccagaccaacgtgtcccagagcaaggactccgacgtgtacatcaccgataagaccgtgctggacatgcggagcatggacttcaagagcaactccgccgtggcctggtccaacaagtccgatttcgcctgcgccaacgccttcaacaacagcattatccccgaggacacattcttcccaagccccgagagcagctgcggtacccagagttttgggttgttggaccctaaattgtgctatctgttggacggaatcctgttcatttacggagtgatcctgaccgcattgttcctgcgggttaagttttccagatccgcagacgcacccgcttaccaacaagggcagaaccaactctacaatgaacttaatttggggcggagggaagagtacgacgttctggacaaaaggaggggacgagatcccgagatgggcggaaagcctcagcgaaggaagaatccgcaagaggggctttataacgaactccagaaagataaaatggcagaagcctatagtgagattgggatgaagggagaaaggaggaggggtaaaggtcacgatgggttgtaccaaggattgagcacagccactaaagatacctatgatgcgctccacatgcaggccctgccgccaaga

SEQ ID NO: 7679 - DNA, 2763 bp, Artificial Sequence
  Synthetic Polynucloetide
atggccttaccagtgaccgccttgctcctgccgctggccttgctgctccacgccgccaggccggaagtgcagctggttgaatctggcggaggactggttcagcctggcggatctctgagactgtcttgtgccgccagcggcttcagcttcagcgacttttggatgagctgggtccgacaggcccctggcaaaggacttgaatgggtcgccacaatcagccaggccggcagcgagaaggactacgtggactctgtgaagggcagattcaccatcagccgggacaacgccaagaagtccctgtacctccagatgaacagcctgagagccgaggacaccgccgtgtactattgtgcctctggcgtgtacagcttcgactacagaggccagggcaccctggtcacagtctcttctggtaccggcggaggcggatctggcggcggaggtagcggtggcggaggatctgaattcagctacgtgctgacacagcctccatccgtgtctgtggctccaggacagaccgccagaatcacatgcggcggcaacaacatcggcagcaagagcgtgcactggtatcagcagccacctggacaggctccagtggtggtggtgtacgacgacagcgatagacctagcggcatccccgagagattcagcggcagcaattccggcaataccgccacactgaccatcagcagagtggaagctggcgacgaggccgtgtactactgccaagtgtgggacagcagcagcgatcacgtggtgtttggcggcggaacaaagctgacagtgcttctcgagggacagcctaaggccaatcctaccgtgacactgttccctccaagcagcgaagaactccaggccaacaaggccacacttgtgtgcctgatctccgacttctaccctggggctgtgacagtggcttggaaggccgatggatctcctgtgaaagccggcgtggaaaccaccaagccatccaagcagagcaacaacaaatacgccgccagctcctacctgagcctgacacctgagcagtggaagtcccacagatcctacagctgccaagtgacccacgaaggcagcaccgtggaaaagacagtggcccctacagagtgcagccccatcaagaccgatgtgattacaatggaccccaaggacaactgctccaaggacgccaacgataccctgctgctccagctgaccaacaccagcgcctactacatgtacttgttgctgctgctgaagtccgtggtgtacttcgccatcatcacatgctgcctgctgcggagaaccgccttctgctgcaacggcgagaagtctagggccaagcgatctggatctggagcaacaaacttctcactactcaaacaagcaggtgacgtggaggagaatcccgggcctactagtatggactggatttggcgcatccttttccttgtcggcgctgctaccggcgcgcattccgggccccagctccagctgcaagagtctggacctggcctggtcaagcctagcgagacactgagcctgacctgtaccgtgtccggcgatagcatcagcagcggcgattactactggggctggatcagacagcctcctggcaaaggactggaatggatcggccacatctactacagcggcgtgacctactacaaccccagcctgaagtccagagtgaccatcagcgtggacaccagccggaaccagttctccctgaagctgtctagcgtgacagccgccgataccgccgtgtactactgcaccagagaggacagcagcaactggcggagtagaggccagggaacactggtcacagttagctctggatccggcggaggcggaagtggaggcggaggatctggcggcggaggctctttcgaacaactccagctgcaagagtctggccctggcctggtcaagcctagcgaaacactgagcctgacctgtaccgtgtctggcggctctatcagctccggcagctatttctggggctggatcagacaacctcctggcaaaggactggaatggatcggctccatctactacagcggcagcacctactacaaccccagcctgaagtccagagtgaccatctccgtggacaccagcaagaaccagttctccctgaagctgagcagcgtgacagccgccgataccgccgtgtattattgtgccagacatgacggcgctgtggccggcctgtttgattattggggacagggcaccctggtcaccgtgtcatctgctacgcgtgcctctacaaagggaccctccgtgtttcctctggctcccagcagcaagtctacaagcggaggaacagccgctctgggctgcctggtcaaggattactttcccgagcctgtgaccgtgtcctggaatagcggagcactgacaagcggcgtgcacacctttccagccgtgctgcaaagcagcggcctgtactctctgagcagcgtggtcacagtgcctagctctagcctgggcacccagacctacatctgcaatgtgaaccacaagcctagcaacaccaaggtggacaagagagtggaacccaagagctgtgaagtgaaaaccgactccaccgaccacgtgaagcccaaagagacagagaacaccaagcagcccagcaagagctgccacaagcccaaggccatcgtgcacaccgagaaagtgaacatgatgagcctgaccgtgctgggcctgcggatgctgttcgccaaaaccgtggccgtgaacttcctgctgaccgccaagctgttcttcctc

SEQ ID NO: 7680 - DNA, 2706 bp, Artificial Sequence
  Synthetic Polynucloetide
atggccttaccagtgaccgccttgctcctgccgctggccttgctgctccacgccgccaggccggaagtgcagctggttgaatctggcggaggactggttcagcctggcggatctctgagactgtcttgtgccgccagcggcttcagcttcagcgacttttggatgagctgggtccgacaggcccctggcaaaggacttgaatgggtcgccacaatcagccaggccggcagcgagaaggactacgtggactctgtgaagggcagattcaccatcagccgggacaacgccaagaagtccctgtacctccagatgaacagcctgagagccgaggacaccgccgtgtactattgtgcctctggcgtgtacagcttcgactacagaggccagggcaccctggtcacagtctcttctggtaccggcggaggcggatctggcggcggaggtagcggtggcggaggatctgaattcagctacgtgctgacacagcctccatccgtgtctgtggctccaggacagaccgccagaatcacatgcggcggcaacaacatcggcagcaagagcgtgcactggtatcagcagccacctggacaggctccagtggtggtggtgtacgacgacagcgatagacctagcggcatccccgagagattcagcggcagcaattccggcaataccgccacactgaccatcagcagagtggaagctggcgacgaggccgtgtactactgccaagtgtgggacagcagcagcgatcacgtggtgtttggcggcggaacaaagctgacagtgcttctcgagggacagcctaaggccaatcctaccgtgacactgttccctccaagcagcgaagaactccaggccaacaaggccacacttgtgtgcctgatctccgacttctaccctggggctgtgacagtggcttggaaggccgatggatctcctgtgaaagccggcgtggaaaccaccaagccatccaagcagagcaacaacaaatacgccgccagctcctacctgagcctgacacctgagcagtggaagtcccacagatcctacagctgccaagtgacccacgaaggcagcaccgtggaaaagacagtggcccctacagagtgcagcggcagagccgattgcggctttaccagcgagagctaccagcagggcgtgctgagcgccaccatcctgtacgagatcctgctgggcaaggccaccctgtacgccgtgctggtgtctgccctggtgctgatggctatggtcaagcggaaggacagccggggacgcgccaagagaagcggatctggcgtgaagcagaccctgaatttcgacctgctgaagctggctggcgacgtggaatccaacccaggccctactagtatggactggatttggcgcatccttttccttgtcggcgctgctaccggcgcgcattccgggccccagctccagctgcaagagtctggacctggcctggtcaagcctagcgagacactgagcctgacctgtaccgtgtccggcgatagcatcagcagcggcgattactactggggctggatcagacagcctcctggcaaaggactggaatggatcggccacatctactacagcggcgtgacctactacaaccccagcctgaagtccagagtgaccatcagcgtggacaccagccggaaccagttctccctgaagctgtctagcgtgacagccgccgataccgccgtgtactactgcaccagagaggacagcagcaactggcggagtagaggccagggaacactggtcacagttagctctggatccggcggaggcggaagtggaggcggaggatctggcggcggaggctctttcgaacaactccagctgcaagagtctggccctggcctggtcaagcctagcgaaacactgagcctgacctgtaccgtgtctggcggctctatcagctccggcagctatttctggggctggatcagacaacctcctggcaaaggactggaatggatcggctccatctactacagcggcagcacctactacaaccccagcctgaagtccagagtgaccatctccgtggacaccagcaagaaccagttctccctgaagctgagcagcgtgacagccgccgataccgccgtgtattattgtgccagacatgacggcgctgtggccggcctgtttgattattggggacagggcaccctggtcaccgtgtcatctgctacgcgtgcctctacaaagggaccctccgtgtttcctctggctcccagcagcaagtctacaagcggaggaacagccgctctgggctgcctggtcaaggattactttcccgagcctgtgaccgtgtcctggaatagcggagcactgacaagcggcgtgcacacctttccagccgtgctgcaaagcagcggcctgtactctctgagcagcgtggtcacagtgcctagctctagcctgggcacccagacctacatctgcaatgtgaaccacaagcctagcaacaccaaggtggacaagagagtggaacccaagagctgtatccccgaggacacattcttcccaagccccgagagcagctgcgacgtgaagctggtggaaaagagcttcgagacagacaccaacctgaacttccagaacctgagcgtgatcggcttcagaatcctgctgctgaaagtggccggctttaacctgctgatgaccctgcggctgtggtccagc

SEQ ID NO: 7681 - DNA, 2277 bp, Artificial Sequence
  Synthetic Polynucloetide
atggccttaccagtgaccgccttgctcctgccgctggccttgctgctccacgccgccaggccggaagtgcaggttttggagtctggcggaggactggttcagcctggcggatctctgagactgtcttgtgccgccagcggcttcaccttcagcaactttgccatgagctgggtccgacaggcccctggcaaaggacttgaatgggtgtccacaatcagcggcagcgccggcacaacagattacgccgattctgtgaagggcagattcaccatcagccgggacaacagcaagaaaaccctgtacctccagatgaacagcctgcgcgtggaagataccgccgtgtactactgtgccgatggcagaggccccttcttcgattatcgcggccagggcacactggtcaccgtttcttctggtaccggcggaggcggatctggcggcggaggtagcggtggcggaggatctgaattcagctacgtgctgacacagcctccatccgtgtctgtggctccaggacagaccgccagaatcacatgcggcggcaacaacatcggcagcaagagcgtgcactggtatcagcagccacctggacaggctccagtggtggtggtgtacgacgacagcgatagacctagcggcatccccgagagattcagcggcagcaattccggcaataccgccacactgaccatcagcagagtggaagctggcgacgaggccgtgtactactgccaagtgtgggacagcagcagcgatcacgtggtgtttggcggcggaacaaagctgacagtgcttctcgaggacctgaagaacgtgttcccacctgaggtggccgtgttcgagcctagcgaggccgagatcagccacacccagaaagccaccctcgtgtgcctggctaccggcttctaccccgaccatgtggaactgtcttggtgggtcaacggcaaagaggtgcacagcggcgtgtgtaccgacccccagccactgaaagaacagcccgccctgaacgacagccggtactgcctgagcagcagactgagagtgtccgccaccttctggcagaacccccggaaccacttcagatgccaggtgcagttctacggcctgagcgagaacgacgagtggacccaggacagagccaagcccgtgacccagatcgtgtctgccgaagcctggggcagagccgattgcggctttaccagcgagagctaccagcagggcgtgctgagcgccaccatcctgtacgagatcctgctgggcaaggccaccctgtacgccgtgctggtgtctgccctggtgctgatggctatggtcaagcggaaggacagccggggaagggccaagcgatctggatctggagcaacaaacttctcactactcaaacaagcaggtgacgtggaggagaatcccgggcctactagtatggactggatttggcgcatccttttccttgtcggcgctgctaccggcgcgcattccttcgaacaactccagctgcaagagtctggccctggcctggtcaagcctagcgaaacactgagcctgacctgtaccgtgtctggcggctctatcagctccggcagctatttctggggctggatcagacaacctcctggcaaaggactggaatggatcggctccatctactacagcggcagcacctactacaaccccagcctgaagtccagagtgaccatctccgtggacaccagcaagaaccagttctccctgaagctgagcagcgtgacagccgccgataccgccgtgtattattgtgccagacatgacggcgctgtggccggcctgtttgattattggggacagggcaccctggtcaccgtgtcatctgctacgcgtatccagaaccctgatcctgccgtgtaccagctgcgggatagcaagagcagcgacaagagcgtgtgtctgttcaccgacttcgacagccagaccaacgtgtcccagagcaaggactccgacgtgtacatcaccgataagtgcgtgctggacatgcggagcatggacttcaagagcaactccgccgtggcctggtccaacaagtccgatttcgcctgcgccaacgccttcaacaacagcattatccccgaggacacattcttcccaagccccgagagcagctgcgacgtgaagctggtggaaaagagcttcgagacagacaccaacctgaacttccagaacctgagcgtgatcggcttcagaatcctgctgctgaaagtggccggctttaacctgctgatgaccctgcggctgtggtccagc

SEQ ID NO: 7682 - DNA, 2280 bp, Artificial Sequence
  Synthetic Polynucloetide
atggccttaccagtgaccgccttgctcctgccgctggccttgctgctccacgccgccaggccgagctacgtgctgacacagcctccatccgtgtctgtggctccaggacagaccgccagaatcacatgcggcggcaacaacatcggcagcaagagcgtgcactggtatcagcagccacctggacaggctccagtggtggtggtgtacgacgacagcgatagacctagcggcatccccgagagattcagcggcagcaattccggcaataccgccacactgaccatcagcagagtggaagctggcgacgaggccgtgtactactgccaagtgtgggacagcagcagcgatcacgtggtgtttggcggcggaacaaagctgacagtgcttctcgaggacctgaagaacgtgttcccacctgaggtggccgtgttcgagcctagcgaggccgagatcagccacacccagaaagccaccctcgtgtgcctggctaccggcttctaccccgaccatgtggaactgtcttggtgggtcaacggcaaagaggtgcacagcggcgtgtgtaccgacccccagccactgaaagaacagcccgccctgaacgacagccggtactgcctgagcagcagactgagagtgtccgccaccttctggcagaacccccggaaccacttcagatgccaggtgcagttctacggcctgagcgagaacgacgagtggacccaggacagagccaagcccgtgacccagatcgtgtctgccgaagcctggggcagagccgattgcggctttaccagcgagagctaccagcagggcgtgctgagcgccaccatcctgtacgagatcctgctgggcaaggccaccctgtacgccgtgctggtgtctgccctggtgctgatggctatggtcaagcggaaggacagccggggaagggccaagcgatctggatctggagcaacaaacttctcactactcaaacaagcaggtgacgtggaggagaatcccgggcctactagtatggactggatttggcgcatccttttccttgtcggcgctgctaccggcgcccattccgggcccgaagtgcagctggttgaatctggcggaggactggttcaggctggcggatctctgagactgtcttgtgccgccagcggcagaacctttagcatgggctggtttagacaggcccctggcaaagagagagagttcgtcgccgccatcacatactctggcggcagcccttactacgccgactctgtgaagggcagattcaccatcagccgggacaacgccaagaacaccgtgtacctccagatgaacagcctgaagcctgaggacaccgccgtgtactactgcgccgccaatccaacatacggcagcgactggaacgccgagaattggggccagggaacccaagtgacagtgtctagcggatccggcggcggaggatctggcggaggcggatctgggggcggaggctctttcgaacaactccagctgcaagagtctggccctggcctggtcaagcctagcgaaacactgagcctgacctgtaccgtgtctggcggctctatcagctccggcagctatttctggggctggatcagacaacctcctggcaaaggactggaatggatcggctccatctactacagcggcagcacctactacaaccccagcctgaagtccagagtgaccatctccgtggacaccagcaagaaccagttctccctgaagctgagcagcgtgacagccgccgataccgccgtgtattattgtgccagacatgacggcgctgtggccggcctgtttgattattggggacagggcaccctggtcaccgtgtcatctgctacgcgtatccagaaccctgatcctgccgtgtaccagctgcgggatagcaagagcagcgacaagagcgtgtgtctgttcaccgacttcgacagccagaccaacgtgtcccagagcaaggactccgacgtgtacatcaccgataagtgcgtgctggacatgcggagcatggacttcaagagcaactccgccgtggcctggtccaacaagtccgatttcgcctgcgccaacgccttcaacaacagcattatccccgaggacacattcttcccaagccccgagagcagctgcgacgtgaagctggtggaaaagagcttcgagacagacaccaacctgaacttccagaacctgagcgtgatcggcttcagaatcctgctgctgaaagtggccggctttaacctgctgatgaccctgcggctgtggtccagc

SEQ ID NO: 7683 - DNA, 2661 bp, Artificial Sequence
  Synthetic Polynucloetide
atggccttaccagtgaccgccttgctcctgccgctggccttgctgctccacgccgccaggccgagctacgtgctgacacagcctccatccgtgtctgtggctccaggacagaccgccagaatcacatgcggcggcaacaacatcggcagcaagagcgtgcactggtatcagcagccacctggacaggctccagtggtggtggtgtacgacgacagcgatagacctagcggcatccccgagagattcagcggcagcaattccggcaataccgccacactgaccatcagcagagtggaagctggcgacgaggccgtgtactactgccaagtgtgggacagcagcagcgatcacgtggtgtttggcggcggaacaaagctgacagtgcttctcgaggacctgaagaacgtgttcccacctgaggtggccgtgttcgagcctagcgaggccgagatcagccacacccagaaagccaccctcgtgtgcctggctaccggcttctaccccgaccatgtggaactgtcttggtgggtcaacggcaaagaggtgcacagcggcgtgtgtaccgacccccagccactgaaagaacagcccgccctgaacgacagccggtactgcctgagcagcagactgagagtgtccgccaccttctggcagaacccccggaaccacttcagatgccaggtgcagttctacggcctgagcgagaacgacgagtggacccaggacagagccaagcccgtgacccagatcgtgtctgccgaagcctggggcagagccgattgcggctttaccagcgagagctaccagcagggcgtgctgagcgccaccatcctgtacgagatcctgctgggcaaggccaccctgtacgccgtgctggtgtctgccctggtgctgatggctatggtcaagcggaaggacagccggggaagggccaagcgatctggatctggagcaacaaacttctcactactcaaacaagcaggtgacgtggaggagaatcccgggcctactagtatggactggatttggcgcatccttttccttgtcggcgctgctaccggcgcccattcccaactgcaactgcaagagtctggccctggcctggtcaagccttctgaaaccctgagcctgacctgtaccgtgtccggcggctctatcagcagcggcgattactactggggctggatcagacagcctccaggcaagggactcgaatggatcggcagcatcagctacagcggctccacctactacaacccaagcctgaagtccagagtgaccatcagcgtggacaccagcagaaaccagttctccctgaagctgagcagcgtgacagccgccgatacagccgtgtattattgcaccagagaggacagcagcaactggcggagtagaggacagggcacactggtcacagtgtcctcttctggaggcggtggaagcggtggaggaggatctgaagtgcagctggttgaatctggcggaggactggttcaggctggcggatctctgagactgtcttgtgccgccagcggcagaacctttagcatgggctggtttagacaggcccctggcaaagagagagagttcgtcgccgccatcacatactctggcggcagcccttactacgccgactctgtgaagggcagattcaccatcagccgggacaacgccaagaacaccgtgtacctccagatgaacagcctgaagcctgaggacaccgccgtgtactactgcgccgccaatccaacatacggcagcgactggaacgccgagaattggggccagggaacccaagtgacagtgtctagcggatccggcggcggaggatctggcggaggcggatctgggggcggaggctctttcgaacaactccagctgcaagagtctggccctggcctggtcaagcctagcgaaacactgagcctgacctgtaccgtgtctggcggctctatcagctccggcagctatttctggggctggatcagacaacctcctggcaaaggactggaatggatcggctccatctactacagcggcagcacctactacaaccccagcctgaagtccagagtgaccatctccgtggacaccagcaagaaccagttctccctgaagctgagcagcgtgacagccgccgataccgccgtgtattattgtgccagacatgacggcgctgtggccggcctgtttgattattggggacagggcaccctggtcaccgtgtcatctgctacgcgtatccagaaccctgatcctgccgtgtaccagctgcgggatagcaagagcagcgacaagagcgtgtgtctgttcaccgacttcgacagccagaccaacgtgtcccagagcaaggactccgacgtgtacatcaccgataagtgcgtgctggacatgcggagcatggacttcaagagcaactccgccgtggcctggtccaacaagtccgatttcgcctgcgccaacgccttcaacaacagcattatccccgaggacacattcttcccaagccccgagagcagctgcgacgtgaagctggtggaaaagagcttcgagacagacaccaacctgaacttccagaacctgagcgtgatcggcttcagaatcctgctgctgaaagtggccggctttaacctgctgatgaccctgcggctgtggtccagc

SEQ ID NO: 7684 - DNA, 2688 bp, Artificial Sequence
  Synthetic Polynucloetide
atggccttaccagtgaccgccttgctcctgccgctggccttgctgctccacgccgccaggccggaagtgcaggttttggagtctggcggaggactggttcagcctggcggatctctgagactgtcttgtgccgccagcggcttcaccttcagcaactttgccatgagctgggtccgacaggcccctggcaaaggacttgaatgggtgtccacaatcagcggcagcgccggcacaacagattacgccgattctgtgaagggcagattcaccatcagccgggacaacagcaagaaaaccctgtacctccagatgaacagcctgcgcgtggaagataccgccgtgtactactgtgccgatggcagaggccccttcttcgattatcgcggccagggcacactggtcaccgtttcttctggtaccggcggaggcggatctggcggcggaggtagcggtggcggaggatctgaattcagctacgtgctgacacagcctccatccgtgtctgtggctccaggacagaccgccagaatcacatgcggcggcaacaacatcggcagcaagagcgtgcactggtatcagcagccacctggacaggctccagtggtggtggtgtacgacgacagcgatagacctagcggcatccccgagagattcagcggcagcaattccggcaataccgccacactgaccatcagcagagtggaagctggcgacgaggccgtgtactactgccaagtgtgggacagcagcagcgatcacgtggtgtttggcggcggaacaaagctgacagtgcttctcgaggacctgaagaacgtgttcccacctgaggtggccgtgttcgagcctagcgaggccgagatcagccacacccagaaagccaccctcgtgtgcctggctaccggcttctaccccgaccatgtggaactgtcttggtgggtcaacggcaaagaggtgcacagcggcgtgtgtaccgacccccagccactgaaagaacagcccgccctgaacgacagccggtactgcctgagcagcagactgagagtgtccgccaccttctggcagaacccccggaaccacttcagatgccaggtgcagttctacggcctgagcgagaacgacgagtggacccaggacagagccaagcccgtgacccagatcgtgtctgccgaagcctggggcagagccgattgcggctttaccagcgagagctaccagcagggcgtgctgagcgccaccatcctgtacgagatcctgctgggcaaggccaccctgtacgccgtgctggtgtctgccctggtgctgatggctatggtcaagcggaaggacagccggggaagggccaagcgatctggatctggagcaacaaacttctcactactcaaacaagcaggtgacgtggaggagaatcccgggcctactagtatggactggatttggcgcatccttttccttgtcggcgctgctaccggcgcccattccgggcccgaagtgcagctggttgaatctggcggaggactggttcaggctggcggatctctgagactgtcttgtgccgccagcggcagaacctttagcatgggctggtttagacaggcccctggcaaagagagagagttcgtcgccgccatcacatacagcggcggcagcccttactacgcctcttctgtcagaggccggttcaccatcagccgggacaacgccaagaacaccgtgtacctccagatgaacagcctgaagccagaggacaccgccgtgtactactgtgccgccaatccaacctacggcagcgactggaatgccgagaattggggccagggcacccaagtgacagtgtctagtggatccggcggcggaggatctggcggaggcggatctgggggcggaggctctttcgaacaactccagctgcaagagtctggccctggcctggtcaagcctagcgaaacactgagcctgacctgtaccgtgtctggcggctctatcagctccggcagctatttctggggctggatcagacaacctcctggcaaaggactggaatggatcggctccatctactacagcggcagcacctactacaaccccagcctgaagtccagagtgaccatctccgtggacaccagcaagaaccagttctccctgaagctgagcagcgtgacagccgccgataccgccgtgtattattgtgccagacatgacggcgctgtggccggcctgtttgattattggggacagggcaccctggtcaccgtgtcatctgctacgcgtatccagaaccctgatcctgccgtgtaccagctgcgggatagcaagagcagcgacaagagcgtgtgtctgttcaccgacttcgacagccagaccaacgtgtcccagagcaaggactccgacgtgtacatcaccgataagtgcgtgctggacatgcggagcatggacttcaagagcaactccgccgtggcctggtccaacaagtccgatttcgcctgcgccaacgccttcaacaacagcattatccccgaggacacattcttcccaagccccgagagcagctgcgacgtgaagctggtggaaaagagcttcgagacagacaccaacctgaacttccagaacctgagcgtgatcggcttcagaatcctgctgctgaaagtggccggctttaacctgctgatgaccctgcggctgtggtccagc

SEQ ID NO: 7685 - DNA, 2184 bp, Artificial Sequence
  Synthetic Polynucloetide
atggccttaccagtgaccgccttgctcctgccgctggccttgctgctccacgccgccaggccgagctacgtgctgacacagcctccatccgtgtctgtggctccaggacagaccgccagaatcacatgcggcggcaacaacatcggcagcaagagcgtgcactggtatcagcagccacctggacaggctccagtggtggtggtgtacgacgacagcgatagacctagcggcatccccgagagattcagcggcagcaattccggcaataccgccacactgaccatcagcagagtggaagctggcgacgaggccgtgtactactgccaagtgtgggacagcagcagcgatcacgtggtgtttggcggcggaacaaagctgacagtgcttggcggaggcggaagtggaggcggaggatctggcggcggaggctctcaactccagctgcaagagtctggccctggcctggtcaagcctagcgaaacactgagcctgacctgtaccgtgtctggcggctctatcagctccggcagctatttctggggctggatcagacaacctcctggcaaaggactggaatggatcggctccatctactacagcggcatcagctactacaaccccagcctgaagtccagagtgaccatctccgtggacaccagcaagaaccagttctccctgaagctgagcagcgtgacagccgccgataccgccgtgtattattgtgccagacatgacggcgctgtggccggcctgtttgattattggggacagggcaccctggtcaccgtgtcatctgctacgcgtgagcagaaactgatctcggaagaggatctggcgaagcccaccacgacgccagcgccgcgaccaccaacaccggcgcccaccatcgcgtcgcagcccctgtccctgcgcccagaggcgtgccggccagcggcggggggcgcagtgcacacgagggggctggacttcgcctgtgacatctacatctgggcgcccttggccgggacttgtggggtccttctcctgtcactggttatcaccctttactgcaaacggggcagaaagaaactcctgtatatattcaaacaaccatttatgagaccagtacaaactactcaagaggaagatggctgtagctgccgatttccagaagaagaagaaggaggatgtgaactgagagtgaagttcagcaggagcgcagacgcccccgcgtaccagcagggccagaaccagctctataacgagctgaatctaggacgaagagaggagtacgatgttttggacaagagacgtggccgggaccctgagatggggggaaagccgagaaggaagaaccctcaggaaggcctgtacaatgaactgcagaaagataagatggcggaggcctacagtgagattgggatgaaaggcgagcgccggaggggcaaggggcacgatggcctttaccagggtctcagtacagccaccaaggacacctacgacgcccttcacatgcaggccctgccccctcgctctagtggctccggcgagggcagaggaagtctactaacctgcggagatgtggaagaaaatcctggcccacatatgaccgagtacaagcccacggtgcgcctcgccacccgcgacgacgtccccagggccgtacgcaccctcgccgccgcgttcgccgactaccccgccacgcgccacaccgtcgatccggaccgccacatcgagcgggtcaccgagctgcaagaactcttcctcacgcgcgtcgggctcgacatcggcaaggtgtgggtcgcggacgacggcgccgcggtggcggtctggaccacgccggagagcgtcgaagcgggggcggtgttcgccgagatcggcccgcgcatggccgagttgagcggttcccggctggccgcgcagcaacagatggaaggcctcctggcgccgcaccggcccaaggagcccgcgtggttcctggccaccgtcggcgtctcgcccgaccaccagggcaagggtctgggcagcgccgtcgtgctccccggagtggaggcggccgagcgcgccggggtgcccgccttcctggagacctccgcgccccgcaacctccccttctacgagcggctcggcttcaccgtcaccgccgacgtcgaggtgcccgaaggaccgcgcacctggtgcatgacccgcaagcccggtgcctga

SEQ ID NO: 7686 - DNA, 2166 bp, Artificial Sequence
  Synthetic Polynucloetide
atggccttaccagtgaccgccttgctcctgccgctggccttgctgctccacgccgccaggccgagctacgtgctgacacagcctccatccgtgtctgtggctccaggacagaccgccagaatcacatgcggcggcaacaacatcggcagcaagagcgtgcactggtatcagcagccacctggacaggctccagtggtggtggtgtacgacgacagcgatagacctagcggcatccccgagagattcagcggcagcaattccggcaataccgccacactgaccatcagcagagtggaagctggcgacgaggccgtgtactactgccaagtgtgggacagcagcagcgatcacgtggtgtttggcggcggaacaaagctgacagtgcttggcggaggcggaagtggaggcggaggatctggcggcggaggctctcaactccagctgcaagagtctggccctggcctggtcaagcctagcgaaacactgagcctgacctgtaccgtgtctggcggctctatcagctccggcagctatttctggggctggatcagacaacctcctggcaaaggactggaatggatcggctccatctactacagcggcatcagctactacaaccccagcctgaagtccagagtgaccatctccgtggacaccagcaagaaccagttctccctgaagctgagcagcgtgacagccgccgataccgccgtgtattattgtgccagacatgacggcgctgtggccggcctgtttgattattggggacagggcaccctggtcaccgtgtcatctgctacgcgtgagcagaaactgatctcggaagaggatctgaaaattgaagttatgtatcctcctccttacctagacaatgagaagagcaatggaaccattatccatgtgaaagggaaacacctttgtccaagtcccctatttcccggaccttctaagcccttttgggtgctggtggtggttgggggagtcctggcttgctatagcttgctagtaacagtggcctttattattttctgggtgaggagtaagaggagcaggctcctgcacagtgactacatgaacatgactccacgccgccccggacccacccgcaagcattaccagccctatgccccaccacgcgacttcgcagcctatcgctccagagtgaagttcagcaggagcgcagacgcccccgcgtaccagcagggccagaaccagctctataacgagctcaatctaggacgaagagaggagtacgatgttttggacaagagacgtggccgggaccctgagatggggggaaagccgagaaggaagaaccctcaggaaggcctgtacaatgaactgcagaaagataagatggcggaggcctacagtgagattgggatgaaaggcgagcgccggaggggcaaggggcacgatggcctttaccagggtctcagtacagccaccaaggacacctacgacgcccttcacatgcaggccctgccccctcgctctagtggctccggcgagggcagaggaagtctactaacctgcggagatgtggaagaaaatcctggcccacatatgaccgagtacaagcccacggtgcgcctcgccacccgcgacgacgtccccagggccgtacgcaccctcgccgccgcgttcgccgactaccccgccacgcgccacaccgtcgatccggaccgccacatcgagcgggtcaccgagctgcaagaactcttcctcacgcgcgtcgggctcgacatcggcaaggtgtgggtcgcggacgacggcgccgcggtggcggtctggaccacgccggagagcgtcgaagcgggggcggtgttcgccgagatcggcccgcgcatggccgagttgagcggttcccggctggccgcgcagcaacagatggaaggcctcctggcgccgcaccggcccaaggagcccgcgtggttcctggccaccgtcggcgtctcgcccgaccaccagggcaagggtctgggcagcgccgtcgtgctccccggagtggaggcggccgagcgcgccggggtgcccgccttcctggagacctccgcgccccgcaacctccccttctacgagcggctcggcttcaccgtcaccgccgacgtcgaggtgcccgaaggaccgcgcacctggtgcatgacccgcaagcccggtgcctga

SEQ ID NO: 7687 - DNA, 1494 bp, Artificial Sequence
  Synthetic Polynucloetide
atggccttaccagtgaccgccttgctcctgccgctggccttgctgctccacgccgccaggccgagctacgtgctgacacagcctccatccgtgtctgtggctccaggacagaccgccagaatcacatgcggcggcaacaacatcggcagcaagagcgtgcactggtatcagcagccacctggacaggctccagtggtggtggtgtacgacgacagcgatagacctagcggcatccccgagagattcagcggcagcaattccggcaataccgccacactgaccatcagcagagtggaagctggcgacgaggccgtgtactactgccaagtgtgggacagcagcagcgatcacgtggtgtttggcggcggaacaaagctgacagtgcttggcggaggcggaagtggaggcggaggatctggcggcggaggctctcaactccagctgcaagagtctggccctggcctggtcaagcctagcgaaacactgagcctgacctgtaccgtgtctggcggctctatcagctccggcagctatttctggggctggatcagacaacctcctggcaaaggactggaatggatcggctccatctactacagcggcatcagctactacaaccccagcctgaagtccagagtgaccatctccgtggacaccagcaagaaccagttctccctgaagctgagcagcgtgacagccgccgataccgccgtgtattattgtgccagacatgacggcgctgtggccggcctgtttgattattggggacagggcaccctggtcaccgtgtcatctgctacgcgtgagcagaaactgatctcggaagaggatctgaaaattgaagttatgtatcctcctccttacctagacaatgagaagagcaatggaaccattatccatgtgaaagggaaacacctttgtccaagtcccctatttcccggaccttctaagcccttttgggtgctggtggtggttgggggagtcctggcttgctatagcttgctagtaacagtggcctttattattttctgggtgaggagtaagaggagcaggctcctgcacagtgactacatgaacatgactccacgccgccccggacccacccgcaagcattaccagccctatgccccaccacgcgacttcgcagcctatcgctccagagtgaagttcagcaggagcgcagacgcccccgcgtaccagcagggccagaaccagctctataacgagctcaatctaggacgaagagaggagtacgatgttttggacaagagacgtggccgggaccctgagatggggggaaagccgagaaggaagaaccctcaggaaggcctgtacaatgaactgcagaaagataagatggcggaggcctacagtgagattgggatgaaaggcgagcgccggaggggcaaggggcacgatggcctttaccagggtctcagtacagccaccaaggacacctacgacgcccttcacatgcaggccctgccccctcgc

SEQ ID NO: 7688 - DNA, 1515 bp, Artificial Sequence
  Synthetic Polynucloetide
atggccttaccagtgaccgccttgctcctgccgctggccttgctgctccacgccgccaggccgagctacgtgctgacacagcctccatccgtgtctgtggctccaggacagaccgccagaatcacatgcggcggcaacaacatcggcagcaagagcgtgcactggtatcagcagccacctggacaggctccagtggtggtggtgtacgacgacagcgatagacctagcggcatccccgagagattcagcggcagcaattccggcaataccgccacactgaccatcagcagagtggaagctggcgacgaggccgtgtactactgccaagtgtgggacagcagcagcgatcacgtggtgtttggcggcggaacaaagctgacagtgcttggcggaggcggaagtggaggcggaggatctggcggcggaggctctcaactccagctgcaagagtctggccctggcctggtcaagcctagcgaaacactgagcctgacctgtaccgtgtctggcggctctatcagctccggcagctatttctggggctggatcagacaacctcctggcaaaggactggaatggatcggctccatctactacagcggcatcagctactacaaccccagcctgaagtccagagtgaccatctccgtggacaccagcaagaaccagttctccctgaagctgagcagcgtgacagccgccgataccgccgtgtattattgtgccagacatgacggcgctgtggccggcctgtttgattattggggacagggcaccctggtcaccgtgtcatctgctacgcgtgagcagaaactgatctcggaagaggatctggcgaagcccaccacgacgccagcgccgcgaccaccaacaccggcgcccaccatcgcgtcgcagcccctgtccctgcgcccagaggcgtgccggccagcggcggggggcgcagtgcacacgagggggctggacttcgcctgtgacatctacatctgggcgcccttggccgggacttgtggggtccttctcctgtcactggttatcaccctttactgcaaacggggcagaaagaaactcctgtatatattcaaacaaccatttatgagaccagtacaaactactcaagaggaagatggctgtagctgccgatttccagaagaagaagaaggaggatgtgaactgagagtgaagttcagcaggagcgcagacgcccccgcgtaccagcagggccagaaccagctctataacgagctgaatctaggacgaagagaggagtacgatgttttggacaagagacgtggccgggaccctgagatggggggaaagccgagaaggaagaaccctcaggaaggcctgtacaatgaactgcagaaagataagatggcggaggcctacagtgagattgggatgaaaggcgagcgccggaggggcaaggggcacgatggcctttaccagggtctcagtacagccaccaaggacacctacgacgcccttcacatgcaggccctgccccctcgctga

SEQ ID NO: 7689 - DNA, 1515 bp, Artificial Sequence
  Synthetic Polynucloetide
atggccttaccagtgaccgccttgctcctgccgctggccttgctgctccacgccgccaggccgcaactccagctgcaagagtctggccctggcctggtcaagcctagcgaaacactgagcctgacctgtaccgtgtctggcggctctatcagctccggcagctatttctggggctggatcagacaacctcctggcaaaggactggaatggatcggctccatctactacagcggcatcagctactacaaccccagcctgaagtccagagtgaccatctccgtggacaccagcaagaaccagttctccctgaagctgagcagcgtgacagccgccgataccgccgtgtattattgtgccagacatgacggcgctgtggccggcctgtttgattattggggacagggcaccctggtcaccgtgtcatctgctggcggaggcggaagtggaggcggaggatctggcggcggaggctctagctacgtgctgacacagcctccatccgtgtctgtggctccaggacagaccgccagaatcacatgcggcggcaacaacatcggcagcaagagcgtgcactggtatcagcagccacctggacaggctccagtggtggtggtgtacgacgacagcgatagacctagcggcatccccgagagattcagcggcagcaattccggcaataccgccacactgaccatcagcagagtggaagctggcgacgaggccgtgtactactgccaagtgtgggacagcagcagcgatcacgtggtgtttggcggcggaacaaagctgacagtgcttacgcgtgagcagaaactgatctcggaagaggatctggcgaagcccaccacgacgccagcgccgcgaccaccaacaccggcgcccaccatcgcgtcgcagcccctgtccctgcgcccagaggcgtgccggccagcggcggggggcgcagtgcacacgagggggctggacttcgcctgtgacatctacatctgggcgcccttggccgggacttgtggggtccttctcctgtcactggttatcaccctttactgcaaacggggcagaaagaaactcctgtatatattcaaacaaccatttatgagaccagtacaaactactcaagaggaagatggctgtagctgccgatttccagaagaagaagaaggaggatgtgaactgagagtgaagttcagcaggagcgcagacgcccccgcgtaccagcagggccagaaccagctctataacgagctgaatctaggacgaagagaggagtacgatgttttggacaagagacgtggccgggaccctgagatggggggaaagccgagaaggaagaaccctcaggaaggcctgtacaatgaactgcagaaagataagatggcggaggcctacagtgagattgggatgaaaggcgagcgccggaggggcaaggggcacgatggcctttaccagggtctcagtacagccaccaaggacacctacgacgcccttcacatgcaggccctgccccctcgctga

SEQ ID NO: 7690 - DNA, 2754 bp, Artificial Sequence
  Synthetic Polynucloetide
atggccttaccagtgaccgccttgctcctgccgctggccttgctgctccacgccgccaggccgagctacgtgctgacacagcctccatccgtgtctgtggctccaggacagaccgccagaatcacatgcggcggcaacaacatcggcagcaagagcgtgcactggtatcagcagccacctggacaggctccagtggtggtggtgtacgacgacagcgatagacctagcggcatccccgagagattcagcggcagcaattccggcaataccgccacactgaccatcagcagagtggaagctggcgacgaggccgtgtactactgccaagtgtgggacagcagcagcgatcacgtggtgtttggcggcggaacaaagctgacagtgcttggcggaggcggaagtggaggcggaggatctggcggcggaggctctcaactccagctgcaagagtctggccctggcctggtcaagcctagcgaaacactgagcctgacctgtaccgtgtctggcggctctatcagctccggcagctatttctggggctggatcagacaacctcctggcaaaggactggaatggatcggctccatctactacagcggcatcagctactacaaccccagcctgaagtccagagtgaccatctccgtggacaccagcaagaaccagttctccctgaagctgagcagcgtgacagccgccgataccgccgtgtattattgtgccagacatgacggcgctgtggccggcctgtttgattattggggacagggcaccctggtcaccgtgtcatctgctacgcgtgagcagaaactgatctcggaagaggatctggcgaagcccaccacgacgccagcgccgcgaccaccaacaccggcgcccaccatcgcgtcgcagcccctgtccctgcgcccagaggcgtgccggccagcggcggggggcgcagtgcacacgagggggctggacttcgcctgtgacatctacatctgggcgcccttggccgggacttgtggggtccttctcctgtcactggttatcaccctttactgcgggcgcgccagagtgaagttcagcaggagcgcagacgcccccgcgtaccagcagggccagaaccagctctataacgagctgaatctaggacgaagagaggagtacgatgttttggacaagagacgtggccgggaccctgagatggggggaaagccgagaaggaagaaccctcaggaaggcctgtacaatgaactgcagaaagataagatggcggaggcctacagtgagattgggatgaaaggcgagcgccggaggggcaaggggcacgatggcctttaccagggtctcagtacagccaccaaggacacctacgacgcccttcacatgcaggccctgccccctcgctctagaggatctggagcaacaaacttctcactactcaaacaagcaggtgacgtggaggagaatcccgggcctgggatccacatggccacttacgaggttctctgtgaggtggcgcggaaactgggcacggatgacagggaagtggtattgttcctcctaaacgtgttcatacctcaacccacactggcccaattaattggagctcttagagctttaaaggaggagggcaggttaacgtttcccctgttagcggaatgtctgtttcgtgcaggtcgcagagacctcttgcgcgacctgcttcacttagacccgcgttttttagagcgccacctagcgggcacaatgagttatttcagcccttatcagctcactgttctccacgtagacggggagctgtgtgcgagggatattaggtctttgatatttttaagcaaggacactatagggtctcgcagcacaccacagacattcttacactgggtgtactgtatggaaaacttagacctactgggtcccactgacgtggatgccctaatgtcaatgcttagatctttgtcaagagtagacctacagcgccaagtgcaaaccctaatgggccttcacctttccggcccatcacactcccaacactatcgccatacaccactcgagaccgatttctacgactacaaggacgacgatgacaagactagtggctccggcgagggcagaggaagtctactaacctgcggagatgtggaagaaaatcctggcccacatatgaccgagtacaagcccacggtgcgcctcgccacccgcgacgacgtccccagggccgtacgcaccctcgccgccgcgttcgccgactaccccgccacgcgccacaccgtcgatccggaccgccacatcgagcgggtcaccgagctgcaagaactcttcctcacgcgcgtcgggctcgacatcggcaaggtgtgggtcgcggacgacggcgccgcggtggcggtctggaccacgccggagagcgtcgaagcgggggcggtgttcgccgagatcggcccgcgcatggccgagttgagcggttcccggctggccgcgcagcaacagatggaaggcctcctggcgccgcaccggcccaaggagcccgcgtggttcctggccaccgtcggcgtctcgcccgaccaccagggcaagggtctgggcagcgccgtcgtgctccccggagtggaggcggccgagcgcgccggggtgcccgccttcctggagacctccgcgccccgcaacctccccttctacgagcggctcggcttcaccgtcaccgccgacgtcgaggtgcccgaaggaccgcgcacctggtgcatgacccgcaagcccggtgcctga

SEQ ID NO: 7691 - DNA, 2574 bp, Artificial Sequence
  Synthetic Polynucloetide
atggccttaccagtgaccgccttgctcctgccgctggccttgctgctccacgccgccaggccgagctacgtgctgacacagcctccatccgtgtctgtggctccaggacagaccgccagaatcacatgcggcggcaacaacatcggcagcaagagcgtgcactggtatcagcagccacctggacaggctccagtggtggtggtgtacgacgacagcgatagacctagcggcatccccgagagattcagcggcagcaattccggcaataccgccacactgaccatcagcagagtggaagctggcgacgaggccgtgtactactgccaagtgtgggacagcagcagcgatcacgtggtgtttggcggcggaacaaagctgacagtgcttctcgagatccagaaccctgatcctgccgtgtaccagctgcgggatagcaagagcagcgacaagagcgtgtgtctgttcaccgacttcgacagccagaccaacgtgtcccagagcaaggactccgacgtgtacatcaccgataagtgcgtgctggacatgcggagcatggacttcaagagcaactccgccgtggcctggtccaacaagtccgatttcgcctgcgccaacgccttcaacaacagcattatccccgaggacacattcttcccaagcagcgacgtgccctgcgacgtgaagctggtggaaaagagcttcgagacagacaccaacctgaacttccagaacctgagcgtgatcggcttcagaatcctgctgctgaaagtggccggctttaacctgctgatgaccctgcggctgtggtccagccgcgccaagagaagcggatctggcgtgaagcagaccctgaatttcgacctgctgaagctggctggcgacgtggaatccaacccaggccctactagtatggactggatttggcgcatccttttccttgtcggcgctgctaccggcgcgcattccttcgaacaactccagctgcaagagtctggccctggcctggtcaagcctagcgaaacactgagcctgacctgtaccgtgtctggcggctctatcagctccggcagctatttctggggctggatcagacaacctcctggcaaaggactggaatggatcggctccatctactacagcggcatcagctactacaaccccagcctgaagtccagagtgaccatctccgtggacaccagcaagaaccagttctccctgaagctgagcagcgtgacagccgccgataccgccgtgtattattgtgccagacatgacggcgctgtggccggcctgtttgattattggggacagggcaccctggtcaccgtgtcatctgctacgcgtgaggacctgaagaacgtgttcccacctgaggtggccgtgttcgagcctagcaaggccgagatcgcccacacccagaaagccaccctcgtgtgcctggctaccggcttctaccccgaccatgtggaactgtcttggtgggtcaacggcaaagaggtgcacagcggcgtgtgtaccgacccccagccactgaaagaacagcccgccctgaacgacagccggtactgcctgagcagcagactgagagtgtccgccaccttctggcagaacccccggaaccacttcagatgccaggtgcagttctacggcctgagcgagaacgacgagtggacccaggacagagccaagcccgtgacccagatcgtgtctgccgaagcctggggcagagccgattgcggcatcaccagcgccagctaccaccagggcgtgctgagcgccaccatcctgtacgagatcctgctgggcaaggccaccctgtacgccgtgctggtgtctgccctggtgctgatggctatggtcaagcggaaggacagccggggaagggccaagcgatctggatctggagcaacaaacttctcactactcaaacaagcaggtgacgtggaggagaatcccgggccttctagaggccatatgaccgagtacaagcccacggtgcgcctcgccacccgcgacgacgtccccagggccgtacgcaccctcgccgccgcgttcgccgactaccccgccacgcgccacaccgtcgatccggaccgccacatcgagcgggtcaccgagctgcaagaactcttcctcacgcgcgtcgggctcgacatcggcaaggtgtgggtcgcggacgacggcgccgcggtggcggtctggaccacgccggagagcgtcgaagcgggggcggtgttcgccgagatcggcccgcgcatggccgagttgagcggttcccggctggccgcgcagcaacagatggaaggcctcctggcgccgcaccggcccaaggagcccgcgtggttcctggccaccgtcggcgtctcgcccgaccaccagggcaagggtctgggcagcgccgtcgtgctccccggagtggaggcggccgagcgcgccggggtgcccgccttcctggagacctccgcgccccgcaacctccccttctacgagcggctcggcttcaccgtcaccgccgacgtcgaggtgcccgaaggaccgcgcacctggtgcatgacccgcaagcccggtgcctga

SEQ ID NO: 7692 - DNA, 2571 bp, Artificial Sequence
  Synthetic Polynucloetide
atggccttaccagtgaccgccttgctcctgccgctggccttgctgctccacgccgccaggccgagctacgtgctgacacagcctccatccgtgtctgtggctccaggacagaccgccagaatcacatgcggcggcaacaacatcggcagcaagagcgtgcactggtatcagcagccacctggacaggctccagtggtggtggtgtacgacgacagcgatagacctagcggcatccccgagagattcagcggcagcaattccggcaataccgccacactgaccatcagcagagtggaagctggcgacgaggccgtgtactactgccaagtgtgggacagcagcagcgatcacgtggtgtttggcggcggaacaaagctgacagtgcttctcgaggacctgaagaacgtgttcccacctgaggtggccgtgttcgagcctagcaaggccgagatcgcccacacccagaaagccaccctcgtgtgcctggctaccggcttctaccccgaccatgtggaactgtcttggtgggtcaacggcaaagaggtgcacagcggcgtgtgtaccgacccccagccactgaaagaacagcccgccctgaacgacagccggtactgcctgagcagcagactgagagtgtccgccaccttctggcagaacccccggaaccacttcagatgccaggtgcagttctacggcctgagcgagaacgacgagtggacccaggacagagccaagcccgtgacccagatcgtgtctgccgaagcctggggcagagccgattgcggcatcaccagcgccagctaccaccagggcgtgctgagcgccaccatcctgtacgagatcctgctgggcaaggccaccctgtacgccgtgctggtgtctgccctggtgctgatggctatggtcaagcggaaggacagccggggaagggccaagcgatctggatctggagcaacaaacttctcactactcaaacaagcaggtgacgtggaggagaatcccgggcctactagtatggactggatttggcgcatccttttccttgtcggcgctgctaccggcgcgcattccttcgaacaactccagctgcaagagtctggccctggcctggtcaagcctagcgaaacactgagcctgacctgtaccgtgtctggcggctctatcagctccggcagctatttctggggctggatcagacaacctcctggcaaaggactggaatggatcggctccatctactacagcggcatcagctactacaaccccagcctgaagtccagagtgaccatctccgtggacaccagcaagaaccagttctccctgaagctgagcagcgtgacagccgccgataccgccgtgtattattgtgccagacatgacggcgctgtggccggcctgtttgattattggggacagggcaccctggtcaccgtgtcatctgctacgcgtatccagaaccctgatcctgccgtgtaccagctgcgggatagcaagagcagcgacaagagcgtgtgtctgttcaccgacttcgacagccagaccaacgtgtcccagagcaaggactccgacgtgtacatcaccgataagtgcgtgctggacatgcggagcatggacttcaagagcaactccgccgtggcctggtccaacaagtccgatttcgcctgcgccaacgccttcaacaacagcattatccccgaggacacattcttcccaagcagcgacgtgccctgcgacgtgaagctggtggaaaagagcttcgagacagacaccaacctgaacttccagaacctgagcgtgatcggcttcagaatcctgctgctgaaagtggccggctttaacctgctgatgaccctgcggctgtggtccagccgcgccaagagaagcggatctggcgtgaagcagaccctgaatttcgacctgctgaagctggctggcgacgtggaatccaacccaggcccttctagaggccatatgaccgagtacaagcccacggtgcgcctcgccacccgcgacgacgtccccagggccgtacgcaccctcgccgccgcgttcgccgactaccccgccacgcgccacaccgtcgatccggaccgccacatcgagcgggtcaccgagctgcaagaactcttcctcacgcgcgtcgggctcgacatcggcaaggtgtgggtcgcggacgacggcgccgcggtggcggtctggaccacgccggagagcgtcgaagcgggggcggtgttcgccgagatcggcccgcgcatggccgagttgagcggttcccggctggccgcgcagcaacagatggaaggcctcctggcgccgcaccggcccaaggagcccgcgtggttcctggccaccgtcggcgtctcgcccgaccaccagggcaagggtctgggcagcgccgtcgtgctccccggagtggaggcggccgagcgcgccggggtgcccgccttcctggagacctccgcgccccgcaacctccccttctacgagcggctcggcttcaccgtcaccgccgacgtcgaggtgcccgaaggaccgcgcacctggtgcatgacccgcaagcccggtgcctga

SEQ ID NO: 7693 - DNA, 1869 bp, Artificial Sequence
  Synthetic Polynucloetide
atggccttaccagtgaccgccttgctcctgccgctggccttgctgctccacgccgccaggccgagctacgtgctgacacagcctccatccgtgtctgtggctccaggacagaccgccagaatcacatgcggcggcaacaacatcggcagcaagagcgtgcactggtatcagcagccacctggacaggctccagtggtggtggtgtacgacgacagcgatagacctagcggcatccccgagagattcagcggcagcaattccggcaataccgccacactgaccatcagcagagtggaagctggcgacgaggccgtgtactactgccaagtgtgggacagcagcagcgatcacgtggtgtttggcggcggaacaaagctgacagtgcttctcgaggacctgaagaacgtgttcccacctgaggtggccgtgttcgagcctagcgaggccgagatcagccacacccagaaagccaccctcgtgtgcctggctaccggcttctaccccgaccatgtggaactgtcttggtgggtcaacggcaaagaggtgcacagcggcgtgtgtaccgacccccagccactgaaagaacagcccgccctgaacgacagccggtactgcctgagcagcagactgagagtgtccgccaccttctggcagaacccccggaaccacttcagatgccaggtgcagttctacggcctgagcgagaacgacgagtggacccaggacagagccaagcccgtgacccagatcgtgtctgccgaagcctggggcagagccgattgcggctttaccagcgagagctaccagcagggcgtgctgagcgccaccatcctgtacgagatcctgctgggcaaggccaccctgtacgccgtgctggtgtctgccctggtgctgatggctatggtcaagcggaaggacagccggggaagggccaagcgatctggatctggagcaacaaacttctcactactcaaacaagcaggtgacgtggaggagaatcccgggcctactagtatggactggatttggcgcatccttttccttgtcggcgctgctaccggcgcgcattccttcgaacaactccagctgcaagagtctggccctggcctggtcaagcctagcgaaacactgagcctgacctgtaccgtgtctggcggctctatcagctccggcagctatttctggggctggatcagacaacctcctggcaaaggactggaatggatcggctccatctactacagcggcatcagctactacaaccccagcctgaagtccagagtgaccatctccgtggacaccagcaagaaccagttctccctgaagctgagcagcgtgacagccgccgataccgccgtgtattattgtgccagacatgacggcgctgtggccggcctgtttgattattggggacagggcaccctggtcaccgtgtcatctgctacgcgtatccagaaccctgatcctgccgtgtaccagctgcgggatagcaagagcagcgacaagagcgtgtgtctgttcaccgacttcgacagccagaccaacgtgtcccagagcaaggactccgacgtgtacatcaccgataagtgcgtgctggacatgcggagcatggacttcaagagcaactccgccgtggcctggtccaacaagtccgatttcgcctgcgccaacgccttcaacaacagcattatccccgaggacacattcttcccaagccccgagagcagctgcgacgtgaagctggtggaaaagagcttcgagacagacaccaacctgaacttccagaacctgagcgtgatcggcttcagaatcctgctgctgaaagtggccggctttaacctgctgatgaccctgcggctgtggtccagc

SEQ ID NO: 7694 - DNA, 2544 bp, Artificial Sequence
  Synthetic Polynucloetide
atggccttaccagtgaccgccttgctcctgccgctggccttgctgctccacgccgccaggccgagctacgtgctgacacagcctccatccgtgtctgtggctccaggacagaccgccagaatcacatgcggcggcaacaacatcggcagcaagagcgtgcactggtatcagcagccacctggacaggctccagtggtggtggtgtacgacgacagcgatagacctagcggcatccccgagagattcagcggcagcaattccggcaataccgccacactgaccatcagcagagtggaagctggcgacgaggccgtgtactactgccaagtgtgggacagcagcagcgatcacgtggtgtttggcggcggaacaaagctgacagtgcttctcgaggacctgaagaacgtgttcccacctgaggtggccgtgttcgagcctagcgaggccgagatcagccacacccagaaagccaccctcgtgtgcctggctaccggcttctaccccgaccatgtggaactgtcttggtgggtcaacggcaaagaggtgcacagcggcgtgtgtaccgacccccagccactgaaagaacagcccgccctgaacgacagccggtactgcctgagcagcagactgagagtgtccgccaccttctggcagaacccccggaaccacttcagatgccaggtgcagttctacggcctgagcgagaacgacgagtggacccaggacagagccaagcccgtgacccagatcgtgtctgccgaagcctggggcagagccgattgcggctttaccagcgagagctaccagcagggcgtgctgagcgccaccatcctgtacgagatcctgctgggcaaggccaccctgtacgccgtgctggtgtctgccctggtgctgatggctatggtcaagcggaaggacagccggggaagggccaagcgatctggatctggagcaacaaacttctcactactcaaacaagcaggtgacgtggaggagaatcccgggcctactagtatggactggatttggcgcatccttttccttgtcggcgctgctaccggcgcgcattccttcgaacaactccagctgcaagagtctggccctggcctggtcaagcctagcgaaacactgagcctgacctgtaccgtgtctggcggctctatcagctccggcagctatttctggggctggatcagacaacctcctggcaaaggactggaatggatcggctccatctactacagcggcatcagctactacaaccccagcctgaagtccagagtgaccatctccgtggacaccagcaagaaccagttctccctgaagctgagcagcgtgacagccgccgataccgccgtgtattattgtgccagacatgacggcgctgtggccggcctgtttgattattggggacagggcaccctggtcaccgtgtcatctgctacgcgtatccagaaccctgatcctgccgtgtaccagctgcgggatagcaagagcagcgacaagagcgtgtgtctgttcaccgacttcgacagccagaccaacgtgtcccagagcaaggactccgacgtgtacatcaccgataagtgcgtgctggacatgcggagcatggacttcaagagcaactccgccgtggcctggtccaacaagtccgatttcgcctgcgccaacgccttcaacaacagcattatccccgaggacacattcttcccaagccccgagagcagctgcgacgtgaagctggtggaaaagagcttcgagacagacaccaacctgaacttccagaacctgagcgtgatcggcttcagaatcctgctgctgaaagtggccggctttaacctgctgatgaccctgcggctgtggtccagccgcgccaagagaagcggatctggcgtgaagcagaccctgaatttcgacctgctgaagctggctggcgacgtggaatccaacccaggcccttctagaggcgggatccacaccatggctacctacgaggtgctgtgcgaggtggcaagaaagctgggcaccgacgacagagaagtggtgctgttcctgctgaacgtgttcatccctcagcctacactggcccagctgatcggtgcactgagagccctgaaagaggaaggccggctgacctttcctctgctggccgaatgcctgttcagagccggaagaagggatctgctgcgggacctgctgcatctggaccccagatttctggaaagacacctggccggcaccatgagctacttcagcccttaccagctgaccgtgctgcacgttgacggcgaactgtgcgccagagatattcggagcctgatcttcctgagcaaggacaccatcggcagccggtctacccctcagacatttctgcactgggtgtactgcatggaaaacctggacctgctcggccccacagatgtggatgccctgatgtccatgctgagaagcctgagcagagtggacctccagagacaggtgcagacactgatgggactgcacctgagcggacctagccacagccagcactacagacacacccct

SEQ ID NO: 7695 - DNA, 1881 bp, Artificial Sequence
  Synthetic Polynucloetide
atggccttaccagtgaccgccttgctcctgccgctggccttgctgctccacgccgccaggccgagctacgtgctgacacagcctccatccgtgtctgtggctccaggacagaccgccagaatcacatgcggcggcaacaacatcggcagcaagagcgtgcactggtatcagcagccacctggacaggctccagtggtggtggtgtacgacgacagcgatagacctagcggcatccccgagagattcagcggcagcaattccggcaataccgccacactgaccatcagcagagtggaagctggcgacgaggccgtgtactactgccaagtgtgggacagcagcagcgatcacgtggtgtttggcggcggaacaaagctgacagtgcttctcgagatccagaaccctgatcctgccgtgtaccagctgcgggatagcaagagcagcgacaagagcgtgtgtctgttcaccgacttcgacagccagaccaacgtgtcccagagcaaggactccgacgtgtacatcaccgataagtgcgtgctggacatgcggagcatggacttcaagagcaactccgccgtggcctggtccaacaagtccgatttcgcctgcgccaacgccttcaacaacagcattatccccgaggacacattcttcccaagccccgagagcagctgcgacgtgaagctggtggaaaagagcttcgagacagacaccaacctgaacttccagaacctgagcgtgatcggcttcagaatcctgctgctgaaagtggccggctttaacctgctgatgaccctgcggctgtggtccagccgcgccaagagaagcggatctggcgtgaagcagaccctgaatttcgacctgctgaagctggctggcgacgtggaatccaacccaggccctactagtatggactggatttggcgcatccttttccttgtcggcgctgctaccggcgcgcattccttcgaacaactccagctgcaagagtctggccctggcctggtcaagcctagcgaaacactgagcctgacctgtaccgtgtctggcggctctatcagctccggcagctatttctggggctggatcagacaacctcctggcaaaggactggaatggatcggctccatctactacagcggcatcagctactacaaccccagcctgaagtccagagtgaccatctccgtggacaccagcaagaaccagttctccctgaagctgagcagcgtgacagccgccgataccgccgtgtattattgtgccagacatgacggcgctgtggccggcctgtttgattattggggacagggcaccctggtcaccgtgtcatctgctacgcgtgaggacctgaagaacgtgttcccacctgaggtggccgtgttcgagcctagcgaggccgagatcagccacacccagaaagccaccctcgtgtgcctggctaccggcttctaccccgaccatgtggaactgtcttggtgggtcaacggcaaagaggtgcacagcggcgtgtgtaccgacccccagccactgaaagaacagcccgccctgaacgacagccggtactgcctgagcagcagactgagagtgtccgccaccttctggcagaacccccggaaccacttcagatgccaggtgcagttctacggcctgagcgagaacgacgagtggacccaggacagagccaagcccgtgacccagatcgtgtctgccgaagcctggggcagagccgattgcggctttaccagcgagagctaccagcagggcgtgctgagcgccaccatcctgtacgagatcctgctgggcaaggccaccctgtacgccgtgctggtgtctgccctggtgctgatggctatggtcaagcggaaggacagccgggga

SEQ ID NO: 7696 - DNA, 2547 bp, Artificial Sequence
  Synthetic Polynucloetide
atggccttaccagtgaccgccttgctcctgccgctggccttgctgctccacgccgccaggccgagctacgtgctgacacagcctccatccgtgtctgtggctccaggacagaccgccagaatcacatgcggcggcaacaacatcggcagcaagagcgtgcactggtatcagcagccacctggacaggctccagtggtggtggtgtacgacgacagcgatagacctagcggcatccccgagagattcagcggcagcaattccggcaataccgccacactgaccatcagcagagtggaagctggcgacgaggccgtgtactactgccaagtgtgggacagcagcagcgatcacgtggtgtttggcggcggaacaaagctgacagtgcttctcgagatccagaaccctgatcctgccgtgtaccagctgcgggatagcaagagcagcgacaagagcgtgtgtctgttcaccgacttcgacagccagaccaacgtgtcccagagcaaggactccgacgtgtacatcaccgataagtgcgtgctggacatgcggagcatggacttcaagagcaactccgccgtggcctggtccaacaagtccgatttcgcctgcgccaacgccttcaacaacagcattatccccgaggacacattcttcccaagccccgagagcagctgcgacgtgaagctggtggaaaagagcttcgagacagacaccaacctgaacttccagaacctgagcgtgatcggcttcagaatcctgctgctgaaagtggccggctttaacctgctgatgaccctgcggctgtggtccagccgcgccaagagaagcggatctggcgtgaagcagaccctgaatttcgacctgctgaagctggctggcgacgtggaatccaacccaggccctactagtatggactggatttggcgcatccttttccttgtcggcgctgctaccggcgcgcattccttcgaacaactccagctgcaagagtctggccctggcctggtcaagcctagcgaaacactgagcctgacctgtaccgtgtctggcggctctatcagctccggcagctatttctggggctggatcagacaacctcctggcaaaggactggaatggatcggctccatctactacagcggcatcagctactacaaccccagcctgaagtccagagtgaccatctccgtggacaccagcaagaaccagttctccctgaagctgagcagcgtgacagccgccgataccgccgtgtattattgtgccagacatgacggcgctgtggccggcctgtttgattattggggacagggcaccctggtcaccgtgtcatctgctacgcgtgaggacctgaagaacgtgttcccacctgaggtggccgtgttcgagcctagcgaggccgagatcagccacacccagaaagccaccctcgtgtgcctggctaccggcttctaccccgaccatgtggaactgtcttggtgggtcaacggcaaagaggtgcacagcggcgtgtgtaccgacccccagccactgaaagaacagcccgccctgaacgacagccggtactgcctgagcagcagactgagagtgtccgccaccttctggcagaacccccggaaccacttcagatgccaggtgcagttctacggcctgagcgagaacgacgagtggacccaggacagagccaagcccgtgacccagatcgtgtctgccgaagcctggggcagagccgattgcggctttaccagcgagagctaccagcagggcgtgctgagcgccaccatcctgtacgagatcctgctgggcaaggccaccctgtacgccgtgctggtgtctgccctggtgctgatggctatggtcaagcggaaggacagccggggaagggccaagcgatctggatctggagcaacaaacttctcactactcaaacaagcaggtgacgtggaggagaatcccgggccttctagaggcgggatccacaccatggctacctacgaggtgctgtgcgaggtggcaagaaagctgggcaccgacgacagagaagtggtgctgttcctgctgaacgtgttcatccctcagcctacactggcccagctgatcggtgcactgagagccctgaaagaggaaggccggctgacctttcctctgctggccgaatgcctgttcagagccggaagaagggatctgctgcgggacctgctgcatctggaccccagatttctggaaagacacctggccggcaccatgagctacttcagcccttaccagctgaccgtgctgcacgttgacggcgaactgtgcgccagagatattcggagcctgatcttcctgagcaaggacaccatcggcagccggtctacccctcagacatttctgcactgggtgtactgcatggaaaacctggacctgctcggccccacagatgtggatgccctgatgtccatgctgagaagcctgagcagagtggacctccagagacaggtgcagacactgatgggactgcacctgagcggacctagccacagccagcactacagacacacccct

SEQ ID NO: 7697 - DNA, 2706 bp, Artificial Sequence
  Synthetic Polynucloetide
atggccttaccagtgaccgccttgctcctgccgctggccttgctgctccacgccgccaggccgctcgaggggaaaccaattcccaaccctcttctgggactggattcaaccggcagcggcgaggacctgaagaacgtgttcccacctgaggtggccgtgttcgagcctagcaaggccgagatcgcccacacccagaaagccaccctcgtgtgcctggctaccggcttctaccccgaccatgtggaactgtcttggtgggtcaacggcaaagaggtgcacagcggcgtgtgtaccgacccccagccactgaaagaacagcccgccctgaacgacagccggtactgcctgagcagcagactgagagtgtccgccaccttctggcagaacccccggaaccacttcagatgccaggtgcagttctacggcctgagcgagaacgacgagtggacccaggacagagccaagcccgtgacccagatcgtgtctgccgaagcctggggcagagccgattgcggcatcaccagcgccagctaccaccagggcgtgctgagcgccaccatcctgtacgagatcctgctgggcaaggccaccctgtacgccgtgctggtgtctgccctggtgctgatggctatggtcaagcggaaggacagccggggaagggccaagcgatctggatctggagcaacaaacttctcactactcaaacaagcaggtgacgtggaggagaatcccgggcctactagcatggccttaccagtgaccgccttgctcctgccgctggccttgctgctccacgccgccaggccgagctacgtgctgacacagcctccatccgtgtctgtggctccaggacagaccgccagaatcacatgcggcggcaacaacatcggcagcaagagcgtgcactggtatcagcagccacctggacaggctccagtggtggtggtgtacgacgacagcgatagacctagcggcatccccgagagattcagcggcagcaattccggcaataccgccacactgaccatcagcagagtggaagctggcgacgaggccgtgtactactgccaagtgtgggacagcagcagcgatcacgtggtgtttggcggcggaacaaagctgacagtgcttggcggaggcggaagtggaggcggaggatctggcggcggaggctctcaactccagctgcaagagtctggccctggcctggtcaagcctagcgaaacactgagcctgacctgtaccgtgtctggcggctctatcagctccggcagctatttctggggctggatcagacaacctcctggcaaaggactggaatggatcggctccatctactacagcggcatcagctactacaaccccagcctgaagtccagagtgaccatctccgtggacaccagcaagaaccagttctccctgaagctgagcagcgtgacagccgccgataccgccgtgtattattgtgccagacatgacggcgctgtggccggcctgtttgattattggggacagggcaccctggtcaccgtgtcatctgctacgcgtgagcagaaactgatctcggaagaggatgggagcggcatccagaaccctgatcctgccgtgtaccagctgcgggatagcaagagcagcgacaagagcgtgtgtctgttcaccgacttcgacagccagaccaacgtgtcccagagcaaggactccgacgtgtacatcaccgataagtgcgtgctggacatgcggagcatggacttcaagagcaactccgccgtggcctggtccaacaagtccgatttcgcctgcgccaacgccttcaacaacagcattatccccgaggacacattcttcccaagcagcgacgtgccctgcgacgtgaagctggtggaaaagagcttcgagacagacaccaacctgaacttccagaacctgagcgtgatcggcttcagaatcctgctgctgaaagtggccggctttaacctgctgatgaccctgcggctgtggtccagccgcgccaagagaagcggatctggcgtgaagcagaccctgaatttcgacctgctgaagctggctggcgacgtggaatccaacccaggcccttctagaggccatatgaccgagtacaagcccacggtgcgcctcgccacccgcgacgacgtccccagggccgtacgcaccctcgccgccgcgttcgccgactaccccgccacgcgccacaccgtcgatccggaccgccacatcgagcgggtcaccgagctgcaagaactcttcctcacgcgcgtcgggctcgacatcggcaaggtgtgggtcgcggacgacggcgccgcggtggcggtctggaccacgccggagagcgtcgaagcgggggcggtgttcgccgagatcggcccgcgcatggccgagttgagcggttcccggctggccgcgcagcaacagatggaaggcctcctggcgccgcaccggcccaaggagcccgcgtggttcctggccaccgtcggcgtctcgcccgaccaccagggcaagggtctgggcagcgccgtcgtgctccccggagtggaggcggccgagcgcgccggggtgcccgccttcctggagacctccgcgccccgcaacctccccttctacgagcggctcggcttcaccgtcaccgccgacgtcgaggtgcccgaaggaccgcgcacctggtgcatgacccgcaagcccggtgcctga

SEQ ID NO: 7698 - DNA, 2709 bp, Artificial Sequence
  Synthetic Polynucloetide
atggccttaccagtgaccgccttgctcctgccgctggccttgctgctccacgccgccaggccgctcgagcagaaactgatctcggaagaggatctgggctccggcgatcgccctgatcctgccgtgtaccagctgcgggatagcaagagcagcgacaagagcgtgtgtctgttcaccgacttcgacagccagaccaacgtgtcccagagcaaggactccgacgtgtacatcaccgataagtgcgtgctggacatgcggagcatggacttcaagagcaactccgccgtggcctggtccaacaagtccgatttcgcctgcgccaacgccttcaacaacagcattatccccgaggacacattcttcccaagccccgagagcagctgcgacgtgaagctggtggaaaagagcttcgagacagacaccaacctgaacttccagaacctgagcgtgatcggcttcagaatcctgctgctgaaagtggccggctttaacctgctgatgaccctgcggctgtggtccagctctagtcgcgccaagagaagcggatctggcgtgaagcagaccctgaatttcgacctgctgaagctggctggcgacgtggaatccaacccaggccccactagcatggccttaccagtgaccgccttgctcctgccgctggccttgctgctccacgccgccaggccgagctacgtgctgacacagcctccatccgtgtctgtggctccaggacagaccgccagaatcacatgcggcggcaacaacatcggcagcaagagcgtgcactggtatcagcagccacctggacaggctccagtggtggtggtgtacgacgacagcgatagacctagcggcatccccgagagattcagcggcagcaattccggcaataccgccacactgaccatcagcagagtggaagctggcgacgaggccgtgtactactgccaagtgtgggacagcagcagcgatcacgtggtgtttggcggcggaacaaagctgacagtgcttggcggaggcggaagtggaggcggaggatctggcggcggaggctctcaactccagctgcaagagtctggccctggcctggtcaagcctagcgaaacactgagcctgacctgtaccgtgtctggcggctctatcagctccggcagctatttctggggctggatcagacaacctcctggcaaaggactggaatggatcggctccatctactacagcggcatcagctactacaaccccagcctgaagtccagagtgaccatctccgtggacaccagcaagaaccagttctccctgaagctgagcagcgtgacagccgccgataccgccgtgtattattgtgccagacatgacggcgctgtggccggcctgtttgattattggggacagggcaccctggtcaccgtgtcatctgctacgcgtgggaaaccaattcccaaccctcttctgggactggattcaaccggcagcggcgaggacctgaagaacgtgttcccacctgaggtggccgtgttcgagcctagcgaggccgagatcagccacacccagaaagccaccctcgtgtgcctggctaccggcttctaccccgaccatgtggaactgtcttggtgggtcaacggcaaagaggtgcacagcggcgtgtgtaccgacccccagccactgaaagaacagcccgccctgaacgacagccggtactgcctgagcagcagactgagagtgtccgccaccttctggcagaacccccggaaccacttcagatgccaggtgcagttctacggcctgagcgagaacgacgagtggacccaggacagagccaagcccgtgacccagatcgtgtctgccgaagcctggggcagagccgattgcggctttaccagcgagagctaccagcagggcgtgctgagcgccaccatcctgtacgagatcctgctgggcaaggccaccctgtacgccgtgctggtgtctgccctggtgctgatggctatggtcaagcggaaggacagccggggaagggccaagcgatctggatctggagcaacaaacttctcactactcaaacaagcaggtgacgtggaggagaatcccgggccttctagaggccatatgaccgagtacaagcccacggtgcgcctcgccacccgcgacgacgtccccagggccgtacgcaccctcgccgccgcgttcgccgactaccccgccacgcgccacaccgtcgatccggaccgccacatcgagcgggtcaccgagctgcaagaactcttcctcacgcgcgtcgggctcgacatcggcaaggtgtgggtcgcggacgacggcgccgcggtggcggtctggaccacgccggagagcgtcgaagcgggggcggtgttcgccgagatcggcccgcgcatggccgagttgagcggttcccggctggccgcgcagcaacagatggaaggcctcctggcgccgcaccggcccaaggagcccgcgtggttcctggccaccgtcggcgtctcgcccgaccaccagggcaagggtctgggcagcgccgtcgtgctccccggagtggaggcggccgagcgcgccggggtgcccgccttcctggagacctccgcgccccgcaacctccccttctacgagcggctcggcttcaccgtcaccgccgacgtcgaggtgcccgaaggaccgcgcacctggtgcatgacccgcaagcccggtgcctga

SEQ ID NO: 7699 - DNA, 2571 bp, Artificial Sequence
  Synthetic Polynucloetide
atggccttaccagtgaccgccttgctcctgccgctggccttgctgctccacgccgccaggccgagctacgtgctgacacagcctccatccgtgtctgtggctccaggacagaccgccagaatcacatgcggcggcaacaacatcggcagcaagagcgtgcactggtatcagcagccacctggacaggctccagtggtggtggtgtacgacgacagcgatagacctagcggcatccccgagagattcagcggcagcaattccggcaataccgccacactgaccatcagcagagtggaagctggcgacgaggccgtgtactactgccaagtgtgggacagcagcagcgatcacgtggtgtttggcggcggaacaaagctgacagtgcttctcgaggacctgaagaacgtgttcccacctgaggtggccgtgttcgagcctagcgaggccgagatcagccacacccagaaagccaccctcgtgtgcctggctaccggcttctaccccgaccatgtggaactgtcttggtgggtcaacggcaaagaggtgcacagcggcgtgtctaccgacccccagccactgaaagaacagcccgccctgaacgacagccggtactgcctgagcagcagactgagagtgtccgccaccttctggcagaacccccggaaccacttcagatgccaggtgcagttctacggcctgagcgagaacgacgagtggacccaggacagagccaagcccgtgacccagatcgtgtctgccgaagcctggggcagagccgattgcggctttaccagcgagagctaccagcagggcgtgctgagcgccaccatcctgtacgagatcctgctgggcaaggccaccctgtacgccgtgctggtgtctgccctggtgctgatggctatggtcaagcggaaggacagccggggaagggccaagcgatctggatctggagcaacaaacttctcactactcaaacaagcaggtgacgtggaggagaatcccgggcctactagtatggactggatttggcgcatccttttccttgtcggcgctgctaccggcgcgcattccttcgaacaactccagctgcaagagtctggccctggcctggtcaagcctagcgaaacactgagcctgacctgtaccgtgtctggcggctctatcagctccggcagctatttctggggctggatcagacaacctcctggcaaaggactggaatggatcggctccatctactacagcggcatcagctactacaaccccagcctgaagtccagagtgaccatctccgtggacaccagcaagaaccagttctccctgaagctgagcagcgtgacagccgccgataccgccgtgtattattgtgccagacatgacggcgctgtggccggcctgtttgattattggggacagggcaccctggtcaccgtgtcatctgctacgcgtatccagaaccctgatcctgccgtgtaccagctgcgggatagcaagagcagcgacaagagcgtgtgtctgttcaccgacttcgacagccagaccaacgtgtcccagagcaaggactccgacgtgtacatcaccgataagaccgtgctggacatgcggagcatggacttcaagagcaactccgccgtggcctggtccaacaagtccgatttcgcctgcgccaacgccttcaacaacagcattatccccgaggacacattcttcccaagccccgagagcagctgcgacgtgaagctggtggaaaagagcttcgagacagacaccaacctgaacttccagaacctgagcgtgatcggcttcagaatcctgctgctgaaagtggccggctttaacctgctgatgaccctgcggctgtggtccagccgcgccaagagaagcggatctggcgtgaagcagaccctgaatttcgacctgctgaagctggctggcgacgtggaatccaacccaggcccttctagaggccatatgaccgagtacaagcccacggtgcgcctcgccacccgcgacgacgtccccagggccgtacgcaccctcgccgccgcgttcgccgactaccccgccacgcgccacaccgtcgatccggaccgccacatcgagcgggtcaccgagctgcaagaactcttcctcacgcgcgtcgggctcgacatcggcaaggtgtgggtcgcggacgacggcgccgcggtggcggtctggaccacgccggagagcgtcgaagcgggggcggtgttcgccgagatcggcccgcgcatggccgagttgagcggttcccggctggccgcgcagcaacagatggaaggcctcctggcgccgcaccggcccaaggagcccgcgtggttcctggccaccgtcggcgtctcgcccgaccaccagggcaagggtctgggcagcgccgtcgtgctccccggagtggaggcggccgagcgcgccggggtgcccgccttcctggagacctccgcgccccgcaacctccccttctacgagcggctcggcttcaccgtcaccgccgacgtcgaggtgcccgaaggaccgcgcacctggtgcatgacccgcaagcccggtgcctga

SEQ ID NO: 7700 - DNA, 2817 bp, Artificial Sequence
  Synthetic Polynucloetide
atggccttaccagtgaccgccttgctcctgccgctggccttgctgctccacgccgccaggccgagctacgtgctgacacagcctccatccgtgtctgtggctccaggacagaccgccagaatcacatgcggcggcaacaacatcggcagcaagagcgtgcactggtatcagcagccacctggacaggctccagtggtggtggtgtacgacgacagcgatagacctagcggcatccccgagagattcagcggcagcaattccggcaataccgccacactgaccatcagcagagtggaagctggcgacgaggccgtgtactactgccaagtgtgggacagcagcagcgatcacgtggtgtttggcggcggaacaaagctgacagtgcttctcgaggacctgaagaacgtgttcccacctgaggtggccgtgttcgagcctagcgaggccgagatcagccacacccagaaagccaccctcgtgtgcctggctaccggcttctaccccgaccatgtggaactgtcttggtgggtcaacggcaaagaggtgcacagcggcgtgtctaccgacccccagccactgaaagaacagcccgccctgaacgacagccggtactgcctgagcagcagactgagagtgtccgccaccttctggcagaacccccggaaccacttcagatgccaggtgcagttctacggcctgagcgagaacgacgagtggacccaggacagagccaagcccgtgacccagatcgtgtctgccgaagcctggggcagagccgattgcggctttaccagcgagagctaccagcagggcgtgctgagcgccaccatcctgtacgagatcctgctgggcaaggccaccctgtacgccgtgctggtgtctgccctggtgctgatggctatggtcaagcggaaggacagccggggaagggccaagcgatctggatctggagcaacaaacttctcactactcaaacaagcaggtgacgtggaggagaatcccgggcctactagtatggactggatttggcgcatccttttccttgtcggcgctgctaccggcgcgcattccttcgaacaactccagctgcaagagtctggccctggcctggtcaagcctagcgaaacactgagcctgacctgtaccgtgtctggcggctctatcagctccggcagctatttctggggctggatcagacaacctcctggcaaaggactggaatggatcggctccatctactacagcggcatcagctactacaaccccagcctgaagtccagagtgaccatctccgtggacaccagcaagaaccagttctccctgaagctgagcagcgtgacagccgccgataccgccgtgtattattgtgccagacatgacggcgctgtggccggcctgtttgattattggggacagggcaccctggtcaccgtgtcatctgctacgcgtgagcagaaactgatctcggaagaggatgggagcggcaccccattcccttctctggcccctcccatcatgctgctggtggacggcaagcagcagatggtggtcgtgtgcctggtgctggatgtggccccacctggactggacagccccatctggtttagcgccggcaatggctctgccctggacgcctttacctacggcccaagccctgccaccgatggcacctggacaaatctggcccacctgagcctgcccagcgaggaactggcttcttgggagcctctcgtgtgccacacaggacctggcgctgagggacacagcagatccacccagcctatgcacctgtctggcgaggccagcaccgccagaacctgtcctcaggaacctctgagaggcacccctggcggagcactgtggctgggagtgctgagactgctgctgttcaagctgctgctgtttgacctgctgctgacctgctcctgtctgtgcgatcctgccggccctctgccttctcctgccaccaccacaagactgagagccctgggcagccacagactgcaccctgccacagagacaggcggcagagaggccacaagcagccctagaccccagcccagagacagaagatggggcgataccccccctggcagaaagcctggatctccagtccgcgccaagagaagcggatctggcgtgaagcagaccctgaatttcgacctgctgaagctggctggcgacgtggaatccaacccaggcccttctagaggccatatgaccgagtacaagcccacggtgcgcctcgccacccgcgacgacgtccccagggccgtacgcaccctcgccgccgcgttcgccgactaccccgccacgcgccacaccgtcgatccggaccgccacatcgagcgggtcaccgagctgcaagaactcttcctcacgcgcgtcgggctcgacatcggcaaggtgtgggtcgcggacgacggcgccgcggtggcggtctggaccacgccggagagcgtcgaagcgggggcggtgttcgccgagatcggcccgcgcatggccgagttgagcggttcccggctggccgcgcagcaacagatggaaggcctcctggcgccgcaccggcccaaggagcccgcgtggttcctggccaccgtcggcgtctcgcccgaccaccagggcaagggtctgggcagcgccgtcgtgctccccggagtggaggcggccgagcgcgccggggtgcccgccttcctggagacctccgcgccccgcaacctccccttctacgagcggctcggcttcaccgtcaccgccgacgtcgaggtgcccgaaggaccgcgcacctggtgcatgacccgcaagcccggtgcctga

SEQ ID NO: 7701 - DNA, 2871 bp, Artificial Sequence
  Synthetic Polynucloetide
atggccttaccagtgaccgccttgctcctgccgctggccttgctgctccacgccgccaggccgctcgaggacctgaagaacgtgttcccacctgaggtggccgtgttcgagcctagcgaggccgagatcagccacacccagaaagccaccctcgtgtgcctggctaccggcttctaccccgaccatgtggaactgtcttggtgggtcaacggcaaagaggtgcacagcggcgtgtctaccgacccccagccactgaaagaacagcccgccctgaacgacagccggtactgcctgagcagcagactgagagtgtccgccaccttctggcagaacccccggaaccacttcagatgccaggtgcagttctacggcctgagcgagaacgacgagtggacccaggacagagccaagcccgtgacccagatcgtgtctgccgaagcctggggcagagccgattgcggctttaccagcgagagctaccagcagggcgtgctgagcgccaccatcctgtacgagatcctgctgggcaaggccaccctgtacgccgtgctggtgtctgccctggtgctgatggctatggtcaagcggaaggacagccggggaagggccaagcgatctggatctggagcaacaaacttctcactactcaaacaagcaggtgacgtggaggagaatcccgggcctactagcatggccttaccagtgaccgccttgctcctgccgctggccttgctgctccacgccgccaggccgagctacgtgctgacacagcctccatccgtgtctgtggctccaggacagaccgccagaatcacatgcggcggcaacaacatcggcagcaagagcgtgcactggtatcagcagccacctggacaggctccagtggtggtggtgtacgacgacagcgatagacctagcggcatccccgagagattcagcggcagcaattccggcaataccgccacactgaccatcagcagagtggaagctggcgacgaggccgtgtactactgccaagtgtgggacagcagcagcgatcacgtggtgtttggcggcggaacaaagctgacagtgcttggcggaggcggaagtggaggcggaggatctggcggcggaggctctcaactccagctgcaagagtctggccctggcctggtcaagcctagcgaaacactgagcctgacctgtaccgtgtctggcggctctatcagctccggcagctatttctggggctggatcagacaacctcctggcaaaggactggaatggatcggctccatctactacagcggcatcagctactacaaccccagcctgaagtccagagtgaccatctccgtggacaccagcaagaaccagttctccctgaagctgagcagcgtgacagccgccgataccgccgtgtattattgtgccagacatgacggcgctgtggccggcctgtttgattattggggacagggcaccctggtcaccgtgtcatctgctacgcgtgagcagaaactgatctcggaagaggatctggggagcggcaccccattcccttctctggcccctcccatcatgctgctggtggacggcaagcagcagatggtggtcgtgtgcctggtgctggatgtggccccacctggactggacagccccatctggtttagcgccggcaatggctctgccctggacgcctttacctacggcccaagccctgccaccgatggcacctggacaaatctggcccacctgagcctgcccagcgaggaactggcttcttgggagcctctcgtgtgccacacaggacctggcgctgagggacacagcagatccacccagcctatgcacctgtctggcgaggccagcaccgccagaacctgtcctcaggaacctctgagaggcacccctggcggagcactgtggctgggagtgctgagactgctgctgttcaagctgctgctgtttgacctgctgctgacctgctcctgtctgtgcgatcctgccggccctctgccttctcctgccaccaccacaagactgagagccctgggcagccacagactgcaccctgccacagagacaggcggcagagaggccacaagcagccctagaccccagcccagagacagaagatggggcgataccccccctggcagaaagcctggatctccagtccgcgccaagagaagcggatctggcgtgaagcagaccctgaatttcgacctgctgaagctggctggcgacgtggaatccaacccaggcccttctagatctagaggccatatgaccgagtacaagcccacggtgcgcctcgccacccgcgacgacgtccccagggccgtacgcaccctcgccgccgcgttcgccgactaccccgccacgcgccacaccgtcgatccggaccgccacatcgagcgggtcaccgagctgcaagaactcttcctcacgcgcgtcgggctcgacatcggcaaggtgtgggtcgcggacgacggcgccgcggtggcggtctggaccacgccggagagcgtcgaagcgggggcggtgttcgccgagatcggcccgcgcatggccgagttgagcggttcccggctggccgcgcagcaacagatggaaggcctcctggcgccgcaccggcccaaggagcccgcgtggttcctggccaccgtcggcgtctcgcccgaccaccagggcaagggtctgggcagcgccgtcgtgctccccggagtggaggcggccgagcgcgccggggtgcccgccttcctggagacctccgcgccccgcaacctccccttctacgagcggctcggcttcaccgtcaccgccgacgtcgaggtgcccgaaggaccgcgcacctggtgcatgacccgcaagcccggtgcctga

SEQ ID NO: 7702 - DNA, 2682 bp, Artificial Sequence
  Synthetic Polynucloetide
atggccttaccagtgaccgccttgctcctgccgctggccttgctgctccacgccgccaggccgagctacgtgctgacacagcctccatccgtgtctgtggctccaggacagaccgccagaatcacatgcggcggcaacaacatcggcagcaagagcgtgcactggtatcagcagccacctggacaggctccagtggtggtggtgtacgacgacagcgatagacctagcggcatccccgagagattcagcggcagcaattccggcaataccgccacactgaccatcagcagagtggaagctggcgacgaggccgtgtactactgccaagtgtgggacagcagcagcgatcacgtggtgtttggcggcggaacaaagctgacagtgcttctcgaggggaaaccaattcccaaccctcttctgggactggattcaaccggcagcggcgacaagcagctggacgccgacgtgtcccccaagcctaccatcttcctgccctctatcgccgagacaaagctccagaaggccggcacctacctgtgcctgctggaaaagttcttcccagatgtgattaagatccactggcaggaaaagaagtccaacaccatcctgggcagccaggaaggcaacaccatgaagaccaacgacacctacatgaagttcagctggctgaccgtgcccgagaagtccctggacaaagaacacagatgcatcgtgcggcacgaaaacaacaagaacggcgtggaccaggaaatcatcttcccacccatcaagaccgatgtgattacaatggaccccaaggacaactgctccaaggacgccaacgataccctgctgctccagctgaccaacaccagcgcctactacatgtacttgttgctgctgctgaagtccgtggtgtacttcgccatcatcacatgctgcctgctgcggagaaccgccttctgctgcaacggcgagaagtctagggccaagcgatctggatctggagcaacaaacttctcactactcaaacaagcaggtgacgtggaggagaatcccgggcctactagtatggactggatttggcgcatccttttccttgtcggcgctgctaccggcgcgcattccttcgaacaactccagctgcaagagtctggccctggcctggtcaagcctagcgaaacactgagcctgacctgtaccgtgtctggcggctctatcagctccggcagctatttctggggctggatcagacaacctcctggcaaaggactggaatggatcggctccatctactacagcggcatcagctactacaaccccagcctgaagtccagagtgaccatctccgtggacaccagcaagaaccagttctccctgaagctgagcagcgtgacagccgccgataccgccgtgtattattgtgccagacatgacggcgctgtggccggcctgtttgattattggggacagggcaccctggtcaccgtgtcatctgctacgcgtgagcagaaactgatctcggaagaggatgggagcggcagccagcctcacaccaagcccagcgtgttcgtgatgaagaacggcaccaacgtggcctgcctcgtgaaagagttctaccccaaggacatcaggatcaacctggtgtccagcaagaagatcaccgagttcgaccccgccatcgtgatctcccccagcggcaagtacaacgccgtgaagctggggaagtacgaggacagcaacagcgtgacctgctccgtgcagcacgacaacaagaccgtgcacagcaccgactttgaagtgaaaaccgactccaccgaccacgtgaagcccaaagagacagagaacaccaagcagcccagcaagagctgccacaagcccaaggccatcgtgcacaccgagaaagtgaacatgatgagcctgaccgtgctgggcctgcggatgctgttcgccaaaaccgtggccgtgaacttcctgctgaccgccaagctgttcttcctccgcgccaagagaagcggatctggcgtgaagcagaccctgaatttcgacctgctgaagctggctggcgacgtggaatccaacccaggcccttctagaggccatatgaccgagtacaagcccacggtgcgcctcgccacccgcgacgacgtccccagggccgtacgcaccctcgccgccgcgttcgccgactaccccgccacgcgccacaccgtcgatccggaccgccacatcgagcgggtcaccgagctgcaagaactcttcctcacgcgcgtcgggctcgacatcggcaaggtgtgggtcgcggacgacggcgccgcggtggcggtctggaccacgccggagagcgtcgaagcgggggcggtgttcgccgagatcggcccgcgcatggccgagttgagcggttcccggctggccgcgcagcaacagatggaaggcctcctggcgccgcaccggcccaaggagcccgcgtggttcctggccaccgtcggcgtctcgcccgaccaccagggcaagggtctgggcagcgccgtcgtgctccccggagtggaggcggccgagcgcgccggggtgcccgccttcctggagacctccgcgccccgcaacctccccttctacgagcggctcggcttcaccgtcaccgccgacgtcgaggtgcccgaaggaccgcgcacctggtgcatgacccgcaagcccggtgcctga

SEQ ID NO: 7703 - DNA, 1893 bp, Artificial Sequence
  Synthetic Polynucloetide
atggccttaccagtgaccgccttgctcctgccgctggccttgctgctccacgccgccaggccgagctacgtgctgacacagcctccatccgtgtctgtggctccaggacagaccgccagaatcacatgcggcggcaacaacatcggcagcaagagcgtgcactggtatcagcagccacctggacaggctccagtggtggtggtgtacgacgacagcgatagacctagcggcatccccgagagattcagcggcagcaattccggcaataccgccacactgaccatcagcagagtggaagctggcgacgaggccgtgtactactgccaagtgtgggacagcagcagcgatcacgtggtgtttggcggcggaacaaagctgacagtgcttctcgagagccagcctcacaccaagcccagcgtgttcgtgatgaagaacggcaccaacgtggcctgcctcgtgaaagagttctaccccaaggacatcaggatcaacctggtgtccagcaagaagatcaccgagttcgaccccgccatcgtgatctcccccagcggcaagtacaacgccgtgaagctggggaagtacgaggacagcaacagcgtgacctgctccgtgcagcacgacaacaagaccgtgcacagcaccgactttgaagtgaaaaccgactccaccgaccacgtgaagcccaaagagacagagaacaccaagcagcccagcaagagctgccacaagcccaaggccatcgtgcacaccgagaaagtgaacatgatgagcctgaccgtgctgggcctgcggatgctgttcgccaaaaccgtggccgtgaacttcctgctgaccgccaagctgttcttcctcagggccaagcgatctggatctggagcaacaaacttctcactactcaaacaagcaggtgacgtggaggagaatcccgggcctactagtatggactggatttggcgcatccttttccttgtcggcgctgctaccggcgcgcattccttcgaacaactccagctgcaagagtctggccctggcctggtcaagcctagcgaaacactgagcctgacctgtaccgtgtctggcggctctatcagctccggcagctatttctggggctggatcagacaacctcctggcaaaggactggaatggatcggctccatctactacagcggcatcagctactacaaccccagcctgaagtccagagtgaccatctccgtggacaccagcaagaaccagttctccctgaagctgagcagcgtgacagccgccgataccgccgtgtattattgtgccagacatgacggcgctgtggccggcctgtttgattattggggacagggcaccctggtcaccgtgtcatctgctacgcgtgacaagcagctggacgccgacgtgtcccccaagcctaccatcttcctgccctctatcgccgagacaaagctccagaaggccggcacctacctgtgcctgctggaaaagttcttcccagatgtgattaagatccactggcaggaaaagaagtccaacaccatcctgggcagccaggaaggcaacaccatgaagaccaacgacacctacatgaagttcagctggctgaccgtgcccgagaagtccctggacaaagaacacagatgcatcgtgcggcacgaaaacaacaagaacggcgtggaccaggaaatcatcttcccacccatcaagaccgatgtgattacaatggaccccaaggacaactgctccaaggacgccaacgataccctgctgctccagctgaccaacaccagcgcctactacatgtacttgttgctgctgctgaagtccgtggtgtacttcgccatcatcacatgctgcctgctgcggagaaccgccttctgctgcaacggcgagaagtct

SEQ ID NO: 7704 - DNA, 2727 bp, Artificial Sequence
  Synthetic Polynucloetide
atggccttaccagtgaccgccttgctcctgccgctggccttgctgctccacgccgccaggccgctcgaggggaaaccaattcccaaccctcttctgggactggattcaaccggcagcggcgacaagcagctggacgccgacgtgtcccccaagcctaccatcttcctgccctctatcgccgagacaaagctccagaaggccggcacctacctgtgcctgctggaaaagttcttcccagatgtgattaagatccactggcaggaaaagaagtccaacaccatcctgggcagccaggaaggcaacaccatgaagaccaacgacacctacatgaagttcagctggctgaccgtgcccgagaagtccctggacaaagaacacagatgcatcgtgcggcacgaaaacaacaagaacggcgtggaccaggaaatcatcttcccacccatcaagaccgatgtgattacaatggaccccaaggacaactgctccaaggacgccaacgataccctgctgctccagctgaccaacaccagcgcctactacatgtacttgttgctgctgctgaagtccgtggtgtacttcgccatcatcacatgctgcctgctgcggagaaccgccttctgctgcaacggcgagaagtctagggccaagcgatctggatctggagcaacaaacttctcactactcaaacaagcaggtgacgtggaggagaatcccgggcctactagcatggccttaccagtgaccgccttgctcctgccgctggccttgctgctccacgccgccaggccgagctacgtgctgacacagcctccatccgtgtctgtggctccaggacagaccgccagaatcacatgcggcggcaacaacatcggcagcaagagcgtgcactggtatcagcagccacctggacaggctccagtggtggtggtgtacgacgacagcgatagacctagcggcatccccgagagattcagcggcagcaattccggcaataccgccacactgaccatcagcagagtggaagctggcgacgaggccgtgtactactgccaagtgtgggacagcagcagcgatcacgtggtgtttggcggcggaacaaagctgacagtgcttggcggaggcggaagtggaggcggaggatctggcggcggaggctctcaactccagctgcaagagtctggccctggcctggtcaagcctagcgaaacactgagcctgacctgtaccgtgtctggcggctctatcagctccggcagctatttctggggctggatcagacaacctcctggcaaaggactggaatggatcggctccatctactacagcggcatcagctactacaaccccagcctgaagtccagagtgaccatctccgtggacaccagcaagaaccagttctccctgaagctgagcagcgtgacagccgccgataccgccgtgtattattgtgccagacatgacggcgctgtggccggcctgtttgattattggggacagggcaccctggtcaccgtgtcatctgctacgcgtgagcagaaactgatctcggaagaggatgggagcggcagccagcctcacaccaagcccagcgtgttcgtgatgaagaacggcaccaacgtggcctgcctcgtgaaagagttctaccccaaggacatcaggatcaacctggtgtccagcaagaagatcaccgagttcgaccccgccatcgtgatctcccccagcggcaagtacaacgccgtgaagctggggaagtacgaggacagcaacagcgtgacctgctccgtgcagcacgacaacaagaccgtgcacagcaccgactttgaagtgaaaaccgactccaccgaccacgtgaagcccaaagagacagagaacaccaagcagcccagcaagagctgccacaagcccaaggccatcgtgcacaccgagaaagtgaacatgatgagcctgaccgtgctgggcctgcggatgctgttcgccaaaaccgtggccgtgaacttcctgctgaccgccaagctgttcttcctccgcgccaagagaagcggatctggcgtgaagcagaccctgaatttcgacctgctgaagctggctggcgacgtggaatccaacccaggcccttctagaggccatatgaccgagtacaagcccacggtgcgcctcgccacccgcgacgacgtccccagggccgtacgcaccctcgccgccgcgttcgccgactaccccgccacgcgccacaccgtcgatccggaccgccacatcgagcgggtcaccgagctgcaagaactcttcctcacgcgcgtcgggctcgacatcggcaaggtgtgggtcgcggacgacggcgccgcggtggcggtctggaccacgccggagagcgtcgaagcgggggcggtgttcgccgagatcggcccgcgcatggccgagttgagcggttcccggctggccgcgcagcaacagatggaaggcctcctggcgccgcaccggcccaaggagcccgcgtggttcctggccaccgtcggcgtctcgcccgaccaccagggcaagggtctgggcagcgccgtcgtgctccccggagtggaggcggccgagcgcgccggggtgcccgccttcctggagacctccgcgccccgcaacctccccttctacgagcggctcggcttcaccgtcaccgccgacgtcgaggtgcccgaaggaccgcgcacctggtgcatgacccgcaagcccggtgcctga

SEQ ID NO: 7705 - DNA, 3102 bp, Artificial Sequence
  Synthetic Polynucloetide
atggccttaccagtgaccgccttgctcctgccgctggccttgctgctccacgccgccaggccgagctacgtgctgacacagcctccatccgtgtctgtggctccaggacagaccgccagaatcacatgcggcggcaacaacatcggcagcaagagcgtgcactggtatcagcagccacctggacaggctccagtggtggtggtgtacgacgacagcgatagacctagcggcatccccgagagattcagcggcagcaattccggcaataccgccacactgaccatcagcagagtggaagctggcgacgaggccgtgtactactgccaagtgtgggacagcagcagcgatcacgtggtgtttggcggcggaacaaagctgacagtgcttggacagcctaaggccaatcctaccgtgacactgttccctccaagcagcgaagaactccaggccaacaaggccacacttgtgtgcctgatctccgacttctaccctggggctgtgacagtggcttggaaggccgatggatctcctgtgaaagccggcgtggaaaccaccaagccatccaagcagagcaacaacaaatacgccgccagctcctacctgagcctgacacctgagcagtggaagtcccacagatcctacagctgccaagtgacccacgaaggcagcaccgtggaaaagacagtggcccctacagagtgcagcggatcccagagcttcggcctgctggaccccaagctgtgctacctgctggatggcatcctgttcatctacggcgtgatcctgaccgccctgttcctgagagtgaagttcagcagaagcgccgacgcccctgcctaccagcagggacagaaccaactgtacaacgagctgaacctgggcagacgggaagagtacgacgtgctggacaagcggagaggcagggaccctgagatgggcggaaagccccagcggagaaagaacccccaggaaggactgtataacgaactccagaaagacaagatggccgaagcctacagcgagatcggcatgaagggcgagcggagaagaggcaagggccacgatggcctgtaccagggcctgagcaccgccaccaaggacacctatgacgccctgcacatgcaggccctgcctccaagaagggccaagcgatctggatctggagcaacaaacttctcactactcaaacaagcaggtgacgtggaggagaatcccgggcctactagtatggactggatttggcgcatccttttccttgtcggcgctgctaccggcgcgcattccttcgaacaactccagctgcaagagtctggccctggcctggtcaagcctagcgaaacactgagcctgacctgtaccgtgtctggcggctctatcagctccggcagctatttctggggctggatcagacaacctcctggcaaaggactggaatggatcggctccatctactacagcggcatcagctactacaaccccagcctgaagtccagagtgaccatctccgtggacaccagcaagaaccagttctccctgaagctgagcagcgtgacagccgccgataccgccgtgtattattgtgccagacatgacggcgctgtggccggcctgtttgattattggggacagggcaccctggtcaccgtgtcatctgctgcctctacaaagggaccctccgtgtttcctctggctcccagcagcaagtctacaagcggaggaacagccgctctgggctgcctggtcaaggattactttcccgagcctgtgaccgtgtcctggaatagcggagcactgacaagcggcgtgcacacctttccagccgtgctgcaaagcagcggcctgtactctctgagcagcgtggtcacagtgcctagctctagcctgggcacccagacctacatctgcaatgtgaaccacaagcctagcaacaccaaggtggacaagagagtggaacccaagagctgtggtacccagagttttgggttgttggaccctaaattgtgctatctgttggacggaatcctgttcatttacggagtgatcctgaccgcattgttcctgcgggttaagttttccagatccgcagacgcacccgcttaccaacaagggcagaaccaactctacaatgaacttaatttggggcggagggaagagtacgacgttctggacaaaaggaggggacgagatcccgagatgggcggaaagcctcagcgaaggaagaatccgcaagaggggctttataacgaactccagaaagataaaatggcagaagcctatagtgagattgggatgaagggagaaaggaggaggggtaaaggtcacgatgggttgtaccaaggattgagcacagccactaaagatacctatgatgcgctccacatgcaggccctgccgccaagacgcgccaagagaagcggatctggcgtgaagcagaccctgaatttcgacctgctgaagctggctggcgacgtggaatccaacccaggcccttctagaggccatatgaccgagtacaagcccacggtgcgcctcgccacccgcgacgacgtccccagggccgtacgcaccctcgccgccgcgttcgccgactaccccgccacgcgccacaccgtcgatccggaccgccacatcgagcgggtcaccgagctgcaagaactcttcctcacgcgcgtcgggctcgacatcggcaaggtgtgggtcgcggacgacggcgccgcggtggcggtctggaccacgccggagagcgtcgaagcgggggcggtgttcgccgagatcggcccgcgcatggccgagttgagcggttcccggctggccgcgcagcaacagatggaaggcctcctggcgccgcaccggcccaaggagcccgcgtggttcctggccaccgtcggcgtctcgcccgaccaccagggcaagggtctgggcagcgccgtcgtgctccccggagtggaggcggccgagcgcgccggggtgcccgccttcctggagacctccgcgccccgcaacctccccttctacgagcggctcggcttcaccgtcaccgccgacgtcgaggtgcccgaaggaccgcgcacctggtgcatgacccgcaagcccggtgcctga

SEQ ID NO: 7706 - DNA, 2457 bp, Artificial Sequence
  Synthetic Polynucloetide
atggccttaccagtgaccgccttgctcctgccgctggccttgctgctccacgccgccaggccgagctacgtgctgacacagcctccatccgtgtctgtggctccaggacagaccgccagaatcacatgcggcggcaacaacatcggcagcaagagcgtgcactggtatcagcagccacctggacaggctccagtggtggtggtgtacgacgacagcgatagacctagcggcatccccgagagattcagcggcagcaattccggcaataccgccacactgaccatcagcagagtggaagctggcgacgaggccgtgtactactgccaagtgtgggacagcagcagcgatcacgtggtgtttggcggcggaacaaagctgacagtgcttctcgaggacctgaagaacgtgttcccacctgaggtggccgtgttcgagcctagcgaggccgagatcagccacacccagaaagccaccctcgtgtgcctggctaccggcttctaccccgaccatgtggaactgtcttggtgggtcaacggcaaagaggtgcacagcggcgtgtctaccgacccccagccactgaaagaacagcccgccctgaacgacagccggtactgcctgagcagcagactgagagtgtccgccaccttctggcagaacccccggaaccacttcagatgccaggtgcagttctacggcctgagcgagaacgacgagtggacccaggacagagccaagcccgtgacccagatcgtgtctgccgaagcctggggcagagccgattgcggatcccagagcttcggcctgctggaccccaagctgtgctacctgctggatggcatcctgttcatctacggcgtgatcctgaccgccctgttcctgagagtgaagttcagcagaagcgccgacgcccctgcctaccagcagggacagaaccaactgtacaacgagctgaacctgggcagacgggaagagtacgacgtgctggacaagcggagaggcagggaccctgagatgggcggaaagccccagcggagaaagaacccccaggaaggactgtataacgaactccagaaagacaagatggccgaagcctacagcgagatcggcatgaagggcgagcggagaagaggcaagggccacgatggcctgtaccagggcctgagcaccgccaccaaggacacctatgacgccctgcacatgcaggccctgcctccaagaagggccaagcgatctggatctggagcaacaaacttctcactactcaaacaagcaggtgacgtggaggagaatcccgggcctactagtatggactggatttggcgcatccttttccttgtcggcgctgctaccggcgcgcattccttcgaacaactccagctgcaagagtctggccctggcctggtcaagcctagcgaaacactgagcctgacctgtaccgtgtctggcggctctatcagctccggcagctatttctggggctggatcagacaacctcctggcaaaggactggaatggatcggctccatctactacagcggcatcagctactacaaccccagcctgaagtccagagtgaccatctccgtggacaccagcaagaaccagttctccctgaagctgagcagcgtgacagccgccgataccgccgtgtattattgtgccagacatgacggcgctgtggccggcctgtttgattattggggacagggcaccctggtcaccgtgtcatctgctacgcgtatccagaaccctgatcctgccgtgtaccagctgcgggatagcaagagcagcgacaagagcgtgtgtctgttcaccgacttcgacagccagaccaacgtgtcccagagcaaggactccgacgtgtacatcaccgataagaccgtgctggacatgcggagcatggacttcaagagcaactccgccgtggcctggtccaacaagtccgatttcgcctgcgccaacgccttcaacaacagcattatccccgaggacacattcttcccaagccccgagagcagctgcggtacccagagttttgggttgttggaccctaaattgtgctatctgttggacggaatcctgttcatttacggagtgatcctgaccgcattgttcctgcgggttaagttttccagatccgcagacgcacccgcttaccaacaagggcagaaccaactctacaatgaacttaatttggggcggagggaagagtacgacgttctggacaaaaggaggggacgagatcccgagatgggcggaaagcctcagcgaaggaagaatccgcaagaggggctttataacgaactccagaaagataaaatggcagaagcctatagtgagattgggatgaagggagaaaggaggaggggtaaaggtcacgatgggttgtaccaaggattgagcacagccactaaagatacctatgatgcgctccacatgcaggccctgccgccaaga

SEQ ID NO: 7707 - DNA, 2457 bp, Artificial Sequence
  Synthetic Polynucloetide
atggccttaccagtgaccgccttgctcctgccgctggccttgctgctccacgccgccaggccgagctacgtgctgacacagcctccatccgtgtctgtggctccaggacagaccgccagaatcacatgcggcggcaacaacatcggcagcaagagcgtgcactggtatcagcagccacctggacaggctccagtggtggtggtgtacgacgacagcgatagacctagcggcatccccgagagattcagcggcagcaattccggcaataccgccacactgaccatcagcagagtggaagctggcgacgaggccgtgtactactgccaagtgtgggacagcagcagcgatcacgtggtgtttggcggcggaacaaagctgacagtgcttctcgaggacctgaagaacgtgttcccacctgaggtggccgtgttcgagcctagcaaggccgagatcgcccacacccagaaagccaccctcgtgtgcctggctaccggcttctaccccgaccatgtggaactgtcttggtgggtcaacggcaaagaggtgcacagcggcgtgtgtaccgacccccagccactgaaagaacagcccgccctgaacgacagccggtactgcctgagcagcagactgagagtgtccgccaccttctggcagaacccccggaaccacttcagatgccaggtgcagttctacggcctgagcgagaacgacgagtggacccaggacagagccaagcccgtgacccagatcgtgtctgccgaagcctggggcagagccgattgcggatcccagagcttcggcctgctggaccccaagctgtgctacctgctggatggcatcctgttcatctacggcgtgatcctgaccgccctgttcctgagagtgaagttcagcagaagcgccgacgcccctgcctaccagcagggacagaaccaactgtacaacgagctgaacctgggcagacgggaagagtacgacgtgctggacaagcggagaggcagggaccctgagatgggcggaaagccccagcggagaaagaacccccaggaaggactgtataacgaactccagaaagacaagatggccgaagcctacagcgagatcggcatgaagggcgagcggagaagaggcaagggccacgatggcctgtaccagggcctgagcaccgccaccaaggacacctatgacgccctgcacatgcaggccctgcctccaagaagggccaagcgatctggatctggagcaacaaacttctcactactcaaacaagcaggtgacgtggaggagaatcccgggcctactagtatggactggatttggcgcatccttttccttgtcggcgctgctaccggcgcgcattccttcgaacaactccagctgcaagagtctggccctggcctggtcaagcctagcgaaacactgagcctgacctgtaccgtgtctggcggctctatcagctccggcagctatttctggggctggatcagacaacctcctggcaaaggactggaatggatcggctccatctactacagcggcatcagctactacaaccccagcctgaagtccagagtgaccatctccgtggacaccagcaagaaccagttctccctgaagctgagcagcgtgacagccgccgataccgccgtgtattattgtgccagacatgacggcgctgtggccggcctgtttgattattggggacagggcaccctggtcaccgtgtcatctgctacgcgtatccagaaccctgatcctgccgtgtaccagctgcgggatagcaagagcagcgacaagagcgtgtgtctgttcaccgacttcgacagccagaccaacgtgtcccagagcaaggactccgacgtgtacatcaccgataagtgcgtgctggacatgcggagcatggacttcaagagcaactccgccgtggcctggtccaacaagtccgatttcgcctgcgccaacgccttcaacaacagcattatccccgaggacacattcttcccaagcagcgacgtgccctgcggtacccagagttttgggttgttggaccctaaattgtgctatctgttggacggaatcctgttcatttacggagtgatcctgaccgcattgttcctgcgggttaagttttccagatccgcagacgcacccgcttaccaacaagggcagaaccaactctacaatgaacttaatttggggcggagggaagagtacgacgttctggacaaaaggaggggacgagatcccgagatgggcggaaagcctcagcgaaggaagaatccgcaagaggggctttataacgaactccagaaagataaaatggcagaagcctatagtgagattgggatgaagggagaaaggaggaggggtaaaggtcacgatgggttgtaccaaggattgagcacagccactaaagatacctatgatgcgctccacatgcaggccctgccgccaaga

SEQ ID NO: 7708 - DNA, 2670 bp, Artificial Sequence
  Synthetic Polynucloetide
atggccttaccagtgaccgccttgctcctgccgctggccttgctgctccacgccgccaggccgagctacgtgctgacacagcctccatccgtgtctgtggctccaggacagaccgccagaatcacatgcggcggcaacaacatcggcagcaagagcgtgcactggtatcagcagccacctggacaggctccagtggtggtggtgtacgacgacagcgatagacctagcggcatccccgagagattcagcggcagcaattccggcaataccgccacactgaccatcagcagagtggaagctggcgacgaggccgtgtactactgccaagtgtgggacagcagcagcgatcacgtggtgtttggcggcggaacaaagctgacagtgcttctcgaggggaaaccaattcccaaccctcttctgggactggattcaaccggcagcggcgaggacctgaagaacgtgttcccacctgaggtggccgtgttcgagcctagcgaggccgagatcagccacacccagaaagccaccctcgtgtgcctggctaccggcttctaccccgaccatgtggaactgtcttggtgggtcaacggcaaagaggtgcacagcggcgtgtctaccgacccccagccactgaaagaacagcccgccctgaacgacagccggtactgcctgagcagcagactgagagtgtccgccaccttctggcagaacccccggaaccacttcagatgccaggtgcagttctacggcctgagcgagaacgacgagtggacccaggacagagccaagcccgtgacccagatcgtgtctgccgaagcctggggcagagccgattgcggatcccagagcttcggcctgctggaccccaagctgtgctacctgctggatggcatcctgttcatctacggcgtgatcctgaccgccctgttcctgagagtgaagttcagcagaagcgccgacgcccctgcctaccagcagggacagaaccaactgtacaacgagctgaacctgggcagacgggaagagtacgacgtgctggacaagcggagaggcagggaccctgagatgggcggaaagccccagcggagaaagaacccccaggaaggactgtataacgaactccagaaagacaagatggccgaagcctacagcgagatcggcatgaagggcgagcggagaagaggcaagggccacgatggcctgtaccagggcctgagcaccgccaccaaggacacctatgacgccctgcacatgcaggccctgcctccaagaagggccaagcgatctggatctggagcaacaaacttctcactactcaaacaagcaggtgacgtggaggagaatcccgggcctactagtatggactggatttggcgcatccttttccttgtcggcgctgctaccggcgcgcattccttcgaacaactccagctgcaagagtctggccctggcctggtcaagcctagcgaaacactgagcctgacctgtaccgtgtctggcggctctatcagctccggcagctatttctggggctggatcagacaacctcctggcaaaggactggaatggatcggctccatctactacagcggcatcagctactacaaccccagcctgaagtccagagtgaccatctccgtggacaccagcaagaaccagttctccctgaagctgagcagcgtgacagccgccgataccgccgtgtattattgtgccagacatgacggcgctgtggccggcctgtttgattattggggacagggcaccctggtcaccgtgtcatctgctacgcgtgagcagaaactgatctcggaagaggatgggagcggcatccagaaccctgatcctgccgtgtaccagctgcgggatagcaagagcagcgacaagagcgtgtgtctgttcaccgacttcgacagccagaccaacgtgtcccagagcaaggactccgacgtgtacatcaccgataagaccgtgctggacatgcggagcatggacttcaagagcaactccgccgtggcctggtccaacaagtccgatttcgcctgcgccaacgccttcaacaacagcattatccccgaggacacattcttcccaagccccgagagcagctgcggtacccagagttttgggttgttggaccctaaattgtgctatctgttggacggaatcctgttcatttacggagtgatcctgaccgcattgttcctgaggagcaagcggtcacggctgctccacagcgattacatgaatatgacaccacgaagaccgggtcctactcgcaaacactaccaaccctacgcacctccccgcgactttgcagcgtaccgatctcgggttaagttttccagatccgcagacgcacccgcttaccaacaagggcagaaccaactctacaatgaacttaatttggggcggagggaagagtacgacgttctggacaaaaggaggggacgagatcccgagatgggcggaaagcctcagcgaaggaagaatccgcaagaggggctttataacgaactccagaaagataaaatggcagaagcctatagtgagattgggatgaagggagaaaggaggaggggtaaaggtcacgatgggttgtaccaaggattgagcacagccactaaagatacctatgatgcgctccacatgcaggccctgccgccaaga

SEQ ID NO: 7709 - DNA, 2793 bp, Artificial Sequence
  Synthetic Polynucloetide
atggccttaccagtgaccgccttgctcctgccgctggccttgctgctccacgccgccaggccgagctacgtgctgacacagcctccatccgtgtctgtggctccaggacagaccgccagaatcacatgcggcggcaacaacatcggcagcaagagcgtgcactggtatcagcagccacctggacaggctccagtggtggtggtgtacgacgacagcgatagacctagcggcatccccgagagattcagcggcagcaattccggcaataccgccacactgaccatcagcagagtggaagctggcgacgaggccgtgtactactgccaagtgtgggacagcagcagcgatcacgtggtgtttggcggcggaacaaagctgacagtgcttctcgaggggaaaccaattcccaaccctcttctgggactggattcaaccggcagcggcgaggacctgaagaacgtgttcccacctgaggtggccgtgttcgagcctagcgaggccgagatcagccacacccagaaagccaccctcgtgtgcctggctaccggcttctaccccgaccatgtggaactgtcttggtgggtcaacggcaaagaggtgcacagcggcgtgtctaccgacccccagccactgaaagaacagcccgccctgaacgacagccggtactgcctgagcagcagactgagagtgtccgccaccttctggcagaacccccggaaccacttcagatgccaggtgcagttctacggcctgagcgagaacgacgagtggacccaggacagagccaagcccgtgacccagatcgtgtctgccgaagcctggggcagagccgattgcggatcccagagcttcggcctgctggaccccaagctgtgctacctgctggatggcatcctgttcatctacggcgtgatcctgaccgccctgttcctgaggagtaagaggagcaggctcctgcacagtgactacatgaacatgactccacgccgccccggacccacccgcaagcattaccagccctatgccccaccacgcgacttcgcagcctatcgctccagagtgaagttcagcagaagcgccgacgcccctgcctaccagcagggacagaaccaactgtacaacgagctgaacctgggcagacgggaagagtacgacgtgctggacaagcggagaggcagggaccctgagatgggcggaaagccccagcggagaaagaacccccaggaaggactgtataacgaactccagaaagacaagatggccgaagcctacagcgagatcggcatgaagggcgagcggagaagaggcaagggccacgatggcctgtaccagggcctgagcaccgccaccaaggacacctatgacgccctgcacatgcaggccctgcctccaagaagggccaagcgatctggatctggagcaacaaacttctcactactcaaacaagcaggtgacgtggaggagaatcccgggcctactagtatggactggatttggcgcatccttttccttgtcggcgctgctaccggcgcgcattccttcgaacaactccagctgcaagagtctggccctggcctggtcaagcctagcgaaacactgagcctgacctgtaccgtgtctggcggctctatcagctccggcagctatttctggggctggatcagacaacctcctggcaaaggactggaatggatcggctccatctactacagcggcatcagctactacaaccccagcctgaagtccagagtgaccatctccgtggacaccagcaagaaccagttctccctgaagctgagcagcgtgacagccgccgataccgccgtgtattattgtgccagacatgacggcgctgtggccggcctgtttgattattggggacagggcaccctggtcaccgtgtcatctgctacgcgtgagcagaaactgatctcggaagaggatgggagcggcatccagaaccctgatcctgccgtgtaccagctgcgggatagcaagagcagcgacaagagcgtgtgtctgttcaccgacttcgacagccagaccaacgtgtcccagagcaaggactccgacgtgtacatcaccgataagaccgtgctggacatgcggagcatggacttcaagagcaactccgccgtggcctggtccaacaagtccgatttcgcctgcgccaacgccttcaacaacagcattatccccgaggacacattcttcccaagccccgagagcagctgcggtacccagagttttgggttgttggaccctaaattgtgctatctgttggacggaatcctgttcatttacggagtgatcctgaccgcattgttcctgaggagcaagcggtcacggctgctccacagcgattacatgaatatgacaccacgaagaccgggtcctactcgcaaacactaccaaccctacgcacctccccgcgactttgcagcgtaccgatctcgggttaagttttccagatccgcagacgcacccgcttaccaacaagggcagaaccaactctacaatgaacttaatttggggcggagggaagagtacgacgttctggacaaaaggaggggacgagatcccgagatgggcggaaagcctcagcgaaggaagaatccgcaagaggggctttataacgaactccagaaagataaaatggcagaagcctatagtgagattgggatgaagggagaaaggaggaggggtaaaggtcacgatgggttgtaccaaggattgagcacagccactaaagatacctatgatgcgctccacatgcaggccctgccgccaaga

SEQ ID NO: 7710 - DNA, 2676 bp, Artificial Sequence
  Synthetic Polynucloetide
atggccttaccagtgaccgccttgctcctgccgctggccttgctgctccacgccgccaggccgagctacgtgctgacacagcctccatccgtgtctgtggctccaggacagaccgccagaatcacatgcggcggcaacaacatcggcagcaagagcgtgcactggtatcagcagccacctggacaggctccagtggtggtggtgtacgacgacagcgatagacctagcggcatccccgagagattcagcggcagcaattccggcaataccgccacactgaccatcagcagagtggaagctggcgacgaggccgtgtactactgccaagtgtgggacagcagcagcgatcacgtggtgtttggcggcggaacaaagctgacagtgcttctcgaggggaaaccaattcccaaccctcttctgggactggattcaaccggcagcggcgaggacctgaagaacgtgttcccacctgaggtggccgtgttcgagcctagcgaggccgagatcagccacacccagaaagccaccctcgtgtgcctggctaccggcttctaccccgaccatgtggaactgtcttggtgggtcaacggcaaagaggtgcacagcggcgtgtctaccgacccccagccactgaaagaacagcccgccctgaacgacagccggtactgcctgagcagcagactgagagtgtccgccaccttctggcagaacccccggaaccacttcagatgccaggtgcagttctacggcctgagcgagaacgacgagtggacccaggacagagccaagcccgtgacccagatcgtgtctgccgaagcctggggcagagccgattgcggatcccagagcttcggcctgctggaccccaagctgtgctacctgctggatggcatcctgttcatctacggcgtgatcctgaccgccctgttcctgagagtgaagttcagcagaagcgccgacgcccctgcctaccagcagggacagaaccaactgtacaacgagctgaacctgggcagacgggaagagtacgacgtgctggacaagcggagaggcagggaccctgagatgggcggaaagccccagcggagaaagaacccccaggaaggactgtataacgaactccagaaagacaagatggccgaagcctacagcgagatcggcatgaagggcgagcggagaagaggcaagggccacgatggcctgtaccagggcctgagcaccgccaccaaggacacctatgacgccctgcacatgcaggccctgcctccaagaagggccaagcgatctggatctggagcaacaaacttctcactactcaaacaagcaggtgacgtggaggagaatcccgggcctactagtatggactggatttggcgcatccttttccttgtcggcgctgctaccggcgcgcattccttcgaacaactccagctgcaagagtctggccctggcctggtcaagcctagcgaaacactgagcctgacctgtaccgtgtctggcggctctatcagctccggcagctatttctggggctggatcagacaacctcctggcaaaggactggaatggatcggctccatctactacagcggcatcagctactacaaccccagcctgaagtccagagtgaccatctccgtggacaccagcaagaaccagttctccctgaagctgagcagcgtgacagccgccgataccgccgtgtattattgtgccagacatgacggcgctgtggccggcctgtttgattattggggacagggcaccctggtcaccgtgtcatctgctacgcgtgagcagaaactgatctcggaagaggatctggggagcggcatccagaaccctgatcctgccgtgtaccagctgcgggatagcaagagcagcgacaagagcgtgtgtctgttcaccgacttcgacagccagaccaacgtgtcccagagcaaggactccgacgtgtacatcaccgataagaccgtgctggacatgcggagcatggacttcaagagcaactccgccgtggcctggtccaacaagtccgatttcgcctgcgccaacgccttcaacaacagcattatccccgaggacacattcttcccaagccccgagagcagctgcggtacccagagttttgggttgttggaccctaaattgtgctatctgttggacggaatcctgttcatttacggagtgatcctgaccgcattgttcctgaagagaggccggaagaagctgctgtacatcttcaagcagcctttcatgcggcccgtgcagaccacccaggaagaggacggctgctcctgccggttccccgaggaagaagaaggcggctgcgagctgcgggttaagttttccagatccgcagacgcacccgcttaccaacaagggcagaaccaactctacaatgaacttaatttggggcggagggaagagtacgacgttctggacaaaaggaggggacgagatcccgagatgggcggaaagcctcagcgaaggaagaatccgcaagaggggctttataacgaactccagaaagataaaatggcagaagcctatagtgagattgggatgaagggagaaaggaggaggggtaaaggtcacgatgggttgtaccaaggattgagcacagccactaaagatacctatgatgcgctccacatgcaggccctgccgccaaga

SEQ ID NO: 7711 - DNA, 2802 bp, Artificial Sequence
  Synthetic Polynucloetide
atggccttaccagtgaccgccttgctcctgccgctggccttgctgctccacgccgccaggccgagctacgtgctgacacagcctccatccgtgtctgtggctccaggacagaccgccagaatcacatgcggcggcaacaacatcggcagcaagagcgtgcactggtatcagcagccacctggacaggctccagtggtggtggtgtacgacgacagcgatagacctagcggcatccccgagagattcagcggcagcaattccggcaataccgccacactgaccatcagcagagtggaagctggcgacgaggccgtgtactactgccaagtgtgggacagcagcagcgatcacgtggtgtttggcggcggaacaaagctgacagtgcttctcgaggggaaaccaattcccaaccctcttctgggactggattcaaccggcagcggcgaggacctgaagaacgtgttcccacctgaggtggccgtgttcgagcctagcgaggccgagatcagccacacccagaaagccaccctcgtgtgcctggctaccggcttctaccccgaccatgtggaactgtcttggtgggtcaacggcaaagaggtgcacagcggcgtgtctaccgacccccagccactgaaagaacagcccgccctgaacgacagccggtactgcctgagcagcagactgagagtgtccgccaccttctggcagaacccccggaaccacttcagatgccaggtgcagttctacggcctgagcgagaacgacgagtggacccaggacagagccaagcccgtgacccagatcgtgtctgccgaagcctggggcagagccgattgcggatcccagagcttcggcctgctggaccccaagctgtgctacctgctggatggcatcctgttcatctacggcgtgatcctgaccgccctgttcctgaaacggggcagaaagaaactcctgtatatattcaaacaaccatttatgagaccagtacaaactactcaagaggaagatggctgtagctgccgatttccagaagaagaagaaggaggatgtgaactgagagtgaagttcagcagaagcgccgacgcccctgcctaccagcagggacagaaccaactgtacaacgagctgaacctgggcagacgggaagagtacgacgtgctggacaagcggagaggcagggaccctgagatgggcggaaagccccagcggagaaagaacccccaggaaggactgtataacgaactccagaaagacaagatggccgaagcctacagcgagatcggcatgaagggcgagcggagaagaggcaagggccacgatggcctgtaccagggcctgagcaccgccaccaaggacacctatgacgccctgcacatgcaggccctgcctccaagaagggccaagcgatctggatctggagcaacaaacttctcactactcaaacaagcaggtgacgtggaggagaatcccgggcctactagtatggactggatttggcgcatccttttccttgtcggcgctgctaccggcgcgcattccttcgaacaactccagctgcaagagtctggccctggcctggtcaagcctagcgaaacactgagcctgacctgtaccgtgtctggcggctctatcagctccggcagctatttctggggctggatcagacaacctcctggcaaaggactggaatggatcggctccatctactacagcggcatcagctactacaaccccagcctgaagtccagagtgaccatctccgtggacaccagcaagaaccagttctccctgaagctgagcagcgtgacagccgccgataccgccgtgtattattgtgccagacatgacggcgctgtggccggcctgtttgattattggggacagggcaccctggtcaccgtgtcatctgctacgcgtgagcagaaactgatctcggaagaggatctggggagcggcatccagaaccctgatcctgccgtgtaccagctgcgggatagcaagagcagcgacaagagcgtgtgtctgttcaccgacttcgacagccagaccaacgtgtcccagagcaaggactccgacgtgtacatcaccgataagaccgtgctggacatgcggagcatggacttcaagagcaactccgccgtggcctggtccaacaagtccgatttcgcctgcgccaacgccttcaacaacagcattatccccgaggacacattcttcccaagccccgagagcagctgcggtacccagagttttgggttgttggaccctaaattgtgctatctgttggacggaatcctgttcatttacggagtgatcctgaccgcattgttcctgaagagaggccggaagaagctgctgtacatcttcaagcagcctttcatgcggcccgtgcagaccacccaggaagaggacggctgctcctgccggttccccgaggaagaagaaggcggctgcgagctgcgggttaagttttccagatccgcagacgcacccgcttaccaacaagggcagaaccaactctacaatgaacttaatttggggcggagggaagagtacgacgttctggacaaaaggaggggacgagatcccgagatgggcggaaagcctcagcgaaggaagaatccgcaagaggggctttataacgaactccagaaagataaaatggcagaagcctatagtgagattgggatgaagggagaaaggaggaggggtaaaggtcacgatgggttgtaccaaggattgagcacagccactaaagatacctatgatgcgctccacatgcaggccctgccgccaaga

SEQ ID NO: 7712 - DNA, 2475 bp, Artificial Sequence
  Synthetic Polynucloetide
atggccttaccagtgaccgccttgctcctgccgctggccttgctgctccacgccgccaggccgagctacgtgctgacacagcctccatccgtgtctgtggctccaggacagaccgccagaatcacatgcggcggcaacaacatcggcagcaagagcgtgcactggtatcagcagccacctggacaggctccagtggtggtggtgtacgacgacagcgatagacctagcggcatccccgagagattcagcggcagcaattccggcaataccgccacactgaccatcagcagagtggaagctggcgacgaggccgtgtactactgccaagtgtgggacagcagcagcgatcacgtggtgtttggcggcggaacaaagctgacagtgcttctcgagcagagcttcggcctgctggaccccaagctgtgctacctgctggatggcatcctgttcatctacggcgtgatcctgaccgccctgttcctgagagtgaagttcagcagaagcgccgacgcccctgcctaccagcagggacagaaccaactgtacaacgagctgaacctgggcagacgggaagagtacgacgtgctggacaagcggagaggcagggaccctgagatgggcggaaagccccagcggagaaagaacccccaggaaggactgtataacgaactccagaaagacaagatggccgaagcctacagcgagatcggcatgaagggcgagcggagaagaggcaagggccacgatggcctgtaccagggcctgagcaccgccaccaaggacacctatgacgccctgcacatgcaggccctgcctccaagaagggccaagcgatctggatctggagcaacaaacttctcactactcaaacaagcaggtgacgtggaggagaatcccgggcctactagtatggactggatttggcgcatccttttccttgtcggcgctgctaccggcgcgcattccttcgaacaactccagctgcaagagtctggccctggcctggtcaagcctagcgaaacactgagcctgacctgtaccgtgtctggcggctctatcagctccggcagctatttctggggctggatcagacaacctcctggcaaaggactggaatggatcggctccatctactacagcggcatcagctactacaaccccagcctgaagtccagagtgaccatctccgtggacaccagcaagaaccagttctccctgaagctgagcagcgtgacagccgccgataccgccgtgtattattgtgccagacatgacggcgctgtggccggcctgtttgattattggggacagggcaccctggtcaccgtgtcatctgctacgcgtcagagttttgggttgttggaccctaaattgtgctatctgttggacggaatcctgttcatttacggagtgatcctgaccgcattgttcctgcgggttaagttttccagatccgcagacgcacccgcttaccaacaagggcagaaccaactctacaatgaacttaatttggggcggagggaagagtacgacgttctggacaaaaggaggggacgagatcccgagatgggcggaaagcctcagcgaaggaagaatccgcaagaggggctttataacgaactccagaaagataaaatggcagaagcctatagtgagattgggatgaagggagaaaggaggaggggtaaaggtcacgatgggttgtaccaaggattgagcacagccactaaagatacctatgatgcgctccacatgcaggccctgccgccaagacgcgccaagagaagcggatctggcgtgaagcagaccctgaatttcgacctgctgaagctggctggcgacgtggaatccaacccaggcccttctagaggccatatgaccgagtacaagcccacggtgcgcctcgccacccgcgacgacgtccccagggccgtacgcaccctcgccgccgcgttcgccgactaccccgccacgcgccacaccgtcgatccggaccgccacatcgagcgggtcaccgagctgcaagaactcttcctcacgcgcgtcgggctcgacatcggcaaggtgtgggtcgcggacgacggcgccgcggtggcggtctggaccacgccggagagcgtcgaagcgggggcggtgttcgccgagatcggcccgcgcatggccgagttgagcggttcccggctggccgcgcagcaacagatggaaggcctcctggcgccgcaccggcccaaggagcccgcgtggttcctggccaccgtcggcgtctcgcccgaccaccagggcaagggtctgggcagcgccgtcgtgctccccggagtggaggcggccgagcgcgccggggtgcccgccttcctggagacctccgcgccccgcaacctccccttctacgagcggctcggcttcaccgtcaccgccgacgtcgaggtgcccgaaggaccgcgcacctggtgcatgacccgcaagcccggtgcctga

SEQ ID NO: 7713 - DNA, 1947 bp, Artificial Sequence
  Synthetic Polynucloetide
atggccttaccagtgaccgccttgctcctgccgctggccttgctgctccacgccgccaggccgagctacgtgctgacacagcctccatccgtgtctgtggctccaggacagaccgccagaatcacatgcggcggcaacaacatcggcagcaagagcgtgcactggtatcagcagccacctggacaggctccagtggtggtggtgtacgacgacagcgatagacctagcggcatccccgagagattcagcggcagcaattccggcaataccgccacactgaccatcagcagagtggaagctggcgacgaggccgtgtactactgccaagtgtgggacagcagcagcgatcacgtggtgtttggcggcggaacaaagctgacagtgcttctcgagggacagcctaaggccaatcctaccgtgacactgttccctccaagcagcgaagaactccaggccaacaaggccacacttgtgtgcctgatctccgacttctaccctggggctgtgacagtggcttggaaggccgatggatctcctgtgaaagccggcgtggaaaccaccaagccatccaagcagagcaacaacaaatacgccgccagctcctacctgagcctgacacctgagcagtggaagtcccacagatcctacagctgccaagtgacccacgaaggcagcaccgtggaaaagacagtggcccctacagagtgcagccccatcaagaccgatgtgattacaatggaccccaaggacaactgctccaaggacgccaacgataccctgctgctccagctgaccaacaccagcgcctactacatgtacttgttgctgctgctgaagtccgtggtgtacttcgccatcatcacatgctgcctgctgcggagaaccgccttctgctgcaacggcgagaagtctagggccaagcgatctggatctggagcaacaaacttctcactactcaaacaagcaggtgacgtggaggagaatcccgggcctactagtatggactggatttggcgcatccttttccttgtcggcgctgctaccggcgcgcattccttcgaacaactccagctgcaagagtctggccctggcctggtcaagcctagcgaaacactgagcctgacctgtaccgtgtctggcggctctatcagctccggcagctatttctggggctggatcagacaacctcctggcaaaggactggaatggatcggctccatctactacagcggcatcagctactacaaccccagcctgaagtccagagtgaccatctccgtggacaccagcaagaaccagttctccctgaagctgagcagcgtgacagccgccgataccgccgtgtattattgtgccagacatgacggcgctgtggccggcctgtttgattattggggacagggcaccctggtcaccgtgtcatctgctacgcgtgcctctacaaagggaccctccgtgtttcctctggctcccagcagcaagtctacaagcggaggaacagccgctctgggctgcctggtcaaggattactttcccgagcctgtgaccgtgtcctggaatagcggagcactgacaagcggcgtgcacacctttccagccgtgctgcaaagcagcggcctgtactctctgagcagcgtggtcacagtgcctagctctagcctgggcacccagacctacatctgcaatgtgaaccacaagcctagcaacaccaaggtggacaagagagtggaacccaagagctgtgaagtgaaaaccgactccaccgaccacgtgaagcccaaagagacagagaacaccaagcagcccagcaagagctgccacaagcccaaggccatcgtgcacaccgagaaagtgaacatgatgagcctgaccgtgctgggcctgcggatgctgttcgccaaaaccgtggccgtgaacttcctgctgaccgccaagctgttcttcctc

SEQ ID NO: 7714 - DNA, 1881 bp, Artificial Sequence
  Synthetic Polynucloetide
atggccttaccagtgaccgccttgctcctgccgctggccttgctgctccacgccgccaggccgagctacgtgctgacacagcctccatccgtgtctgtggctccaggacagaccgccagaatcacatgcggcggcaacaacatcggcagcaagagcgtgcactggtatcagcagccacctggacaggctccagtggtggtggtgtacgacgacagcgatagacctagcggcatccccgagagattcagcggcagcaattccggcaataccgccacactgaccatcagcagagtggaagctggcgacgaggccgtgtactactgccaagtgtgggacagcagcagcgatcacgtggtgtttggcggcggaacaaagctgacagtgcttctcgagggacagcctaaggccaatcctaccgtgacactgttccctccaagcagcgaagaactccaggccaacaaggccacacttgtgtgcctgatctccgacttctaccctggggctgtgacagtggcttggaaggccgatggatctcctgtgaaagccggcgtggaaaccaccaagccatccaagcagagcaacaacaaatacgccgccagctcctacctgagcctgacacctgagcagtggaagtcccacagatcctacagctgccaagtgacccacgaaggcagcaccgtggaaaagacagtggcccctacagagtgcagcggcagagccgattgcggcatcaccagcgccagctaccaccagggcgtgctgagcgccaccatcctgtacgagatcctgctgggcaaggccaccctgtacgccgtgctggtgtctgccctggtgctgatggctatggtcaagcggaaggacagccggggaagggccaagcgatctggatctggagcaacaaacttctcactactcaaacaagcaggtgacgtggaggagaatcccgggcctactagtatggactggatttggcgcatccttttccttgtcggcgctgctaccggcgcgcattccttcgaacaactccagctgcaagagtctggccctggcctggtcaagcctagcgaaacactgagcctgacctgtaccgtgtctggcggctctatcagctccggcagctatttctggggctggatcagacaacctcctggcaaaggactggaatggatcggctccatctactacagcggcatcagctactacaaccccagcctgaagtccagagtgaccatctccgtggacaccagcaagaaccagttctccctgaagctgagcagcgtgacagccgccgataccgccgtgtattattgtgccagacatgacggcgctgtggccggcctgtttgattattggggacagggcaccctggtcaccgtgtcatctgctacgcgtgcctctacaaagggaccctccgtgtttcctctggctcccagcagcaagtctacaagcggaggaacagccgctctgggctgcctggtcaaggattactttcccgagcctgtgaccgtgtcctggaatagcggagcactgacaagcggcgtgcacacctttccagccgtgctgcaaagcagcggcctgtactctctgagcagcgtggtcacagtgcctagctctagcctgggcacccagacctacatctgcaatgtgaaccacaagcctagcaacaccaaggtggacaagagagtggaacccaagagctgtatccccgaggacacattcttcccaagcagcgacgtgccctgcgacgtgaagctggtggaaaagagcttcgagacagacaccaacctgaacttccagaacctgagcgtgatcggcttcagaatcctgctgctgaaagtggccggctttaacctgctgatgaccctgcggctgtggtccagc

SEQ ID NO: 7715 - DNA, 1881 bp, Artificial Sequence
  Synthetic Polynucloetide
atggccttaccagtgaccgccttgctcctgccgctggccttgctgctccacgccgccaggccgagctacgtgctgacacagcctccatccgtgtctgtggctccaggacagaccgccagaatcacatgcggcggcaacaacatcggcagcaagagcgtgcactggtatcagcagccacctggacaggctccagtggtggtggtgtacgacgacagcgatagacctagcggcatccccgagagattcagcggcagcaattccggcaataccgccacactgaccatcagcagagtggaagctggcgacgaggccgtgtactactgccaagtgtgggacagcagcagcgatcacgtggtgtttggcggcggaacaaagctgacagtgcttctcgagggacagcctaaggccaatcctaccgtgacactgttccctccaagcagcgaagaactccaggccaacaaggccacacttgtgtgcctgatctccgacttctaccctggggctgtgacagtggcttggaaggccgatggatctcctgtgaaagccggcgtggaaaccaccaagccatccaagcagagcaacaacaaatacgccgccagctcctacctgagcctgacacctgagcagtggaagtcccacagatcctacagctgccaagtgacccacgaaggcagcaccgtggaaaagacagtggcccctacagagtgcagcggcagagccgattgcggctttaccagcgagagctaccagcagggcgtgctgagcgccaccatcctgtacgagatcctgctgggcaaggccaccctgtacgccgtgctggtgtctgccctggtgctgatggctatggtcaagcggaaggacagccggggaagggccaagcgatctggatctggagcaacaaacttctcactactcaaacaagcaggtgacgtggaggagaatcccgggcctactagtatggactggatttggcgcatccttttccttgtcggcgctgctaccggcgcgcattccttcgaacaactccagctgcaagagtctggccctggcctggtcaagcctagcgaaacactgagcctgacctgtaccgtgtctggcggctctatcagctccggcagctatttctggggctggatcagacaacctcctggcaaaggactggaatggatcggctccatctactacagcggcatcagctactacaaccccagcctgaagtccagagtgaccatctccgtggacaccagcaagaaccagttctccctgaagctgagcagcgtgacagccgccgataccgccgtgtattattgtgccagacatgacggcgctgtggccggcctgtttgattattggggacagggcaccctggtcaccgtgtcatctgctacgcgtgcctctacaaagggaccctccgtgtttcctctggctcccagcagcaagtctacaagcggaggaacagccgctctgggctgcctggtcaaggattactttcccgagcctgtgaccgtgtcctggaatagcggagcactgacaagcggcgtgcacacctttccagccgtgctgcaaagcagcggcctgtactctctgagcagcgtggtcacagtgcctagctctagcctgggcacccagacctacatctgcaatgtgaaccacaagcctagcaacaccaaggtggacaagagagtggaacccaagagctgtatccccgaggacacattcttcccaagccccgagagcagctgcgacgtgaagctggtggaaaagagcttcgagacagacaccaacctgaacttccagaacctgagcgtgatcggcttcagaatcctgctgctgaaagtggccggctttaacctgctgatgaccctgcggctgtggtccagc

SEQ ID NO: 7716 - DNA, 1359 bp, Artificial Sequence
  Synthetic Polynucloetide
atggccttaccagtgaccgccttgctcctgccgctggccttgctgctccacgccgccaggccgagctacgtgctgacacagcctccatccgtgtctgtggctccaggacagaccgccagaatcacatgcggcggcaacaacatcggcagcaagagcgtgcactggtatcagcagccacctggacaggctccagtggtggtggtgtacgacgacagcgatagacctagcggcatccccgagagattcagcggcagcaattccggcaataccgccacactgaccatcagcagagtggaagctggcgacgaggccgtgtactactgccaagtgtgggacagcagcagcgatcacgtggtgtttggcggcggaacaaagctgacagtgcttggcggaggcggaagtggaggcggaggatctggcggcggaggctctcaactccagctgcaagagtctggccctggcctggtcaagcctagcgaaacactgagcctgacctgtaccgtgtctggcggctctatcagctccggcagctatttctggggctggatcagacaacctcctggcaaaggactggaatggatcggctccatctactacagcggcatcagctactacaaccccagcctgaagtccagagtgaccatctccgtggacaccagcaagaaccagttctccctgaagctgagcagcgtgacagccgccgataccgccgtgtattattgtgccagacatgacggcgctgtggccggcctgtttgattattggggacagggcaccctggtcaccgtgtcatctgctacgcgtgacggtaacgaggagatgggaggaatcactcaaaccccttacaaagtctcaatttcaggaacaactgttatccttacatgtccccagtatcctggcagcgagatcctttggcagcataacgacaagaatatagggggagatgaagacgataagaatatcggatctgacgaggatcacttgagcctgaaagagttctccgagcttgaacaaagcggatattatgtgtgctatccgcgcgggtcaaagccggaagacgctaacttttacctttatctccgagccagagtgtgcgaaaattgcatggaaatggacgttatgtccgttgctacaatagttatcgtagatatatgcatcacgggtggactgcttctgctggtttattattggtccaagaatagaaaggccaaagctaaacccgtgaccagaggcgctggcgcaggcggaaggcaaaggggacaaaacaaagaacggccaccaccagtgccaaatccagattatgagcctattcggaaaggacagagggacctgtactctggcctgaatcagagaagaatc

SEQ ID NO: 7717 - DNA, 1254 bp, Artificial Sequence
  Synthetic Polynucloetide
atggccttaccagtgaccgccttgctcctgccgctggccttgctgctccacgccgccaggccgagctacgtgctgacacagcctccatccgtgtctgtggctccaggacagaccgccagaatcacatgcggcggcaacaacatcggcagcaagagcgtgcactggtatcagcagccacctggacaggctccagtggtggtggtgtacgacgacagcgatagacctagcggcatccccgagagattcagcggcagcaattccggcaataccgccacactgaccatcagcagagtggaagctggcgacgaggccgtgtactactgccaagtgtgggacagcagcagcgatcacgtggtgtttggcggcggaacaaagctgacagtgcttggcggaggcggaagtggaggcggaggatctggcggcggaggctctcaactccagctgcaagagtctggccctggcctggtcaagcctagcgaaacactgagcctgacctgtaccgtgtctggcggctctatcagctccggcagctatttctggggctggatcagacaacctcctggcaaaggactggaatggatcggctccatctactacagcggcatcagctactacaaccccagcctgaagtccagagtgaccatctccgtggacaccagcaagaaccagttctccctgaagctgagcagcgtgacagccgccgataccgccgtgtattattgtgccagacatgacggcgctgtggccggcctgtttgattattggggacagggcaccctggtcaccgtgtcatctgctacgcgtttcaagatccccatcgaggaactggaagatcgggtgttcgtgaactgcaacacctctatcacctgggtggaaggcaccgtgggaacactgctgagcgacatcaccagactggacctcggcaagcggattctggaccctcggggcatctacagatgcaacggcaccgacatctacaaggacaaagaaagcaccgtgcaggtccactacagaatgtgccagtcctgcgtggaactggaccctgctacagtggccggcatcatcgtgaccgatgtgatcgctactctgctgctggctctgggagtgttctgcttcgccggacacgaaacaggcagactgtctggcgctgccgatacacaggccctgctgagaaacgaccaagtgtatcagcccctgcgcgacagagatgatgcccagtattctcacctcggcggcaactgggctagaaacaag

SEQ ID NO: 7718 - DNA, 1284 bp, Artificial Sequence
  Synthetic Polynucloetide
atggccttaccagtgaccgccttgctcctgccgctggccttgctgctccacgccgccaggccgagctacgtgctgacacagcctccatccgtgtctgtggctccaggacagaccgccagaatcacatgcggcggcaacaacatcggcagcaagagcgtgcactggtatcagcagccacctggacaggctccagtggtggtggtgtacgacgacagcgatagacctagcggcatccccgagagattcagcggcagcaattccggcaataccgccacactgaccatcagcagagtggaagctggcgacgaggccgtgtactactgccaagtgtgggacagcagcagcgatcacgtggtgtttggcggcggaacaaagctgacagtgcttggcggaggcggaagtggaggcggaggatctggcggcggaggctctcaactccagctgcaagagtctggccctggcctggtcaagcctagcgaaacactgagcctgacctgtaccgtgtctggcggctctatcagctccggcagctatttctggggctggatcagacaacctcctggcaaaggactggaatggatcggctccatctactacagcggcatcagctactacaaccccagcctgaagtccagagtgaccatctccgtggacaccagcaagaaccagttctccctgaagctgagcagcgtgacagccgccgataccgccgtgtattattgtgccagacatgacggcgctgtggccggcctgtttgattattggggacagggcaccctggtcaccgtgtcatctgctacgcgtcagagcatcaagggcaaccacctggtcaaggtgtacgactaccaagaggacggcagcgtgctgctgacatgtgatgccgaggccaagaacatcacctggtttaaggacggcaagatgatcggcttcctgaccgaggacaagaagaagtggaacctgggcagcaacgctaaggaccccagaggcatgtatcagtgcaagggcagccagaacaagagcaagcccctccaggtgtactaccggatgtgccagaactgcatcgagctgaacgccgctaccatcagcggctttctgttcgccgagatcgtgtccatcttcgtgctggccgtgggcgtgtactttatcgctggacaggatggcgtgcggcagagcagagcttccgataagcaaaccctgctgcctaacgaccagctgtaccagcctctgaaggacagagaggacgaccagtacagccacctccagggcaatcagctgagaagaaac

SEQ ID NO: 7719 - DNA, 1233 bp, Artificial Sequence
  Synthetic Polynucloetide
atggccttaccagtgaccgccttgctcctgccgctggccttgctgctccacgccgccaggccgagctacgtgctgacacagcctccatccgtgtctgtggctccaggacagaccgccagaatcacatgcggcggcaacaacatcggcagcaagagcgtgcactggtatcagcagccacctggacaggctccagtggtggtggtgtacgacgacagcgatagacctagcggcatccccgagagattcagcggcagcaattccggcaataccgccacactgaccatcagcagagtggaagctggcgacgaggccgtgtactactgccaagtgtgggacagcagcagcgatcacgtggtgtttggcggcggaacaaagctgacagtgcttggcggaggcggaagtggaggcggaggatctggcggcggaggctctcaactccagctgcaagagtctggccctggcctggtcaagcctagcgaaacactgagcctgacctgtaccgtgtctggcggctctatcagctccggcagctatttctggggctggatcagacaacctcctggcaaaggactggaatggatcggctccatctactacagcggcatcagctactacaaccccagcctgaagtccagagtgaccatctccgtggacaccagcaagaaccagttctccctgaagctgagcagcgtgacagccgccgataccgccgtgtattattgtgccagacatgacggcgctgtggccggcctgtttgattattggggacagggcaccctggtcaccgtgtcatctgctacgcgtcagagttttgggttgttggaccctaaattgtgctatctgttggacggaatcctgttcatttacggagtgatcctgaccgcattgttcctgcgggttaagttttccagatccgcagacgcacccgcttaccaacaagggcagaaccaactctacaatgaacttaatttggggcggagggaagagtacgacgttctggacaaaaggaggggacgagatcccgagatgggcggaaagcctcagcgaaggaagaatccgcaagaggggctttataacgaactccagaaagataaaatggcagaagcctatagtgagattgggatgaagggagaaaggaggaggggtaaaggtcacgatgggttgtaccaaggattgagcacagccactaaagatacctatgatgcgctccacatgcaggccctgccgccaaga

SEQ ID NO: 7720 - DNA, 1359 bp, Artificial Sequence
  Synthetic Polynucloetide
atggccttaccagtgaccgccttgctcctgccgctggccttgctgctccacgccgccaggccgcaactccagctgcaagagtctggccctggcctggtcaagcctagcgaaacactgagcctgacctgtaccgtgtctggcggctctatcagctccggcagctatttctggggctggatcagacaacctcctggcaaaggactggaatggatcggctccatctactacagcggcatcagctactacaaccccagcctgaagtccagagtgaccatctccgtggacaccagcaagaaccagttctccctgaagctgagcagcgtgacagccgccgataccgccgtgtattattgtgccagacatgacggcgctgtggccggcctgtttgattattggggacagggcaccctggtcaccgtgtcatctgctggcggaggcggaagtggaggcggaggatctggcggcggaggctctagctacgtgctgacacagcctccatccgtgtctgtggctccaggacagaccgccagaatcacatgcggcggcaacaacatcggcagcaagagcgtgcactggtatcagcagccacctggacaggctccagtggtggtggtgtacgacgacagcgatagacctagcggcatccccgagagattcagcggcagcaattccggcaataccgccacactgaccatcagcagagtggaagctggcgacgaggccgtgtactactgccaagtgtgggacagcagcagcgatcacgtggtgtttggcggcggaacaaagctgacagtgcttacgcgtgacggtaacgaggagatgggaggaatcactcaaaccccttacaaagtctcaatttcaggaacaactgttatccttacatgtccccagtatcctggcagcgagatcctttggcagcataacgacaagaatatagggggagatgaagacgataagaatatcggatctgacgaggatcacttgagcctgaaagagttctccgagcttgaacaaagcggatattatgtgtgctatccgcgcgggtcaaagccggaagacgctaacttttacctttatctccgagccagagtgtgcgaaaattgcatggaaatggacgttatgtccgttgctacaatagttatcgtagatatatgcatcacgggtggactgcttctgctggtttattattggtccaagaatagaaaggccaaagctaaacccgtgaccagaggcgctggcgcaggcggaaggcaaaggggacaaaacaaagaacggccaccaccagtgccaaatccagattatgagcctattcggaaaggacagagggacctgtactctggcctgaatcagagaagaatc

SEQ ID NO: 7721 - DNA, 1254 bp, Artificial Sequence
  Synthetic Polynucloetide
atggccttaccagtgaccgccttgctcctgccgctggccttgctgctccacgccgccaggccgcaactccagctgcaagagtctggccctggcctggtcaagcctagcgaaacactgagcctgacctgtaccgtgtctggcggctctatcagctccggcagctatttctggggctggatcagacaacctcctggcaaaggactggaatggatcggctccatctactacagcggcatcagctactacaaccccagcctgaagtccagagtgaccatctccgtggacaccagcaagaaccagttctccctgaagctgagcagcgtgacagccgccgataccgccgtgtattattgtgccagacatgacggcgctgtggccggcctgtttgattattggggacagggcaccctggtcaccgtgtcatctgctggcggaggcggaagtggaggcggaggatctggcggcggaggctctagctacgtgctgacacagcctccatccgtgtctgtggctccaggacagaccgccagaatcacatgcggcggcaacaacatcggcagcaagagcgtgcactggtatcagcagccacctggacaggctccagtggtggtggtgtacgacgacagcgatagacctagcggcatccccgagagattcagcggcagcaattccggcaataccgccacactgaccatcagcagagtggaagctggcgacgaggccgtgtactactgccaagtgtgggacagcagcagcgatcacgtggtgtttggcggcggaacaaagctgacagtgcttacgcgtttcaagatccccatcgaggaactggaagatcgggtgttcgtgaactgcaacacctctatcacctgggtggaaggcaccgtgggaacactgctgagcgacatcaccagactggacctcggcaagcggattctggaccctcggggcatctacagatgcaacggcaccgacatctacaaggacaaagaaagcaccgtgcaggtccactacagaatgtgccagtcctgcgtggaactggaccctgctacagtggccggcatcatcgtgaccgatgtgatcgctactctgctgctggctctgggagtgttctgcttcgccggacacgaaacaggcagactgtctggcgctgccgatacacaggccctgctgagaaacgaccaagtgtatcagcccctgcgcgacagagatgatgcccagtattctcacctcggcggcaactgggctagaaacaag

SEQ ID NO: 7722 - DNA, 1284 bp, Artificial Sequence
  Synthetic Polynucloetide
atggccttaccagtgaccgccttgctcctgccgctggccttgctgctccacgccgccaggccgcaactccagctgcaagagtctggccctggcctggtcaagcctagcgaaacactgagcctgacctgtaccgtgtctggcggctctatcagctccggcagctatttctggggctggatcagacaacctcctggcaaaggactggaatggatcggctccatctactacagcggcatcagctactacaaccccagcctgaagtccagagtgaccatctccgtggacaccagcaagaaccagttctccctgaagctgagcagcgtgacagccgccgataccgccgtgtattattgtgccagacatgacggcgctgtggccggcctgtttgattattggggacagggcaccctggtcaccgtgtcatctgctggcggaggcggaagtggaggcggaggatctggcggcggaggctctagctacgtgctgacacagcctccatccgtgtctgtggctccaggacagaccgccagaatcacatgcggcggcaacaacatcggcagcaagagcgtgcactggtatcagcagccacctggacaggctccagtggtggtggtgtacgacgacagcgatagacctagcggcatccccgagagattcagcggcagcaattccggcaataccgccacactgaccatcagcagagtggaagctggcgacgaggccgtgtactactgccaagtgtgggacagcagcagcgatcacgtggtgtttggcggcggaacaaagctgacagtgcttacgcgtcagagcatcaagggcaaccacctggtcaaggtgtacgactaccaagaggacggcagcgtgctgctgacatgtgatgccgaggccaagaacatcacctggtttaaggacggcaagatgatcggcttcctgaccgaggacaagaagaagtggaacctgggcagcaacgctaaggaccccagaggcatgtatcagtgcaagggcagccagaacaagagcaagcccctccaggtgtactaccggatgtgccagaactgcatcgagctgaacgccgctaccatcagcggctttctgttcgccgagatcgtgtccatcttcgtgctggccgtgggcgtgtactttatcgctggacaggatggcgtgcggcagagcagagcttccgataagcaaaccctgctgcctaacgaccagctgtaccagcctctgaaggacagagaggacgaccagtacagccacctccagggcaatcagctgagaagaaac

SEQ ID NO: 7723 - DNA, 1233 bp, Artificial Sequence
  Synthetic Polynucloetide
atggccttaccagtgaccgccttgctcctgccgctggccttgctgctccacgccgccaggccgcaactccagctgcaagagtctggccctggcctggtcaagcctagcgaaacactgagcctgacctgtaccgtgtctggcggctctatcagctccggcagctatttctggggctggatcagacaacctcctggcaaaggactggaatggatcggctccatctactacagcggcatcagctactacaaccccagcctgaagtccagagtgaccatctccgtggacaccagcaagaaccagttctccctgaagctgagcagcgtgacagccgccgataccgccgtgtattattgtgccagacatgacggcgctgtggccggcctgtttgattattggggacagggcaccctggtcaccgtgtcatctgctggcggaggcggaagtggaggcggaggatctggcggcggaggctctagctacgtgctgacacagcctccatccgtgtctgtggctccaggacagaccgccagaatcacatgcggcggcaacaacatcggcagcaagagcgtgcactggtatcagcagccacctggacaggctccagtggtggtggtgtacgacgacagcgatagacctagcggcatccccgagagattcagcggcagcaattccggcaataccgccacactgaccatcagcagagtggaagctggcgacgaggccgtgtactactgccaagtgtgggacagcagcagcgatcacgtggtgtttggcggcggaacaaagctgacagtgcttacgcgtcagagttttgggttgttggaccctaaattgtgctatctgttggacggaatcctgttcatttacggagtgatcctgaccgcattgttcctgcgggttaagttttccagatccgcagacgcacccgcttaccaacaagggcagaaccaactctacaatgaacttaatttggggcggagggaagagtacgacgttctggacaaaaggaggggacgagatcccgagatgggcggaaagcctcagcgaaggaagaatccgcaagaggggctttataacgaactccagaaagataaaatggcagaagcctatagtgagattgggatgaagggagaaaggaggaggggtaaaggtcacgatgggttgtaccaaggattgagcacagccactaaagatacctatgatgcgctccacatgcaggccctgccgccaaga

SEQ ID NO: 7724 - DNA, 1935 bp, Artificial Sequence
  Synthetic Polynucloetide
atggccttaccagtgaccgccttgctcctgccgctggccttgctgctccacgccgccaggccgagctacgtgctgacacagcctccatccgtgtctgtggctccaggacagaccgccagaatcacatgcggcggcaacaacatcggcagcaagagcgtgcactggtatcagcagccacctggacaggctccagtggtggtggtgtacgacgacagcgatagacctagcggcatccccgagagattcagcggcagcaattccggcaataccgccacactgaccatcagcagagtggaagctggcgacgaggccgtgtactactgccaagtgtgggacagcagcagcgatcacgtggtgtttggcggcggaacaaagctgacagtgcttggcggaggcggaagtggaggcggaggatctggcggcggaggctctcaactccagctgcaagagtctggccctggcctggtcaagcctagcgaaacactgagcctgacctgtaccgtgtctggcggctctatcagctccggcagctatttctggggctggatcagacaacctcctggcaaaggactggaatggatcggctccatctactacagcggcatcagctactacaaccccagcctgaagtccagagtgaccatctccgtggacaccagcaagaaccagttctccctgaagctgagcagcgtgacagccgccgataccgccgtgtattattgtgccagacatgacggcgctgtggccggcctgtttgattattggggacagggcaccctggtcaccgtgtcatctgctacgcgtgggagcggcatccagaaccctgatcctgccgtgtaccagctgcgggatagcaagagcagcgacaagagcgtgtgtctgttcaccgacttcgacagccagaccaacgtgtcccagagcaaggactccgacgtgtacatcaccgataagaccgtgctggacatgcggagcatggacttcaagagcaactccgccgtggcctggtccaacaagtccgatttcgcctgcgccaacgccttcaacaacagcattatccccgaggacacattcttcccaagccccgagagcagctgcgacgtgaagctggtggaaaagagcttcgagacagacaccaacctgaacttccagaacctgagcgtgatcggcttcagaatcctgctgctgaaagtggccggctttaacctgctgatgaccctgcggctgtggtccagccgcgccaagagaagcggatctggcgtgaagcagaccctgaatttcgacctgctgaagctggctggcgacgtggaatccaacccaggcccttctagaggccatatgaccgagtacaagcccacggtgcgcctcgccacccgcgacgacgtccccagggccgtacgcaccctcgccgccgcgttcgccgactaccccgccacgcgccacaccgtcgatccggaccgccacatcgagcgggtcaccgagctgcaagaactcttcctcacgcgcgtcgggctcgacatcggcaaggtgtgggtcgcggacgacggcgccgcggtggcggtctggaccacgccggagagcgtcgaagcgggggcggtgttcgccgagatcggcccgcgcatggccgagttgagcggttcccggctggccgcgcagcaacagatggaaggcctcctggcgccgcaccggcccaaggagcccgcgtggttcctggccaccgtcggcgtctcgcccgaccaccagggcaagggtctgggcagcgccgtcgtgctccccggagtggaggcggccgagcgcgccggggtgcccgccttcctggagacctccgcgccccgcaacctccccttctacgagcggctcggcttcaccgtcaccgccgacgtcgaggtgcccgaaggaccgcgcacctggtgcatgacccgcaagcccggtgcctga

SEQ ID NO: 7725 - DNA, 2031 bp, Artificial Sequence
  Synthetic Polynucloetide
atggccttaccagtgaccgccttgctcctgccgctggccttgctgctccacgccgccaggccgagctacgtgctgacacagcctccatccgtgtctgtggctccaggacagaccgccagaatcacatgcggcggcaacaacatcggcagcaagagcgtgcactggtatcagcagccacctggacaggctccagtggtggtggtgtacgacgacagcgatagacctagcggcatccccgagagattcagcggcagcaattccggcaataccgccacactgaccatcagcagagtggaagctggcgacgaggccgtgtactactgccaagtgtgggacagcagcagcgatcacgtggtgtttggcggcggaacaaagctgacagtgcttggcggaggcggaagtggaggcggaggatctggcggcggaggctctcaactccagctgcaagagtctggccctggcctggtcaagcctagcgaaacactgagcctgacctgtaccgtgtctggcggctctatcagctccggcagctatttctggggctggatcagacaacctcctggcaaaggactggaatggatcggctccatctactacagcggcatcagctactacaaccccagcctgaagtccagagtgaccatctccgtggacaccagcaagaaccagttctccctgaagctgagcagcgtgacagccgccgataccgccgtgtattattgtgccagacatgacggcgctgtggccggcctgtttgattattggggacagggcaccctggtcaccgtgtcatctgctctcgaggacctgaagaacgtgttcccacctgaggtggccgtgttcgagcctagcgaggccgagatcagccacacccagaaagccaccctcgtgtgcctggctaccggcttctaccccgaccatgtggaactgtcttggtgggtcaacggcaaagaggtgcacagcggcgtgtctaccgacccccagccactgaaagaacagcccgccctgaacgacagccggtactgcctgagcagcagactgagagtgtccgccaccttctggcagaacccccggaaccacttcagatgccaggtgcagttctacggcctgagcgagaacgacgagtggacccaggacagagccaagcccgtgacccagatcgtgtctgccgaagcctggggcagagccgattgcggctttaccagcgagagctaccagcagggcgtgctgagcgccaccatcctgtacgagatcctgctgggcaaggccaccctgtacgccgtgctggtgtctgccctggtgctgatggctatggtcaagcggaaggacagccggggaagggccaagcgatctggatctggagcaacaaacttctcactactcaaacaagcaggtgacgtggaggagaatcccgggcctactagaggccatatgaccgagtacaagcccacggtgcgcctcgccacccgcgacgacgtccccagggccgtacgcaccctcgccgccgcgttcgccgactaccccgccacgcgccacaccgtcgatccggaccgccacatcgagcgggtcaccgagctgcaagaactcttcctcacgcgcgtcgggctcgacatcggcaaggtgtgggtcgcggacgacggcgccgcggtggcggtctggaccacgccggagagcgtcgaagcgggggcggtgttcgccgagatcggcccgcgcatggccgagttgagcggttcccggctggccgcgcagcaacagatggaaggcctcctggcgccgcaccggcccaaggagcccgcgtggttcctggccaccgtcggcgtctcgcccgaccaccagggcaagggtctgggcagcgccgtcgtgctccccggagtggaggcggccgagcgcgccggggtgcccgccttcctggagacctccgcgccccgcaacctccccttctacgagcggctcggcttcaccgtcaccgccgacgtcgaggtgcccgaaggaccgcgcacctggtgcatgacccgcaagcccggtgcctga

SEQ ID NO: 7726 - DNA, 2181 bp, Artificial Sequence
  Synthetic Polynucloetide
atggccttaccagtgaccgccttgctcctgccgctggccttgctgctccacgccgccaggccgagctacgtgctgacacagcctccatccgtgtctgtggctccaggacagaccgccagaatcacatgcggcggcaacaacatcggcagcaagagcgtgcactggtatcagcagccacctggacaggctccagtggtggtggtgtacgacgacagcgatagacctagcggcatccccgagagattcagcggcagcaattccggcaataccgccacactgaccatcagcagagtggaagctggcgacgaggccgtgtactactgccaagtgtgggacagcagcagcgatcacgtggtgtttggcggcggaacaaagctgacagtgcttggcggaggcggaagtggaggcggaggatctggcggcggaggctctcaactccagctgcaagagtctggccctggcctggtcaagcctagcgaaacactgagcctgacctgtaccgtgtctggcggctctatcagctccggcagctatttctggggctggatcagacaacctcctggcaaaggactggaatggatcggctccatctactacagcggcatcagctactacaaccccagcctgaagtccagagtgaccatctccgtggacaccagcaagaaccagttctccctgaagctgagcagcgtgacagccgccgataccgccgtgtattattgtgccagacatgacggcgctgtggccggcctgtttgattattggggacagggcaccctggtcaccgtgtcatctgctacgcgtgagcagaaactgatctcggaagaggatctggggagcggcaccccattcccttctctggcccctcccatcatgctgctggtggacggcaagcagcagatggtggtcgtgtgcctggtgctggatgtggccccacctggactggacagccccatctggtttagcgccggcaatggctctgccctggacgcctttacctacggcccaagccctgccaccgatggcacctggacaaatctggcccacctgagcctgcccagcgaggaactggcttcttgggagcctctcgtgtgccacacaggacctggcgctgagggacacagcagatccacccagcctatgcacctgtctggcgaggccagcaccgccagaacctgtcctcaggaacctctgagaggcacccctggcggagcactgtggctgggagtgctgagactgctgctgttcaagctgctgctgtttgacctgctgctgacctgctcctgtctgtgcgatcctgccggccctctgccttctcctgccaccaccacaagactgagagccctgggcagccacagactgcaccctgccacagagacaggcggcagagaggccacaagcagccctagaccccagcccagagacagaagatggggcgataccccccctggcagaaagcctggatctccagtccgcgccaagagaagcggatctggcgtgaagcagaccctgaatttcgacctgctgaagctggctggcgacgtggaatccaacccaggcccttctagatctagaggccatatgaccgagtacaagcccacggtgcgcctcgccacccgcgacgacgtccccagggccgtacgcaccctcgccgccgcgttcgccgactaccccgccacgcgccacaccgtcgatccggaccgccacatcgagcgggtcaccgagctgcaagaactcttcctcacgcgcgtcgggctcgacatcggcaaggtgtgggtcgcggacgacggcgccgcggtggcggtctggaccacgccggagagcgtcgaagcgggggcggtgttcgccgagatcggcccgcgcatggccgagttgagcggttcccggctggccgcgcagcaacagatggaaggcctcctggcgccgcaccggcccaaggagcccgcgtggttcctggccaccgtcggcgtctcgcccgaccaccagggcaagggtctgggcagcgccgtcgtgctccccggagtggaggcggccgagcgcgccggggtgcccgccttcctggagacctccgcgccccgcaacctccccttctacgagcggctcggcttcaccgtcaccgccgacgtcgaggtgcccgaaggaccgcgcacctggtgcatgacccgcaagcccggtgcctga

SEQ ID NO: 7727 - DNA, 1620 bp, Artificial Sequence; identical to SEQ ID NO: 7451
  Synthetic Polynucloetide

SEQ ID NO: 7728 - DNA, 927 bp, Artificial Sequence; identical to SEQ ID NO: 7452
  Synthetic Polynucloetide

SEQ ID NO: 7729 - DNA, 1356 bp, Artificial Sequence
  Synthetic Polynucloetide
atggactggatttggcgcatccttttccttgtcggcgctgctaccggcgcgcattccttcgaacaactccagctgcaagagtctggccctggcctggtcaagcctagcgaaacactgagcctgacctgtaccgtgtctggcggctctatcagctccggcagctatttctggggctggatcagacaacctcctggcaaaggactggaatggatcggctccatctactacagcggcatcagctactacaaccccagcctgaagtccagagtgaccatctccgtggacaccagcaagaaccagttctccctgaagctgagcagcgtgacagccgccgataccgccgtgtattattgtgccagacatgacggcgctgtggccggcctgtttgattattggggacagggcaccctggtcaccgtgtcatctgctacgcgtatccagaaccctgatcctgccgtgtaccagctgcgggatagcaagagcagcgacaagagcgtgtgtctgttcaccgacttcgacagccagaccaacgtgtcccagagcaaggactccgacgtgtacatcaccgataagaccgtgctggacatgcggagcatggacttcaagagcaactccgccgtggcctggtccaacaagtccgatttcgcctgcgccaacgccttcaacaacagcattatccccgaggacacattcttcccaagccccgagagcagctgcgacgtgaagctggtggaaaagagcttcgagacagacaccaacctgaacttccagaacctgagcgtgatcggcttcagaatcctgctgctgaaagtggccggctttaacctgctgatgaccctgcggctgtggtccagccgcgccaagagaagcggatctggcgtgaagcagaccctgaatttcgacctgctgaagctggctggcgacgtggaatccaacccaggcccttctagaggccatatggccaagcctttgtctcaagaagaatccaccctcattgaaagagcaacggctacaatcaacagcatccccatctctgaagactacagcgtcgccagcgcagctctctctagcgacggccgcatcttcactggtgtcaatgtatatcattttactgggggaccttgtgcagaactcgtggtgctgggcactgctgctgctgcggcagctggcaacctgacttgtatcgtcgcgatcggaaatgagaacaggggcatcttgagcccctgcggacggtgccgacaggtgcttctcgatctgcatcctgggatcaaagccatagtgaaggacagtgatggacagccgacggcagttgggattcgtgaattgctgccctctggttatgtgtgggagggctga

SEQ ID NO: 7730 - DNA, 855 bp, Artificial Sequence
  Synthetic Polynucloetide
atggactggatttggcgcatccttttccttgtcggcgctgctaccggcgcgcattccttcgaacaactccagctgcaagagtctggccctggcctggtcaagcctagcgaaacactgagcctgacctgtaccgtgtctggcggctctatcagctccggcagctatttctggggctggatcagacaacctcctggcaaaggactggaatggatcggctccatctactacagcggcatcagctactacaaccccagcctgaagtccagagtgaccatctccgtggacaccagcaagaaccagttctccctgaagctgagcagcgtgacagccgccgataccgccgtgtattattgtgccagacatgacggcgctgtggccggcctgtttgattattggggacagggcaccctggtcaccgtgtcatctgctacgcgtatccagaaccctgatcctgccgtgtaccagctgcgggatagcaagagcagcgacaagagcgtgtgtctgttcaccgacttcgacagccagaccaacgtgtcccagagcaaggactccgacgtgtacatcaccgataagaccgtgctggacatgcggagcatggacttcaagagcaactccgccgtggcctggtccaacaagtccgatttcgcctgcgccaacgccttcaacaacagcattatccccgaggacacattcttcccaagccccgagagcagctgcgacgtgaagctggtggaaaagagcttcgagacagacaccaacctgaacttccagaacctgagcgtgatcggcttcagaatcctgctgctgaaagtggccggctttaacctgctgatgaccctgcggctgtggtccagc

SEQ ID NO: 7731 - DNA, 1674 bp, Artificial Sequence; identical to SEQ ID NO: 7455
  Synthetic Polynucloetide

SEQ ID NO: 7732 - DNA, 984 bp, Artificial Sequence; identical to SEQ ID NO: 7456
  Synthetic Polynucloetide

SEQ ID NO: 7733 - DNA, 1392 bp, Artificial Sequence
  Synthetic Polynucloetide
atggactggatttggcgcatccttttccttgtcggcgctgctaccggcgcgcattccttcgaacaactccagctgcaagagtctggccctggcctggtcaagcctagcgaaacactgagcctgacctgtaccgtgtctggcggctctatcagctccggcagctatttctggggctggatcagacaacctcctggcaaaggactggaatggatcggctccatctactacagcggcatcagctactacaaccccagcctgaagtccagagtgaccatctccgtggacaccagcaagaaccagttctccctgaagctgagcagcgtgacagccgccgataccgccgtgtattattgtgccagacatgacggcgctgtggccggcctgtttgattattggggacagggcaccctggtcaccgtgtcatctgctacgcgtgagcagaaactgatctcggaagaggatgggagcggcatccagaaccctgatcctgccgtgtaccagctgcgggatagcaagagcagcgacaagagcgtgtgtctgttcaccgacttcgacagccagaccaacgtgtcccagagcaaggactccgacgtgtacatcaccgataagtgcgtgctggacatgcggagcatggacttcaagagcaactccgccgtggcctggtccaacaagtccgatttcgcctgcgccaacgccttcaacaacagcattatccccgaggacacattcttcccaagccccgagagcagctgcgacgtgaagctggtggaaaagagcttcgagacagacaccaacctgaacttccagaacctgagcgtgatcggcttcagaatcctgctgctgaaagtggccggctttaacctgctgatgaccctgcggctgtggtccagccgcgccaagagaagcggatctggcgtgaagcagaccctgaatttcgacctgctgaagctggctggcgacgtggaatccaacccaggcccttctagaggccatatggccaagcctttgtctcaagaagaatccaccctcattgaaagagcaacggctacaatcaacagcatccccatctctgaagactacagcgtcgccagcgcagctctctctagcgacggccgcatcttcactggtgtcaatgtatatcattttactgggggaccttgtgcagaactcgtggtgctgggcactgctgctgctgcggcagctggcaacctgacttgtatcgtcgcgatcggaaatgagaacaggggcatcttgagcccctgcggacggtgccgacaggtgcttctcgatctgcatcctgggatcaaagccatagtgaaggacagtgatggacagccgacggcagttgggattcgtgaattgctgccctctggttatgtgtgggagggctga

SEQ ID NO: 7734 - DNA, 894 bp, Artificial Sequence
  Synthetic Polynucloetide
atggactggatttggcgcatccttttccttgtcggcgctgctaccggcgcgcattccttcgaacaactccagctgcaagagtctggccctggcctggtcaagcctagcgaaacactgagcctgacctgtaccgtgtctggcggctctatcagctccggcagctatttctggggctggatcagacaacctcctggcaaaggactggaatggatcggctccatctactacagcggcatcagctactacaaccccagcctgaagtccagagtgaccatctccgtggacaccagcaagaaccagttctccctgaagctgagcagcgtgacagccgccgataccgccgtgtattattgtgccagacatgacggcgctgtggccggcctgtttgattattggggacagggcaccctggtcaccgtgtcatctgctacgcgtgagcagaaactgatctcggaagaggatgggagcggcatccagaaccctgatcctgccgtgtaccagctgcgggatagcaagagcagcgacaagagcgtgtgtctgttcaccgacttcgacagccagaccaacgtgtcccagagcaaggactccgacgtgtacatcaccgataagtgcgtgctggacatgcggagcatggacttcaagagcaactccgccgtggcctggtccaacaagtccgatttcgcctgcgccaacgccttcaacaacagcattatccccgaggacacattcttcccaagccccgagagcagctgcgacgtgaagctggtggaaaagagcttcgagacagacaccaacctgaacttccagaacctgagcgtgatcggcttcagaatcctgctgctgaaagtggccggctttaacctgctgatgaccctgcggctgtggtccagctga

SEQ ID NO: 7735 - DNA, 1935 bp, Artificial Sequence
  Synthetic Polynucloetide
atggccttaccagtgaccgccttgctcctgccgctggccttgctgctccacgccgccaggccgagctacgtgctgacacagcctccatccgtgtctgtggctccaggacagaccgccagaatcacatgcggcggcaacaacatcggcagcaagagcgtgcactggtatcagcagccacctggacaggctccagtggtggtggtgtacgacgacagcgatagacctagcggcatccccgagagattcagcggcagcaattccggcaataccgccacactgaccatcagcagagtggaagctggcgacgaggccgtgtactactgccaagtgtgggacagcagcagcgatcacgtggtgtttggcggcggaacaaagctgacagtgcttggcggaggcggaagtggaggcggaggatctggcggcggaggctctcaactccagctgcaagagtctggccctggcctggtcaagcctagcgaaacactgagcctgacctgtaccgtgtctggcggctctatcagctccggcagctatttctggggctggatcagacaacctcctggcaaaggactggaatggatcggctccatctactacagcggcatcagctactacaaccccagcctgaagtccagagtgaccatctccgtggacaccagcaagaaccagttctccctgaagctgagcagcgtgacagccgccgataccgccgtgtattattgtgccagacatgacggcgctgtggccggcctgtttgattattggggacagggcaccctggtcaccgtgtcatctgctacgcgtgggagcggcatccagaaccctgatcctgccgtgtaccagctgcgggatagcaagagcagcgacaagagcgtgtgtctgttcaccgacttcgacagccagaccaacgtgtcccagagcaaggactccgacgtgtacatcaccgataagaccgtgctggacatgcggagcatggacttcaagagcaactccgccgtggcctggtccaacaagtccgatttcgcctgcgccaacgccttcaacaacagcattatccccgaggacacattcttcccaagcagcgacgtgccctgcgacgtgaagctggtggaaaagagcttcgagacagacaccaacctgaacttccagaacctgagcgtgatcggcttcagaatcctgctgctgaaagtggccggctttaacctgctgatgaccctgcggctgtggtccagccgcgccaagagaagcggatctggcgtgaagcagaccctgaatttcgacctgctgaagctggctggcgacgtggaatccaacccaggcccttctagaggccatatgaccgagtacaagcccacggtgcgcctcgccacccgcgacgacgtccccagggccgtacgcaccctcgccgccgcgttcgccgactaccccgccacgcgccacaccgtcgatccggaccgccacatcgagcgggtcaccgagctgcaagaactcttcctcacgcgcgtcgggctcgacatcggcaaggtgtgggtcgcggacgacggcgccgcggtggcggtctggaccacgccggagagcgtcgaagcgggggcggtgttcgccgagatcggcccgcgcatggccgagttgagcggttcccggctggccgcgcagcaacagatggaaggcctcctggcgccgcaccggcccaaggagcccgcgtggttcctggccaccgtcggcgtctcgcccgaccaccagggcaagggtctgggcagcgccgtcgtgctccccggagtggaggcggccgagcgcgccggggtgcccgccttcctggagacctccgcgccccgcaacctccccttctacgagcggctcggcttcaccgtcaccgccgacgtcgaggtgcccgaaggaccgcgcacctggtgcatgacccgcaagcccggtgcctga

SEQ ID NO: 7736 - DNA, 2031 bp, Artificial Sequence
  Synthetic Polynucloetide
atggccttaccagtgaccgccttgctcctgccgctggccttgctgctccacgccgccaggccgagctacgtgctgacacagcctccatccgtgtctgtggctccaggacagaccgccagaatcacatgcggcggcaacaacatcggcagcaagagcgtgcactggtatcagcagccacctggacaggctccagtggtggtggtgtacgacgacagcgatagacctagcggcatccccgagagattcagcggcagcaattccggcaataccgccacactgaccatcagcagagtggaagctggcgacgaggccgtgtactactgccaagtgtgggacagcagcagcgatcacgtggtgtttggcggcggaacaaagctgacagtgcttggcggaggcggaagtggaggcggaggatctggcggcggaggctctcaactccagctgcaagagtctggccctggcctggtcaagcctagcgaaacactgagcctgacctgtaccgtgtctggcggctctatcagctccggcagctatttctggggctggatcagacaacctcctggcaaaggactggaatggatcggctccatctactacagcggcatcagctactacaaccccagcctgaagtccagagtgaccatctccgtggacaccagcaagaaccagttctccctgaagctgagcagcgtgacagccgccgataccgccgtgtattattgtgccagacatgacggcgctgtggccggcctgtttgattattggggacagggcaccctggtcaccgtgtcatctgctctcgaggacctgaagaacgtgttcccacctgaggtggccgtgttcgagcctagcaaggccgagatcgcccacacccagaaagccaccctcgtgtgcctggctaccggcttctaccccgaccatgtggaactgtcttggtgggtcaacggcaaagaggtgcacagcggcgtgtctaccgacccccagccactgaaagaacagcccgccctgaacgacagccggtactgcctgagcagcagactgagagtgtccgccaccttctggcagaacccccggaaccacttcagatgccaggtgcagttctacggcctgagcgagaacgacgagtggacccaggacagagccaagcccgtgacccagatcgtgtctgccgaagcctggggcagagccgattgcggcatcaccagcgccagctaccaccagggcgtgctgagcgccaccatcctgtacgagatcctgctgggcaaggccaccctgtacgccgtgctggtgtctgccctggtgctgatggctatggtcaagcggaaggacagccggggaagggccaagcgatctggatctggagcaacaaacttctcactactcaaacaagcaggtgacgtggaggagaatcccgggcctactagaggccatatgaccgagtacaagcccacggtgcgcctcgccacccgcgacgacgtccccagggccgtacgcaccctcgccgccgcgttcgccgactaccccgccacgcgccacaccgtcgatccggaccgccacatcgagcgggtcaccgagctgcaagaactcttcctcacgcgcgtcgggctcgacatcggcaaggtgtgggtcgcggacgacggcgccgcggtggcggtctggaccacgccggagagcgtcgaagcgggggcggtgttcgccgagatcggcccgcgcatggccgagttgagcggttcccggctggccgcgcagcaacagatggaaggcctcctggcgccgcaccggcccaaggagcccgcgtggttcctggccaccgtcggcgtctcgcccgaccaccagggcaagggtctgggcagcgccgtcgtgctccccggagtggaggcggccgagcgcgccggggtgcccgccttcctggagacctccgcgccccgcaacctccccttctacgagcggctcggcttcaccgtcaccgccgacgtcgaggtgcccgaaggaccgcgcacctggtgcatgacccgcaagcccggtgcctga

SEQ ID NO: 7737 - DNA, 2100 bp, Artificial Sequence
  Synthetic Polynucloetide
atggccttaccagtgaccgccttgctcctgccgctggccttgctgctccacgccgccaggccgagctacgtgctgacacagcctccatccgtgtctgtggctccaggacagaccgccagaatcacatgcggcggcaacaacatcggcagcaagagcgtgcactggtatcagcagccacctggacaggctccagtggtggtggtgtacgacgacagcgatagacctagcggcatccccgagagattcagcggcagcaattccggcaataccgccacactgaccatcagcagagtggaagctggcgacgaggccgtgtactactgccaagtgtgggacagcagcagcgatcacgtggtgtttggcggcggaacaaagctgacagtgcttggcggaggcggaagtggaggcggaggatctggcggcggaggctctcaactccagctgcaagagtctggccctggcctggtcaagcctagcgaaacactgagcctgacctgtaccgtgtctggcggctctatcagctccggcagctatttctggggctggatcagacaacctcctggcaaaggactggaatggatcggctccatctactacagcggcatcagctactacaaccccagcctgaagtccagagtgaccatctccgtggacaccagcaagaaccagttctccctgaagctgagcagcgtgacagccgccgataccgccgtgtattattgtgccagacatgacggcgctgtggccggcctgtttgattattggggacagggcaccctggtcaccgtgtcatctgctacgcgtgggtctggaggcggaggcagcggcggaggcgggagcggcgacggtaacgaggagatgggaggaatcactcaaaccccttacaaagtctcaatttcaggaacaactgttatccttacatgtccccagtatcctggcagcgagatcctttggcagcataacgacaagaatatagggggagatgaagacgataagaatatcggatctgacgaggatcacttgagcctgaaagagttctccgagcttgaacaaagcggatattatgtgtgctatccgcgcgggtcaaagccggaagacgctaacttttacctttatctccgagccagagtgtgcgaaaattgcatggaaatggacgttatgtccgttgctacaatagttatcgtagatatatgcatcacgggtggactgcttctgctggtttattattggtccaagaatagaaaggccaaagctaaacccgtgaccagaggcgctggcgcaggcggaaggcaaaggggacaaaacaaagaacggccaccaccagtgccaaatccagattatgagcctattcggaaaggacagagggacctgtactctggcctgaatcagagaagaatccgcgccaagagaagcggatctggcgtgaagcagaccctgaatttcgacctgctgaagctggctggcgacgtggaatccaacccaggcccttctagaggccatatgaccgagtacaagcccacggtgcgcctcgccacccgcgacgacgtccccagggccgtacgcaccctcgccgccgcgttcgccgactaccccgccacgcgccacaccgtcgatccggaccgccacatcgagcgggtcaccgagctgcaagaactcttcctcacgcgcgtcgggctcgacatcggcaaggtgtgggtcgcggacgacggcgccgcggtggcggtctggaccacgccggagagcgtcgaagcgggggcggtgttcgccgagatcggcccgcgcatggccgagttgagcggttcccggctggccgcgcagcaacagatggaaggcctcctggcgccgcaccggcccaaggagcccgcgtggttcctggccaccgtcggcgtctcgcccgaccaccagggcaagggtctgggcagcgccgtcgtgctccccggagtggaggcggccgagcgcgccggggtgcccgccttcctggagacctccgcgccccgcaacctccccttctacgagcggctcggcttcaccgtcaccgccgacgtcgaggtgcccgaaggaccgcgcacctggtgcatgacccgcaagcccggtgcctga

SEQ ID NO: 7738 - DNA, 1995 bp, Artificial Sequence
  Synthetic Polynucloetide
atggccttaccagtgaccgccttgctcctgccgctggccttgctgctccacgccgccaggccgagctacgtgctgacacagcctccatccgtgtctgtggctccaggacagaccgccagaatcacatgcggcggcaacaacatcggcagcaagagcgtgcactggtatcagcagccacctggacaggctccagtggtggtggtgtacgacgacagcgatagacctagcggcatccccgagagattcagcggcagcaattccggcaataccgccacactgaccatcagcagagtggaagctggcgacgaggccgtgtactactgccaagtgtgggacagcagcagcgatcacgtggtgtttggcggcggaacaaagctgacagtgcttggcggaggcggaagtggaggcggaggatctggcggcggaggctctcaactccagctgcaagagtctggccctggcctggtcaagcctagcgaaacactgagcctgacctgtaccgtgtctggcggctctatcagctccggcagctatttctggggctggatcagacaacctcctggcaaaggactggaatggatcggctccatctactacagcggcatcagctactacaaccccagcctgaagtccagagtgaccatctccgtggacaccagcaagaaccagttctccctgaagctgagcagcgtgacagccgccgataccgccgtgtattattgtgccagacatgacggcgctgtggccggcctgtttgattattggggacagggcaccctggtcaccgtgtcatctgctacgcgtgggtctggaggcggaggcagcggcggaggcgggagcggcttcaagatccccatcgaggaactggaagatcgggtgttcgtgaactgcaacacctctatcacctgggtggaaggcaccgtgggaacactgctgagcgacatcaccagactggacctcggcaagcggattctggaccctcggggcatctacagatgcaacggcaccgacatctacaaggacaaagaaagcaccgtgcaggtccactacagaatgtgccagtcctgcgtggaactggaccctgctacagtggccggcatcatcgtgaccgatgtgatcgctactctgctgctggctctgggagtgttctgcttcgccggacacgaaacaggcagactgtctggcgctgccgatacacaggccctgctgagaaacgaccaagtgtatcagcccctgcgcgacagagatgatgcccagtattctcacctcggcggcaactgggctagaaacaagcgcgccaagagaagcggatctggcgtgaagcagaccctgaatttcgacctgctgaagctggctggcgacgtggaatccaacccaggcccttctagaggccatatgaccgagtacaagcccacggtgcgcctcgccacccgcgacgacgtccccagggccgtacgcaccctcgccgccgcgttcgccgactaccccgccacgcgccacaccgtcgatccggaccgccacatcgagcgggtcaccgagctgcaagaactcttcctcacgcgcgtcgggctcgacatcggcaaggtgtgggtcgcggacgacggcgccgcggtggcggtctggaccacgccggagagcgtcgaagcgggggcggtgttcgccgagatcggcccgcgcatggccgagttgagcggttcccggctggccgcgcagcaacagatggaaggcctcctggcgccgcaccggcccaaggagcccgcgtggttcctggccaccgtcggcgtctcgcccgaccaccagggcaagggtctgggcagcgccgtcgtgctccccggagtggaggcggccgagcgcgccggggtgcccgccttcctggagacctccgcgccccgcaacctccccttctacgagcggctcggcttcaccgtcaccgccgacgtcgaggtgcccgaaggaccgcgcacctggtgcatgacccgcaagcccggtgcctga

SEQ ID NO: 7739 - DNA, 2025 bp, Artificial Sequence
  Synthetic Polynucloetide
atggccttaccagtgaccgccttgctcctgccgctggccttgctgctccacgccgccaggccgagctacgtgctgacacagcctccatccgtgtctgtggctccaggacagaccgccagaatcacatgcggcggcaacaacatcggcagcaagagcgtgcactggtatcagcagccacctggacaggctccagtggtggtggtgtacgacgacagcgatagacctagcggcatccccgagagattcagcggcagcaattccggcaataccgccacactgaccatcagcagagtggaagctggcgacgaggccgtgtactactgccaagtgtgggacagcagcagcgatcacgtggtgtttggcggcggaacaaagctgacagtgcttggcggaggcggaagtggaggcggaggatctggcggcggaggctctcaactccagctgcaagagtctggccctggcctggtcaagcctagcgaaacactgagcctgacctgtaccgtgtctggcggctctatcagctccggcagctatttctggggctggatcagacaacctcctggcaaaggactggaatggatcggctccatctactacagcggcatcagctactacaaccccagcctgaagtccagagtgaccatctccgtggacaccagcaagaaccagttctccctgaagctgagcagcgtgacagccgccgataccgccgtgtattattgtgccagacatgacggcgctgtggccggcctgtttgattattggggacagggcaccctggtcaccgtgtcatctgctacgcgtgggtctggaggcggaggcagcggcggaggcgggagcggccagagcatcaagggcaaccacctggtcaaggtgtacgactaccaagaggacggcagcgtgctgctgacatgtgatgccgaggccaagaacatcacctggtttaaggacggcaagatgatcggcttcctgaccgaggacaagaagaagtggaacctgggcagcaacgctaaggaccccagaggcatgtatcagtgcaagggcagccagaacaagagcaagcccctccaggtgtactaccggatgtgccagaactgcatcgagctgaacgccgctaccatcagcggctttctgttcgccgagatcgtgtccatcttcgtgctggccgtgggcgtgtactttatcgctggacaggatggcgtgcggcagagcagagcttccgataagcaaaccctgctgcctaacgaccagctgtaccagcctctgaaggacagagaggacgaccagtacagccacctccagggcaatcagctgagaagaaaccgcgccaagagaagcggatctggcgtgaagcagaccctgaatttcgacctgctgaagctggctggcgacgtggaatccaacccaggcccttctagaggccatatgaccgagtacaagcccacggtgcgcctcgccacccgcgacgacgtccccagggccgtacgcaccctcgccgccgcgttcgccgactaccccgccacgcgccacaccgtcgatccggaccgccacatcgagcgggtcaccgagctgcaagaactcttcctcacgcgcgtcgggctcgacatcggcaaggtgtgggtcgcggacgacggcgccgcggtggcggtctggaccacgccggagagcgtcgaagcgggggcggtgttcgccgagatcggcccgcgcatggccgagttgagcggttcccggctggccgcgcagcaacagatggaaggcctcctggcgccgcaccggcccaaggagcccgcgtggttcctggccaccgtcggcgtctcgcccgaccaccagggcaagggtctgggcagcgccgtcgtgctccccggagtggaggcggccgagcgcgccggggtgcccgccttcctggagacctccgcgccccgcaacctccccttctacgagcggctcggcttcaccgtcaccgccgacgtcgaggtgcccgaaggaccgcgcacctggtgcatgacccgcaagcccggtgcctga

SEQ ID NO: 7740 - DNA, 1974 bp, Artificial Sequence
  Synthetic Polynucloetide
atggccttaccagtgaccgccttgctcctgccgctggccttgctgctccacgccgccaggccgagctacgtgctgacacagcctccatccgtgtctgtggctccaggacagaccgccagaatcacatgcggcggcaacaacatcggcagcaagagcgtgcactggtatcagcagccacctggacaggctccagtggtggtggtgtacgacgacagcgatagacctagcggcatccccgagagattcagcggcagcaattccggcaataccgccacactgaccatcagcagagtggaagctggcgacgaggccgtgtactactgccaagtgtgggacagcagcagcgatcacgtggtgtttggcggcggaacaaagctgacagtgcttggcggaggcggaagtggaggcggaggatctggcggcggaggctctcaactccagctgcaagagtctggccctggcctggtcaagcctagcgaaacactgagcctgacctgtaccgtgtctggcggctctatcagctccggcagctatttctggggctggatcagacaacctcctggcaaaggactggaatggatcggctccatctactacagcggcatcagctactacaaccccagcctgaagtccagagtgaccatctccgtggacaccagcaagaaccagttctccctgaagctgagcagcgtgacagccgccgataccgccgtgtattattgtgccagacatgacggcgctgtggccggcctgtttgattattggggacagggcaccctggtcaccgtgtcatctgctacgcgtgggtctggaggcggaggcagcggcggaggcgggagcggccagagttttgggttgttggaccctaaattgtgctatctgttggacggaatcctgttcatttacggagtgatcctgaccgcattgttcctgcgggttaagttttccagatccgcagacgcacccgcttaccaacaagggcagaaccaactctacaatgaacttaatttggggcggagggaagagtacgacgttctggacaaaaggaggggacgagatcccgagatgggcggaaagcctcagcgaaggaagaatccgcaagaggggctttataacgaactccagaaagataaaatggcagaagcctatagtgagattgggatgaagggagaaaggaggaggggtaaaggtcacgatgggttgtaccaaggattgagcacagccactaaagatacctatgatgcgctccacatgcaggccctgccgccaagacgcgccaagagaagcggatctggcgtgaagcagaccctgaatttcgacctgctgaagctggctggcgacgtggaatccaacccaggcccttctagaggccatatgaccgagtacaagcccacggtgcgcctcgccacccgcgacgacgtccccagggccgtacgcaccctcgccgccgcgttcgccgactaccccgccacgcgccacaccgtcgatccggaccgccacatcgagcgggtcaccgagctgcaagaactcttcctcacgcgcgtcgggctcgacatcggcaaggtgtgggtcgcggacgacggcgccgcggtggcggtctggaccacgccggagagcgtcgaagcgggggcggtgttcgccgagatcggcccgcgcatggccgagttgagcggttcccggctggccgcgcagcaacagatggaaggcctcctggcgccgcaccggcccaaggagcccgcgtggttcctggccaccgtcggcgtctcgcccgaccaccagggcaagggtctgggcagcgccgtcgtgctccccggagtggaggcggccgagcgcgccggggtgcccgccttcctggagacctccgcgccccgcaacctccccttctacgagcggctcggcttcaccgtcaccgccgacgtcgaggtgcccgaaggaccgcgcacctggtgcatgacccgcaagcccggtgcctga

SEQ ID NO: 7741 - DNA, 2274 bp, Artificial Sequence
  Synthetic Polynucloetide
atggccttaccagtgaccgccttgctcctgccgctggccttgctgctccacgccgccaggccggaagtgcagctggttgaatctggcggaggactggttcagcctggcggatctctgagactgtcttgtgccgccagcggcttcagcttcagcgacttttggatgagctgggtccgacaggcccctggcaaaggacttgaatgggtcgccacaatcagccaggccggcagcgagaaggactacgtggactctgtgaagggcagattcaccatcagccgggacaacgccaagaagtccctgtacctccagatgaacagcctgagagccgaggacaccgccgtgtactattgtgcctctggcgtgtacagcttcgactacagaggccagggcaccctggtcacagtctcttctggtaccggcggaggcggatctggcggcggaggtagcggtggcggaggatctgaattcagctacgtgctgacacagcctccatccgtgtctgtggctccaggacagaccgccagaatcacatgcggcggcaacaacatcggcagcaagagcgtgcactggtatcagcagccacctggacaggctccagtggtggtggtgtacgacgacagcgatagacctagcggcatccccgagagattcagcggcagcaattccggcaataccgccacactgaccatcagcagagtggaagctggcgacgaggccgtgtactactgccaagtgtgggacagcagcagcgatcacgtggtgtttggcggcggaacaaagctgacagtgcttctcgaggacctgaagaacgtgttcccacctgaggtggccgtgttcgagcctagcgaggccgagatcagccacacccagaaagccaccctcgtgtgcctggctaccggcttctaccccgaccatgtggaactgtcttggtgggtcaacggcaaagaggtgcacagcggcgtgtgtaccgacccccagccactgaaagaacagcccgccctgaacgacagccggtactgcctgagcagcagactgagagtgtccgccaccttctggcagaacccccggaaccacttcagatgccaggtgcagttctacggcctgagcgagaacgacgagtggacccaggacagagccaagcccgtgacccagatcgtgtctgccgaagcctggggcagagccgattgcggctttaccagcgagagctaccagcagggcgtgctgagcgccaccatcctgtacgagatcctgctgggcaaggccaccctgtacgccgtgctggtgtctgccctggtgctgatggctatggtcaagcggaaggacagccggggaagggccaagcgatctggatctggagcaacaaacttctcactactcaaacaagcaggtgacgtggaggagaatcccgggcctactagtatggactggatttggcgcatccttttccttgtcggcgctgctaccggcgcgcattccttcgaacaactccagctgcaagagtctggccctggcctggtcaagcctagcgaaacactgagcctgacctgtaccgtgtctggcggctctatcagctccggcagctatttctggggctggatcagacaacctcctggcaaaggactggaatggatcggctccatctactacagcggcatcagctactacaaccccagcctgaagtccagagtgaccatctccgtggacaccagcaagaaccagttctccctgaagctgagcagcgtgacagccgccgataccgccgtgtattattgtgccagacatgacggcgctgtggccggcctgtttgattattggggacagggcaccctggtcaccgtgtcatctgctacgcgtatccagaaccctgatcctgccgtgtaccagctgcgggatagcaagagcagcgacaagagcgtgtgtctgttcaccgacttcgacagccagaccaacgtgtcccagagcaaggactccgacgtgtacatcaccgataagtgcgtgctggacatgcggagcatggacttcaagagcaactccgccgtggcctggtccaacaagtccgatttcgcctgcgccaacgccttcaacaacagcattatccccgaggacacattcttcccaagccccgagagcagctgcgacgtgaagctggtggaaaagagcttcgagacagacaccaacctgaacttccagaacctgagcgtgatcggcttcagaatcctgctgctgaaagtggccggctttaacctgctgatgaccctgcggctgtggtccagc

SEQ ID NO: 7742 - DNA, 2286 bp, Artificial Sequence
  Synthetic Polynucloetide
atggccttaccagtgaccgccttgctcctgccgctggccttgctgctccacgccgccaggccggaagtgcagctggttgaatctggcggaggactggttcagcctggcggatctctgagactgtcttgtgccgccagcggcttcagcttcagcgacttttggatgagctgggtccgacaggcccctggcaaaggacttgaatgggtcgccacaatcagccaggccggcagcgagaaggactacgtggactctgtgaagggcagattcaccatcagccgggacaacgccaagaagtccctgtacctccagatgaacagcctgagagccgaggacaccgccgtgtactattgtgcctctggcgtgtacagcttcgactacagaggccagggcaccctggtcacagtctcttctggtaccggcggaggcggatctggcggcggaggtagcggtggcggaggatctgaattcagctacgtgctgacacagcctccatccgtgtctgtggctccaggacagaccgccagaatcacatgcggcggcaacaacatcggcagcaagagcgtgcactggtatcagcagccacctggacaggctccagtggtggtggtgtacgacgacagcgatagacctagcggcatccccgagagattcagcggcagcaattccggcaataccgccacactgaccatcagcagagtggaagctggcgacgaggccgtgtactactgccaagtgtgggacagcagcagcgatcacgtggtgtttggcggcggaacaaagctgacagtgcttctcgagatccagaaccctgatcctgccgtgtaccagctgcgggatagcaagagcagcgacaagagcgtgtgtctgttcaccgacttcgacagccagaccaacgtgtcccagagcaaggactccgacgtgtacatcaccgataagtgcgtgctggacatgcggagcatggacttcaagagcaactccgccgtggcctggtccaacaagtccgatttcgcctgcgccaacgccttcaacaacagcattatccccgaggacacattcttcccaagccccgagagcagctgcgacgtgaagctggtggaaaagagcttcgagacagacaccaacctgaacttccagaacctgagcgtgatcggcttcagaatcctgctgctgaaagtggccggctttaacctgctgatgaccctgcggctgtggtccagccgcgccaagagaagcggatctggcgtgaagcagaccctgaatttcgacctgctgaagctggctggcgacgtggaatccaacccaggccctactagtatggactggatttggcgcatccttttccttgtcggcgctgctaccggcgcgcattccttcgaacaactccagctgcaagagtctggccctggcctggtcaagcctagcgaaacactgagcctgacctgtaccgtgtctggcggctctatcagctccggcagctatttctggggctggatcagacaacctcctggcaaaggactggaatggatcggctccatctactacagcggcatcagctactacaaccccagcctgaagtccagagtgaccatctccgtggacaccagcaagaaccagttctccctgaagctgagcagcgtgacagccgccgataccgccgtgtattattgtgccagacatgacggcgctgtggccggcctgtttgattattggggacagggcaccctggtcaccgtgtcatctgctacgcgtgaggacctgaagaacgtgttcccacctgaggtggccgtgttcgagcctagcgaggccgagatcagccacacccagaaagccaccctcgtgtgcctggctaccggcttctaccccgaccatgtggaactgtcttggtgggtcaacggcaaagaggtgcacagcggcgtgtgtaccgacccccagccactgaaagaacagcccgccctgaacgacagccggtactgcctgagcagcagactgagagtgtccgccaccttctggcagaacccccggaaccacttcagatgccaggtgcagttctacggcctgagcgagaacgacgagtggacccaggacagagccaagcccgtgacccagatcgtgtctgccgaagcctggggcagagccgattgcggctttaccagcgagagctaccagcagggcgtgctgagcgccaccatcctgtacgagatcctgctgggcaaggccaccctgtacgccgtgctggtgtctgccctggtgctgatggctatggtcaagcggaaggacagccgggga

SEQ ID NO: 7743 - DNA, 2862 bp, Artificial Sequence
  Synthetic Polynucloetide
atggccttaccagtgaccgccttgctcctgccgctggccttgctgctccacgccgccaggccggaagtgcagctggttgaatctggcggaggactggttcagcctggcggatctctgagactgtcttgtgccgccagcggcttcagcttcagcgacttttggatgagctgggtccgacaggcccctggcaaaggacttgaatgggtcgccacaatcagccaggccggcagcgagaaggactacgtggactctgtgaagggcagattcaccatcagccgggacaacgccaagaagtccctgtacctccagatgaacagcctgagagccgaggacaccgccgtgtactattgtgcctctggcgtgtacagcttcgactacagaggccagggcaccctggtcacagtctcttctggtaccggcggaggcggatctggcggcggaggtagcggtggcggaggatctgaattcagctacgtgctgacacagcctccatccgtgtctgtggctccaggacagaccgccagaatcacatgcggcggcaacaacatcggcagcaagagcgtgcactggtatcagcagccacctggacaggctccagtggtggtggtgtacgacgacagcgatagacctagcggcatccccgagagattcagcggcagcaattccggcaataccgccacactgaccatcagcagagtggaagctggcgacgaggccgtgtactactgccaagtgtgggacagcagcagcgatcacgtggtgtttggcggcggaacaaagctgacagtgcttctcgaggacctgaagaacgtgttcccacctgaggtggccgtgttcgagcctagcgaggccgagatcagccacacccagaaagccaccctcgtgtgcctggctaccggcttctaccccgaccatgtggaactgtcttggtgggtcaacggcaaagaggtgcacagcggcgtgtctaccgacccccagccactgaaagaacagcccgccctgaacgacagccggtactgcctgagcagcagactgagagtgtccgccaccttctggcagaacccccggaaccacttcagatgccaggtgcagttctacggcctgagcgagaacgacgagtggacccaggacagagccaagcccgtgacccagatcgtgtctgccgaagcctggggcagagccgattgcggatcccagagcttcggcctgctggaccccaagctgtgctacctgctggatggcatcctgttcatctacggcgtgatcctgaccgccctgttcctgagagtgaagttcagcagaagcgccgacgcccctgcctaccagcagggacagaaccaactgtacaacgagctgaacctgggcagacgggaagagtacgacgtgctggacaagcggagaggcagggaccctgagatgggcggaaagccccagcggagaaagaacccccaggaaggactgtataacgaactccagaaagacaagatggccgaagcctacagcgagatcggcatgaagggcgagcggagaagaggcaagggccacgatggcctgtaccagggcctgagcaccgccaccaaggacacctatgacgccctgcacatgcaggccctgcctccaagaagggccaagcgatctggatctggagcaacaaacttctcactactcaaacaagcaggtgacgtggaggagaatcccgggcctactagtatggactggatttggcgcatccttttccttgtcggcgctgctaccggcgcgcattccttcgaacaactccagctgcaagagtctggccctggcctggtcaagcctagcgaaacactgagcctgacctgtaccgtgtctggcggctctatcagctccggcagctatttctggggctggatcagacaacctcctggcaaaggactggaatggatcggctccatctactacagcggcatcagctactacaaccccagcctgaagtccagagtgaccatctccgtggacaccagcaagaaccagttctccctgaagctgagcagcgtgacagccgccgataccgccgtgtattattgtgccagacatgacggcgctgtggccggcctgtttgattattggggacagggcaccctggtcaccgtgtcatctgctacgcgtatccagaaccctgatcctgccgtgtaccagctgcgggatagcaagagcagcgacaagagcgtgtgtctgttcaccgacttcgacagccagaccaacgtgtcccagagcaaggactccgacgtgtacatcaccgataagaccgtgctggacatgcggagcatggacttcaagagcaactccgccgtggcctggtccaacaagtccgatttcgcctgcgccaacgccttcaacaacagcattatccccgaggacacattcttcccaagccccgagagcagctgcggtacccagagttttgggttgttggaccctaaattgtgctatctgttggacggaatcctgttcatttacggagtgatcctgaccgcattgttcctgcgggttaagttttccagatccgcagacgcacccgcttaccaacaagggcagaaccaactctacaatgaacttaatttggggcggagggaagagtacgacgttctggacaaaaggaggggacgagatcccgagatgggcggaaagcctcagcgaaggaagaatccgcaagaggggctttataacgaactccagaaagataaaatggcagaagcctatagtgagattgggatgaagggagaaaggaggaggggtaaaggtcacgatgggttgtaccaaggattgagcacagccactaaagatacctatgatgcgctccacatgcaggccctgccgccaaga

SEQ ID NO: 7744 - DNA, 2352 bp, Artificial Sequence
  Synthetic Polynucloetide
atggccttaccagtgaccgccttgctcctgccgctggccttgctgctccacgccgccaggccggaagtgcagctggttgaatctggcggaggactggttcagcctggcggatctctgagactgtcttgtgccgccagcggcttcagcttcagcgacttttggatgagctgggtccgacaggcccctggcaaaggacttgaatgggtcgccacaatcagccaggccggcagcgagaaggactacgtggactctgtgaagggcagattcaccatcagccgggacaacgccaagaagtccctgtacctccagatgaacagcctgagagccgaggacaccgccgtgtactattgtgcctctggcgtgtacagcttcgactacagaggccagggcaccctggtcacagtctcttctggtaccggcggaggcggatctggcggcggaggtagcggtggcggaggatctgaattcagctacgtgctgacacagcctccatccgtgtctgtggctccaggacagaccgccagaatcacatgcggcggcaacaacatcggcagcaagagcgtgcactggtatcagcagccacctggacaggctccagtggtggtggtgtacgacgacagcgatagacctagcggcatccccgagagattcagcggcagcaattccggcaataccgccacactgaccatcagcagagtggaagctggcgacgaggccgtgtactactgccaagtgtgggacagcagcagcgatcacgtggtgtttggcggcggaacaaagctgacagtgcttctcgagggacagcctaaggccaatcctaccgtgacactgttccctccaagcagcgaagaactccaggccaacaaggccacacttgtgtgcctgatctccgacttctaccctggggctgtgacagtggcttggaaggccgatggatctcctgtgaaagccggcgtggaaaccaccaagccatccaagcagagcaacaacaaatacgccgccagctcctacctgagcctgacacctgagcagtggaagtcccacagatcctacagctgccaagtgacccacgaaggcagcaccgtggaaaagacagtggcccctacagagtgcagccccatcaagaccgatgtgattacaatggaccccaaggacaactgctccaaggacgccaacgataccctgctgctccagctgaccaacaccagcgcctactacatgtacttgttgctgctgctgaagtccgtggtgtacttcgccatcatcacatgctgcctgctgcggagaaccgccttctgctgcaacggcgagaagtctagggccaagcgatctggatctggagcaacaaacttctcactactcaaacaagcaggtgacgtggaggagaatcccgggcctactagtatggactggatttggcgcatccttttccttgtcggcgctgctaccggcgcgcattccttcgaacaactccagctgcaagagtctggccctggcctggtcaagcctagcgaaacactgagcctgacctgtaccgtgtctggcggctctatcagctccggcagctatttctggggctggatcagacaacctcctggcaaaggactggaatggatcggctccatctactacagcggcatcagctactacaaccccagcctgaagtccagagtgaccatctccgtggacaccagcaagaaccagttctccctgaagctgagcagcgtgacagccgccgataccgccgtgtattattgtgccagacatgacggcgctgtggccggcctgtttgattattggggacagggcaccctggtcaccgtgtcatctgctacgcgtgcctctacaaagggaccctccgtgtttcctctggctcccagcagcaagtctacaagcggaggaacagccgctctgggctgcctggtcaaggattactttcccgagcctgtgaccgtgtcctggaatagcggagcactgacaagcggcgtgcacacctttccagccgtgctgcaaagcagcggcctgtactctctgagcagcgtggtcacagtgcctagctctagcctgggcacccagacctacatctgcaatgtgaaccacaagcctagcaacaccaaggtggacaagagagtggaacccaagagctgtgaagtgaaaaccgactccaccgaccacgtgaagcccaaagagacagagaacaccaagcagcccagcaagagctgccacaagcccaaggccatcgtgcacaccgagaaagtgaacatgatgagcctgaccgtgctgggcctgcggatgctgttcgccaaaaccgtggccgtgaacttcctgctgaccgccaagctgttcttcctc

SEQ ID NO: 7745 - DNA, 2295 bp, Artificial Sequence
  Synthetic Polynucloetide
atggccttaccagtgaccgccttgctcctgccgctggccttgctgctccacgccgccaggccggaagtgcagctggttgaatctggcggaggactggttcagcctggcggatctctgagactgtcttgtgccgccagcggcttcagcttcagcgacttttggatgagctgggtccgacaggcccctggcaaaggacttgaatgggtcgccacaatcagccaggccggcagcgagaaggactacgtggactctgtgaagggcagattcaccatcagccgggacaacgccaagaagtccctgtacctccagatgaacagcctgagagccgaggacaccgccgtgtactattgtgcctctggcgtgtacagcttcgactacagaggccagggcaccctggtcacagtctcttctggtaccggcggaggcggatctggcggcggaggtagcggtggcggaggatctgaattcagctacgtgctgacacagcctccatccgtgtctgtggctccaggacagaccgccagaatcacatgcggcggcaacaacatcggcagcaagagcgtgcactggtatcagcagccacctggacaggctccagtggtggtggtgtacgacgacagcgatagacctagcggcatccccgagagattcagcggcagcaattccggcaataccgccacactgaccatcagcagagtggaagctggcgacgaggccgtgtactactgccaagtgtgggacagcagcagcgatcacgtggtgtttggcggcggaacaaagctgacagtgcttctcgagggacagcctaaggccaatcctaccgtgacactgttccctccaagcagcgaagaactccaggccaacaaggccacacttgtgtgcctgatctccgacttctaccctggggctgtgacagtggcttggaaggccgatggatctcctgtgaaagccggcgtggaaaccaccaagccatccaagcagagcaacaacaaatacgccgccagctcctacctgagcctgacacctgagcagtggaagtcccacagatcctacagctgccaagtgacccacgaaggcagcaccgtggaaaagacagtggcccctacagagtgcagcggcagagccgattgcggctttaccagcgagagctaccagcagggcgtgctgagcgccaccatcctgtacgagatcctgctgggcaaggccaccctgtacgccgtgctggtgtctgccctggtgctgatggctatggtcaagcggaaggacagccggggacgcgccaagagaagcggatctggcgtgaagcagaccctgaatttcgacctgctgaagctggctggcgacgtggaatccaacccaggccctactagtatggactggatttggcgcatccttttccttgtcggcgctgctaccggcgcgcattccttcgaacaactccagctgcaagagtctggccctggcctggtcaagcctagcgaaacactgagcctgacctgtaccgtgtctggcggctctatcagctccggcagctatttctggggctggatcagacaacctcctggcaaaggactggaatggatcggctccatctactacagcggcatcagctactacaaccccagcctgaagtccagagtgaccatctccgtggacaccagcaagaaccagttctccctgaagctgagcagcgtgacagccgccgataccgccgtgtattattgtgccagacatgacggcgctgtggccggcctgtttgattattggggacagggcaccctggtcaccgtgtcatctgctacgcgtgcctctacaaagggaccctccgtgtttcctctggctcccagcagcaagtctacaagcggaggaacagccgctctgggctgcctggtcaaggattactttcccgagcctgtgaccgtgtcctggaatagcggagcactgacaagcggcgtgcacacctttccagccgtgctgcaaagcagcggcctgtactctctgagcagcgtggtcacagtgcctagctctagcctgggcacccagacctacatctgcaatgtgaaccacaagcctagcaacaccaaggtggacaagagagtggaacccaagagctgtatccccgaggacacattcttcccaagccccgagagcagctgcgacgtgaagctggtggaaaagagcttcgagacagacaccaacctgaacttccagaacctgagcgtgatcggcttcagaatcctgctgctgaaagtggccggctttaacctgctgatgaccctgcggctgtggtccagc

SEQ ID NO: 7746 - DNA, 2697 bp, Artificial Sequence
  Synthetic Polynucloetide
atggccttaccagtgaccgccttgctcctgccgctggccttgctgctccacgccgccaggccggaagtgcagctggttgaatctggcggaggactggttcagcctggcggatctctgagactgtcttgtgccgccagcggcttcagcttcagcgacttttggatgagctgggtccgacaggcccctggcaaaggacttgaatgggtcgccacaatcagccaggccggcagcgagaaggactacgtggactctgtgaagggcagattcaccatcagccgggacaacgccaagaagtccctgtacctccagatgaacagcctgagagccgaggacaccgccgtgtactattgtgcctctggcgtgtacagcttcgactacagaggccagggcaccctggtcacagtctcttctggtaccggcggaggcggatctggcggcggaggtagcggtggcggaggatctgaattcagctacgtgctgacacagcctccatccgtgtctgtggctccaggacagaccgccagaatcacatgcggcggcaacaacatcggcagcaagagcgtgcactggtatcagcagccacctggacaggctccagtggtggtggtgtacgacgacagcgatagacctagcggcatccccgagagattcagcggcagcaattccggcaataccgccacactgaccatcagcagagtggaagctggcgacgaggccgtgtactactgccaagtgtgggacagcagcagcgatcacgtggtgtttggcggcggaacaaagctgacagtgcttctcgagatccagaaccctgatcctgccgtgtaccagctgcgggatagcaagagcagcgacaagagcgtgtgtctgttcaccgacttcgacagccagaccaacgtgtcccagagcaaggactccgacgtgtacatcaccgataagtgcgtgctggacatgcggagcatggacttcaagagcaactccgccgtggcctggtccaacaagtccgatttcgcctgcgccaacgccttcaacaacagcattatccccgaggacacattcttcccaagccccgagagcagctgcgacgtgaagctggtggaaaagagcttcgagacagacaccaacctgaacttccagaacctgagcgtgatcggcttcagaatcctgctgctgaaagtggccggctttaacctgctgatgaccctgcggctgtggtccagccgcgccaagagaagcggatctggcgtgaagcagaccctgaatttcgacctgctgaagctggctggcgacgtggaatccaacccaggccctactagtatggactggatttggcgcatccttttccttgtcggcgctgctaccggcgcgcattccgggccccagctccagctgcaagagtctggacctggcctggtcaagcctagcgagacactgagcctgacctgtaccgtgtccggcgatagcatcagcagcggcgattactactggggctggatcagacagcctcctggcaaaggactggaatggatcggccacatctactacagcggcgtgacctactacaaccccagcctgaagtccagagtgaccatcagcgtggacaccagccggaaccagttctccctgaagctgtctagcgtgacagccgccgataccgccgtgtactactgcaccagagaggacagcagcaactggcggagtagaggccagggaacactggtcacagttagctctggatccggcggaggcggaagtggaggcggaggatctggcggcggaggctctttcgaacaactccagctgcaagagtctggccctggcctggtcaagcctagcgaaacactgagcctgacctgtaccgtgtctggcggctctatcagctccggcagctatttctggggctggatcagacaacctcctggcaaaggactggaatggatcggctccatctactacagcggcatcagctactacaaccccagcctgaagtccagagtgaccatctccgtggacaccagcaagaaccagttctccctgaagctgagcagcgtgacagccgccgataccgccgtgtattattgtgccagacatgacggcgctgtggccggcctgtttgattattggggacagggcaccctggtcaccgtgtcatctgctacgcgtgaggacctgaagaacgtgttcccacctgaggtggccgtgttcgagcctagcgaggccgagatcagccacacccagaaagccaccctcgtgtgcctggctaccggcttctaccccgaccatgtggaactgtcttggtgggtcaacggcaaagaggtgcacagcggcgtgtgtaccgacccccagccactgaaagaacagcccgccctgaacgacagccggtactgcctgagcagcagactgagagtgtccgccaccttctggcagaacccccggaaccacttcagatgccaggtgcagttctacggcctgagcgagaacgacgagtggacccaggacagagccaagcccgtgacccagatcgtgtctgccgaagcctggggcagagccgattgcggctttaccagcgagagctaccagcagggcgtgctgagcgccaccatcctgtacgagatcctgctgggcaaggccaccctgtacgccgtgctggtgtctgccctggtgctgatggctatggtcaagcggaaggacagccgggga

SEQ ID NO: 7747 - DNA, 3273 bp, Artificial Sequence
  Synthetic Polynucloetide
atggccttaccagtgaccgccttgctcctgccgctggccttgctgctccacgccgccaggccggaagtgcagctggttgaatctggcggaggactggttcagcctggcggatctctgagactgtcttgtgccgccagcggcttcagcttcagcgacttttggatgagctgggtccgacaggcccctggcaaaggacttgaatgggtcgccacaatcagccaggccggcagcgagaaggactacgtggactctgtgaagggcagattcaccatcagccgggacaacgccaagaagtccctgtacctccagatgaacagcctgagagccgaggacaccgccgtgtactattgtgcctctggcgtgtacagcttcgactacagaggccagggcaccctggtcacagtctcttctggtaccggcggaggcggatctggcggcggaggtagcggtggcggaggatctgaattcagctacgtgctgacacagcctccatccgtgtctgtggctccaggacagaccgccagaatcacatgcggcggcaacaacatcggcagcaagagcgtgcactggtatcagcagccacctggacaggctccagtggtggtggtgtacgacgacagcgatagacctagcggcatccccgagagattcagcggcagcaattccggcaataccgccacactgaccatcagcagagtggaagctggcgacgaggccgtgtactactgccaagtgtgggacagcagcagcgatcacgtggtgtttggcggcggaacaaagctgacagtgcttctcgaggacctgaagaacgtgttcccacctgaggtggccgtgttcgagcctagcgaggccgagatcagccacacccagaaagccaccctcgtgtgcctggctaccggcttctaccccgaccatgtggaactgtcttggtgggtcaacggcaaagaggtgcacagcggcgtgtctaccgacccccagccactgaaagaacagcccgccctgaacgacagccggtactgcctgagcagcagactgagagtgtccgccaccttctggcagaacccccggaaccacttcagatgccaggtgcagttctacggcctgagcgagaacgacgagtggacccaggacagagccaagcccgtgacccagatcgtgtctgccgaagcctggggcagagccgattgcggatcccagagcttcggcctgctggaccccaagctgtgctacctgctggatggcatcctgttcatctacggcgtgatcctgaccgccctgttcctgagagtgaagttcagcagaagcgccgacgcccctgcctaccagcagggacagaaccaactgtacaacgagctgaacctgggcagacgggaagagtacgacgtgctggacaagcggagaggcagggaccctgagatgggcggaaagccccagcggagaaagaacccccaggaaggactgtataacgaactccagaaagacaagatggccgaagcctacagcgagatcggcatgaagggcgagcggagaagaggcaagggccacgatggcctgtaccagggcctgagcaccgccaccaaggacacctatgacgccctgcacatgcaggccctgcctccaagaagggccaagcgatctggatctggagcaacaaacttctcactactcaaacaagcaggtgacgtggaggagaatcccgggcctactagtatggactggatttggcgcatccttttccttgtcggcgctgctaccggcgcgcattccgggccccagctccagctgcaagagtctggacctggcctggtcaagcctagcgagacactgagcctgacctgtaccgtgtccggcgatagcatcagcagcggcgattactactggggctggatcagacagcctcctggcaaaggactggaatggatcggccacatctactacagcggcgtgacctactacaaccccagcctgaagtccagagtgaccatcagcgtggacaccagccggaaccagttctccctgaagctgtctagcgtgacagccgccgataccgccgtgtactactgcaccagagaggacagcagcaactggcggagtagaggccagggaacactggtcacagttagctctggatccggcggaggcggaagtggaggcggaggatctggcggcggaggctctttcgaacaactccagctgcaagagtctggccctggcctggtcaagcctagcgaaacactgagcctgacctgtaccgtgtctggcggctctatcagctccggcagctatttctggggctggatcagacaacctcctggcaaaggactggaatggatcggctccatctactacagcggcatcagctactacaaccccagcctgaagtccagagtgaccatctccgtggacaccagcaagaaccagttctccctgaagctgagcagcgtgacagccgccgataccgccgtgtattattgtgccagacatgacggcgctgtggccggcctgtttgattattggggacagggcaccctggtcaccgtgtcatctgctacgcgtatccagaaccctgatcctgccgtgtaccagctgcgggatagcaagagcagcgacaagagcgtgtgtctgttcaccgacttcgacagccagaccaacgtgtcccagagcaaggactccgacgtgtacatcaccgataagaccgtgctggacatgcggagcatggacttcaagagcaactccgccgtggcctggtccaacaagtccgatttcgcctgcgccaacgccttcaacaacagcattatccccgaggacacattcttcccaagccccgagagcagctgcggtacccagagttttgggttgttggaccctaaattgtgctatctgttggacggaatcctgttcatttacggagtgatcctgaccgcattgttcctgcgggttaagttttccagatccgcagacgcacccgcttaccaacaagggcagaaccaactctacaatgaacttaatttggggcggagggaagagtacgacgttctggacaaaaggaggggacgagatcccgagatgggcggaaagcctcagcgaaggaagaatccgcaagaggggctttataacgaactccagaaagataaaatggcagaagcctatagtgagattgggatgaagggagaaaggaggaggggtaaaggtcacgatgggttgtaccaaggattgagcacagccactaaagatacctatgatgcgctccacatgcaggccctgccgccaaga

SEQ ID NO: 7748 - DNA, 2763 bp, Artificial Sequence
  Synthetic Polynucloetide
atggccttaccagtgaccgccttgctcctgccgctggccttgctgctccacgccgccaggccggaagtgcagctggttgaatctggcggaggactggttcagcctggcggatctctgagactgtcttgtgccgccagcggcttcagcttcagcgacttttggatgagctgggtccgacaggcccctggcaaaggacttgaatgggtcgccacaatcagccaggccggcagcgagaaggactacgtggactctgtgaagggcagattcaccatcagccgggacaacgccaagaagtccctgtacctccagatgaacagcctgagagccgaggacaccgccgtgtactattgtgcctctggcgtgtacagcttcgactacagaggccagggcaccctggtcacagtctcttctggtaccggcggaggcggatctggcggcggaggtagcggtggcggaggatctgaattcagctacgtgctgacacagcctccatccgtgtctgtggctccaggacagaccgccagaatcacatgcggcggcaacaacatcggcagcaagagcgtgcactggtatcagcagccacctggacaggctccagtggtggtggtgtacgacgacagcgatagacctagcggcatccccgagagattcagcggcagcaattccggcaataccgccacactgaccatcagcagagtggaagctggcgacgaggccgtgtactactgccaagtgtgggacagcagcagcgatcacgtggtgtttggcggcggaacaaagctgacagtgcttctcgagggacagcctaaggccaatcctaccgtgacactgttccctccaagcagcgaagaactccaggccaacaaggccacacttgtgtgcctgatctccgacttctaccctggggctgtgacagtggcttggaaggccgatggatctcctgtgaaagccggcgtggaaaccaccaagccatccaagcagagcaacaacaaatacgccgccagctcctacctgagcctgacacctgagcagtggaagtcccacagatcctacagctgccaagtgacccacgaaggcagcaccgtggaaaagacagtggcccctacagagtgcagccccatcaagaccgatgtgattacaatggaccccaaggacaactgctccaaggacgccaacgataccctgctgctccagctgaccaacaccagcgcctactacatgtacttgttgctgctgctgaagtccgtggtgtacttcgccatcatcacatgctgcctgctgcggagaaccgccttctgctgcaacggcgagaagtctagggccaagcgatctggatctggagcaacaaacttctcactactcaaacaagcaggtgacgtggaggagaatcccgggcctactagtatggactggatttggcgcatccttttccttgtcggcgctgctaccggcgcgcattccgggccccagctccagctgcaagagtctggacctggcctggtcaagcctagcgagacactgagcctgacctgtaccgtgtccggcgatagcatcagcagcggcgattactactggggctggatcagacagcctcctggcaaaggactggaatggatcggccacatctactacagcggcgtgacctactacaaccccagcctgaagtccagagtgaccatcagcgtggacaccagccggaaccagttctccctgaagctgtctagcgtgacagccgccgataccgccgtgtactactgcaccagagaggacagcagcaactggcggagtagaggccagggaacactggtcacagttagctctggatccggcggaggcggaagtggaggcggaggatctggcggcggaggctctttcgaacaactccagctgcaagagtctggccctggcctggtcaagcctagcgaaacactgagcctgacctgtaccgtgtctggcggctctatcagctccggcagctatttctggggctggatcagacaacctcctggcaaaggactggaatggatcggctccatctactacagcggcatcagctactacaaccccagcctgaagtccagagtgaccatctccgtggacaccagcaagaaccagttctccctgaagctgagcagcgtgacagccgccgataccgccgtgtattattgtgccagacatgacggcgctgtggccggcctgtttgattattggggacagggcaccctggtcaccgtgtcatctgctacgcgtgcctctacaaagggaccctccgtgtttcctctggctcccagcagcaagtctacaagcggaggaacagccgctctgggctgcctggtcaaggattactttcccgagcctgtgaccgtgtcctggaatagcggagcactgacaagcggcgtgcacacctttccagccgtgctgcaaagcagcggcctgtactctctgagcagcgtggtcacagtgcctagctctagcctgggcacccagacctacatctgcaatgtgaaccacaagcctagcaacaccaaggtggacaagagagtggaacccaagagctgtgaagtgaaaaccgactccaccgaccacgtgaagcccaaagagacagagaacaccaagcagcccagcaagagctgccacaagcccaaggccatcgtgcacaccgagaaagtgaacatgatgagcctgaccgtgctgggcctgcggatgctgttcgccaaaaccgtggccgtgaacttcctgctgaccgccaagctgttcttcctc

SEQ ID NO: 7749 - DNA, 2706 bp, Artificial Sequence
  Synthetic Polynucloetide
atggccttaccagtgaccgccttgctcctgccgctggccttgctgctccacgccgccaggccggaagtgcagctggttgaatctggcggaggactggttcagcctggcggatctctgagactgtcttgtgccgccagcggcttcagcttcagcgacttttggatgagctgggtccgacaggcccctggcaaaggacttgaatgggtcgccacaatcagccaggccggcagcgagaaggactacgtggactctgtgaagggcagattcaccatcagccgggacaacgccaagaagtccctgtacctccagatgaacagcctgagagccgaggacaccgccgtgtactattgtgcctctggcgtgtacagcttcgactacagaggccagggcaccctggtcacagtctcttctggtaccggcggaggcggatctggcggcggaggtagcggtggcggaggatctgaattcagctacgtgctgacacagcctccatccgtgtctgtggctccaggacagaccgccagaatcacatgcggcggcaacaacatcggcagcaagagcgtgcactggtatcagcagccacctggacaggctccagtggtggtggtgtacgacgacagcgatagacctagcggcatccccgagagattcagcggcagcaattccggcaataccgccacactgaccatcagcagagtggaagctggcgacgaggccgtgtactactgccaagtgtgggacagcagcagcgatcacgtggtgtttggcggcggaacaaagctgacagtgcttctcgagggacagcctaaggccaatcctaccgtgacactgttccctccaagcagcgaagaactccaggccaacaaggccacacttgtgtgcctgatctccgacttctaccctggggctgtgacagtggcttggaaggccgatggatctcctgtgaaagccggcgtggaaaccaccaagccatccaagcagagcaacaacaaatacgccgccagctcctacctgagcctgacacctgagcagtggaagtcccacagatcctacagctgccaagtgacccacgaaggcagcaccgtggaaaagacagtggcccctacagagtgcagcggcagagccgattgcggctttaccagcgagagctaccagcagggcgtgctgagcgccaccatcctgtacgagatcctgctgggcaaggccaccctgtacgccgtgctggtgtctgccctggtgctgatggctatggtcaagcggaaggacagccggggacgcgccaagagaagcggatctggcgtgaagcagaccctgaatttcgacctgctgaagctggctggcgacgtggaatccaacccaggccctactagtatggactggatttggcgcatccttttccttgtcggcgctgctaccggcgcgcattccgggccccagctccagctgcaagagtctggacctggcctggtcaagcctagcgagacactgagcctgacctgtaccgtgtccggcgatagcatcagcagcggcgattactactggggctggatcagacagcctcctggcaaaggactggaatggatcggccacatctactacagcggcgtgacctactacaaccccagcctgaagtccagagtgaccatcagcgtggacaccagccggaaccagttctccctgaagctgtctagcgtgacagccgccgataccgccgtgtactactgcaccagagaggacagcagcaactggcggagtagaggccagggaacactggtcacagttagctctggatccggcggaggcggaagtggaggcggaggatctggcggcggaggctctttcgaacaactccagctgcaagagtctggccctggcctggtcaagcctagcgaaacactgagcctgacctgtaccgtgtctggcggctctatcagctccggcagctatttctggggctggatcagacaacctcctggcaaaggactggaatggatcggctccatctactacagcggcatcagctactacaaccccagcctgaagtccagagtgaccatctccgtggacaccagcaagaaccagttctccctgaagctgagcagcgtgacagccgccgataccgccgtgtattattgtgccagacatgacggcgctgtggccggcctgtttgattattggggacagggcaccctggtcaccgtgtcatctgctacgcgtgcctctacaaagggaccctccgtgtttcctctggctcccagcagcaagtctacaagcggaggaacagccgctctgggctgcctggtcaaggattactttcccgagcctgtgaccgtgtcctggaatagcggagcactgacaagcggcgtgcacacctttccagccgtgctgcaaagcagcggcctgtactctctgagcagcgtggtcacagtgcctagctctagcctgggcacccagacctacatctgcaatgtgaaccacaagcctagcaacaccaaggtggacaagagagtggaacccaagagctgtatccccgaggacacattcttcccaagccccgagagcagctgcgacgtgaagctggtggaaaagagcttcgagacagacaccaacctgaacttccagaacctgagcgtgatcggcttcagaatcctgctgctgaaagtggccggctttaacctgctgatgaccctgcggctgtggtccagc

SEQ ID NO: 7750 - DNA, 2277 bp, Artificial Sequence
  Synthetic Polynucloetide
atggccttaccagtgaccgccttgctcctgccgctggccttgctgctccacgccgccaggccggaagtgcaggttttggagtctggcggaggactggttcagcctggcggatctctgagactgtcttgtgccgccagcggcttcaccttcagcaactttgccatgagctgggtccgacaggcccctggcaaaggacttgaatgggtgtccacaatcagcggcagcgccggcacaacagattacgccgattctgtgaagggcagattcaccatcagccgggacaacagcaagaaaaccctgtacctccagatgaacagcctgcgcgtggaagataccgccgtgtactactgtgccgatggcagaggccccttcttcgattatcgcggccagggcacactggtcaccgtttcttctggtaccggcggaggcggatctggcggcggaggtagcggtggcggaggatctgaattcagctacgtgctgacacagcctccatccgtgtctgtggctccaggacagaccgccagaatcacatgcggcggcaacaacatcggcagcaagagcgtgcactggtatcagcagccacctggacaggctccagtggtggtggtgtacgacgacagcgatagacctagcggcatccccgagagattcagcggcagcaattccggcaataccgccacactgaccatcagcagagtggaagctggcgacgaggccgtgtactactgccaagtgtgggacagcagcagcgatcacgtggtgtttggcggcggaacaaagctgacagtgcttctcgaggacctgaagaacgtgttcccacctgaggtggccgtgttcgagcctagcgaggccgagatcagccacacccagaaagccaccctcgtgtgcctggctaccggcttctaccccgaccatgtggaactgtcttggtgggtcaacggcaaagaggtgcacagcggcgtgtgtaccgacccccagccactgaaagaacagcccgccctgaacgacagccggtactgcctgagcagcagactgagagtgtccgccaccttctggcagaacccccggaaccacttcagatgccaggtgcagttctacggcctgagcgagaacgacgagtggacccaggacagagccaagcccgtgacccagatcgtgtctgccgaagcctggggcagagccgattgcggctttaccagcgagagctaccagcagggcgtgctgagcgccaccatcctgtacgagatcctgctgggcaaggccaccctgtacgccgtgctggtgtctgccctggtgctgatggctatggtcaagcggaaggacagccggggaagggccaagcgatctggatctggagcaacaaacttctcactactcaaacaagcaggtgacgtggaggagaatcccgggcctactagtatggactggatttggcgcatccttttccttgtcggcgctgctaccggcgcgcattccttcgaacaactccagctgcaagagtctggccctggcctggtcaagcctagcgaaacactgagcctgacctgtaccgtgtctggcggctctatcagctccggcagctatttctggggctggatcagacaacctcctggcaaaggactggaatggatcggctccatctactacagcggcatcagctactacaaccccagcctgaagtccagagtgaccatctccgtggacaccagcaagaaccagttctccctgaagctgagcagcgtgacagccgccgataccgccgtgtattattgtgccagacatgacggcgctgtggccggcctgtttgattattggggacagggcaccctggtcaccgtgtcatctgctacgcgtatccagaaccctgatcctgccgtgtaccagctgcgggatagcaagagcagcgacaagagcgtgtgtctgttcaccgacttcgacagccagaccaacgtgtcccagagcaaggactccgacgtgtacatcaccgataagtgcgtgctggacatgcggagcatggacttcaagagcaactccgccgtggcctggtccaacaagtccgatttcgcctgcgccaacgccttcaacaacagcattatccccgaggacacattcttcccaagccccgagagcagctgcgacgtgaagctggtggaaaagagcttcgagacagacaccaacctgaacttccagaacctgagcgtgatcggcttcagaatcctgctgctgaaagtggccggctttaacctgctgatgaccctgcggctgtggtccagc

SEQ ID NO: 7751 - DNA, 2280 bp, Artificial Sequence
  Synthetic Polynucloetide
atggccttaccagtgaccgccttgctcctgccgctggccttgctgctccacgccgccaggccgagctacgtgctgacacagcctccatccgtgtctgtggctccaggacagaccgccagaatcacatgcggcggcaacaacatcggcagcaagagcgtgcactggtatcagcagccacctggacaggctccagtggtggtggtgtacgacgacagcgatagacctagcggcatccccgagagattcagcggcagcaattccggcaataccgccacactgaccatcagcagagtggaagctggcgacgaggccgtgtactactgccaagtgtgggacagcagcagcgatcacgtggtgtttggcggcggaacaaagctgacagtgcttctcgaggacctgaagaacgtgttcccacctgaggtggccgtgttcgagcctagcgaggccgagatcagccacacccagaaagccaccctcgtgtgcctggctaccggcttctaccccgaccatgtggaactgtcttggtgggtcaacggcaaagaggtgcacagcggcgtgtgtaccgacccccagccactgaaagaacagcccgccctgaacgacagccggtactgcctgagcagcagactgagagtgtccgccaccttctggcagaacccccggaaccacttcagatgccaggtgcagttctacggcctgagcgagaacgacgagtggacccaggacagagccaagcccgtgacccagatcgtgtctgccgaagcctggggcagagccgattgcggctttaccagcgagagctaccagcagggcgtgctgagcgccaccatcctgtacgagatcctgctgggcaaggccaccctgtacgccgtgctggtgtctgccctggtgctgatggctatggtcaagcggaaggacagccggggaagggccaagcgatctggatctggagcaacaaacttctcactactcaaacaagcaggtgacgtggaggagaatcccgggcctactagtatggactggatttggcgcatccttttccttgtcggcgctgctaccggcgcccattccgggcccgaagtgcagctggttgaatctggcggaggactggttcaggctggcggatctctgagactgtcttgtgccgccagcggcagaacctttagcatgggctggtttagacaggcccctggcaaagagagagagttcgtcgccgccatcacatactctggcggcagcccttactacgccgactctgtgaagggcagattcaccatcagccgggacaacgccaagaacaccgtgtacctccagatgaacagcctgaagcctgaggacaccgccgtgtactactgcgccgccaatccaacatacggcagcgactggaacgccgagaattggggccagggaacccaagtgacagtgtctagcggatccggcggcggaggatctggcggaggcggatctgggggcggaggctctttcgaacaactccagctgcaagagtctggccctggcctggtcaagcctagcgaaacactgagcctgacctgtaccgtgtctggcggctctatcagctccggcagctatttctggggctggatcagacaacctcctggcaaaggactggaatggatcggctccatctactacagcggcatcagctactacaaccccagcctgaagtccagagtgaccatctccgtggacaccagcaagaaccagttctccctgaagctgagcagcgtgacagccgccgataccgccgtgtattattgtgccagacatgacggcgctgtggccggcctgtttgattattggggacagggcaccctggtcaccgtgtcatctgctacgcgtatccagaaccctgatcctgccgtgtaccagctgcgggatagcaagagcagcgacaagagcgtgtgtctgttcaccgacttcgacagccagaccaacgtgtcccagagcaaggactccgacgtgtacatcaccgataagtgcgtgctggacatgcggagcatggacttcaagagcaactccgccgtggcctggtccaacaagtccgatttcgcctgcgccaacgccttcaacaacagcattatccccgaggacacattcttcccaagccccgagagcagctgcgacgtgaagctggtggaaaagagcttcgagacagacaccaacctgaacttccagaacctgagcgtgatcggcttcagaatcctgctgctgaaagtggccggctttaacctgctgatgaccctgcggctgtggtccagc

SEQ ID NO: 7752 - DNA, 2661 bp, Artificial Sequence
  Synthetic Polynucloetide
atggccttaccagtgaccgccttgctcctgccgctggccttgctgctccacgccgccaggccgagctacgtgctgacacagcctccatccgtgtctgtggctccaggacagaccgccagaatcacatgcggcggcaacaacatcggcagcaagagcgtgcactggtatcagcagccacctggacaggctccagtggtggtggtgtacgacgacagcgatagacctagcggcatccccgagagattcagcggcagcaattccggcaataccgccacactgaccatcagcagagtggaagctggcgacgaggccgtgtactactgccaagtgtgggacagcagcagcgatcacgtggtgtttggcggcggaacaaagctgacagtgcttctcgaggacctgaagaacgtgttcccacctgaggtggccgtgttcgagcctagcgaggccgagatcagccacacccagaaagccaccctcgtgtgcctggctaccggcttctaccccgaccatgtggaactgtcttggtgggtcaacggcaaagaggtgcacagcggcgtgtgtaccgacccccagccactgaaagaacagcccgccctgaacgacagccggtactgcctgagcagcagactgagagtgtccgccaccttctggcagaacccccggaaccacttcagatgccaggtgcagttctacggcctgagcgagaacgacgagtggacccaggacagagccaagcccgtgacccagatcgtgtctgccgaagcctggggcagagccgattgcggctttaccagcgagagctaccagcagggcgtgctgagcgccaccatcctgtacgagatcctgctgggcaaggccaccctgtacgccgtgctggtgtctgccctggtgctgatggctatggtcaagcggaaggacagccggggaagggccaagcgatctggatctggagcaacaaacttctcactactcaaacaagcaggtgacgtggaggagaatcccgggcctactagtatggactggatttggcgcatccttttccttgtcggcgctgctaccggcgcccattcccaactgcaactgcaagagtctggccctggcctggtcaagccttctgaaaccctgagcctgacctgtaccgtgtccggcggctctatcagcagcggcgattactactggggctggatcagacagcctccaggcaagggactcgaatggatcggcagcatcagctacagcggctccacctactacaacccaagcctgaagtccagagtgaccatcagcgtggacaccagcagaaaccagttctccctgaagctgagcagcgtgacagccgccgatacagccgtgtattattgcaccagagaggacagcagcaactggcggagtagaggacagggcacactggtcacagtgtcctcttctggaggcggtggaagcggtggaggaggatctgaagtgcagctggttgaatctggcggaggactggttcaggctggcggatctctgagactgtcttgtgccgccagcggcagaacctttagcatgggctggtttagacaggcccctggcaaagagagagagttcgtcgccgccatcacatactctggcggcagcccttactacgccgactctgtgaagggcagattcaccatcagccgggacaacgccaagaacaccgtgtacctccagatgaacagcctgaagcctgaggacaccgccgtgtactactgcgccgccaatccaacatacggcagcgactggaacgccgagaattggggccagggaacccaagtgacagtgtctagcggatccggcggcggaggatctggcggaggcggatctgggggcggaggctctttcgaacaactccagctgcaagagtctggccctggcctggtcaagcctagcgaaacactgagcctgacctgtaccgtgtctggcggctctatcagctccggcagctatttctggggctggatcagacaacctcctggcaaaggactggaatggatcggctccatctactacagcggcatcagctactacaaccccagcctgaagtccagagtgaccatctccgtggacaccagcaagaaccagttctccctgaagctgagcagcgtgacagccgccgataccgccgtgtattattgtgccagacatgacggcgctgtggccggcctgtttgattattggggacagggcaccctggtcaccgtgtcatctgctacgcgtatccagaaccctgatcctgccgtgtaccagctgcgggatagcaagagcagcgacaagagcgtgtgtctgttcaccgacttcgacagccagaccaacgtgtcccagagcaaggactccgacgtgtacatcaccgataagtgcgtgctggacatgcggagcatggacttcaagagcaactccgccgtggcctggtccaacaagtccgatttcgcctgcgccaacgccttcaacaacagcattatccccgaggacacattcttcccaagccccgagagcagctgcgacgtgaagctggtggaaaagagcttcgagacagacaccaacctgaacttccagaacctgagcgtgatcggcttcagaatcctgctgctgaaagtggccggctttaacctgctgatgaccctgcggctgtggtccagc

SEQ ID NO: 7753 - DNA, 2688 bp, Artificial Sequence
  Synthetic Polynucloetide
atggccttaccagtgaccgccttgctcctgccgctggccttgctgctccacgccgccaggccggaagtgcaggttttggagtctggcggaggactggttcagcctggcggatctctgagactgtcttgtgccgccagcggcttcaccttcagcaactttgccatgagctgggtccgacaggcccctggcaaaggacttgaatgggtgtccacaatcagcggcagcgccggcacaacagattacgccgattctgtgaagggcagattcaccatcagccgggacaacagcaagaaaaccctgtacctccagatgaacagcctgcgcgtggaagataccgccgtgtactactgtgccgatggcagaggccccttcttcgattatcgcggccagggcacactggtcaccgtttcttctggtaccggcggaggcggatctggcggcggaggtagcggtggcggaggatctgaattcagctacgtgctgacacagcctccatccgtgtctgtggctccaggacagaccgccagaatcacatgcggcggcaacaacatcggcagcaagagcgtgcactggtatcagcagccacctggacaggctccagtggtggtggtgtacgacgacagcgatagacctagcggcatccccgagagattcagcggcagcaattccggcaataccgccacactgaccatcagcagagtggaagctggcgacgaggccgtgtactactgccaagtgtgggacagcagcagcgatcacgtggtgtttggcggcggaacaaagctgacagtgcttctcgaggacctgaagaacgtgttcccacctgaggtggccgtgttcgagcctagcgaggccgagatcagccacacccagaaagccaccctcgtgtgcctggctaccggcttctaccccgaccatgtggaactgtcttggtgggtcaacggcaaagaggtgcacagcggcgtgtgtaccgacccccagccactgaaagaacagcccgccctgaacgacagccggtactgcctgagcagcagactgagagtgtccgccaccttctggcagaacccccggaaccacttcagatgccaggtgcagttctacggcctgagcgagaacgacgagtggacccaggacagagccaagcccgtgacccagatcgtgtctgccgaagcctggggcagagccgattgcggctttaccagcgagagctaccagcagggcgtgctgagcgccaccatcctgtacgagatcctgctgggcaaggccaccctgtacgccgtgctggtgtctgccctggtgctgatggctatggtcaagcggaaggacagccggggaagggccaagcgatctggatctggagcaacaaacttctcactactcaaacaagcaggtgacgtggaggagaatcccgggcctactagtatggactggatttggcgcatccttttccttgtcggcgctgctaccggcgcccattccgggcccgaagtgcagctggttgaatctggcggaggactggttcaggctggcggatctctgagactgtcttgtgccgccagcggcagaacctttagcatgggctggtttagacaggcccctggcaaagagagagagttcgtcgccgccatcacatacagcggcggcagcccttactacgcctcttctgtcagaggccggttcaccatcagccgggacaacgccaagaacaccgtgtacctccagatgaacagcctgaagccagaggacaccgccgtgtactactgtgccgccaatccaacctacggcagcgactggaatgccgagaattggggccagggcacccaagtgacagtgtctagtggatccggcggcggaggatctggcggaggcggatctgggggcggaggctctttcgaacaactccagctgcaagagtctggccctggcctggtcaagcctagcgaaacactgagcctgacctgtaccgtgtctggcggctctatcagctccggcagctatttctggggctggatcagacaacctcctggcaaaggactggaatggatcggctccatctactacagcggcatcagctactacaaccccagcctgaagtccagagtgaccatctccgtggacaccagcaagaaccagttctccctgaagctgagcagcgtgacagccgccgataccgccgtgtattattgtgccagacatgacggcgctgtggccggcctgtttgattattggggacagggcaccctggtcaccgtgtcatctgctacgcgtatccagaaccctgatcctgccgtgtaccagctgcgggatagcaagagcagcgacaagagcgtgtgtctgttcaccgacttcgacagccagaccaacgtgtcccagagcaaggactccgacgtgtacatcaccgataagtgcgtgctggacatgcggagcatggacttcaagagcaactccgccgtggcctggtccaacaagtccgatttcgcctgcgccaacgccttcaacaacagcattatccccgaggacacattcttcccaagccccgagagcagctgcgacgtgaagctggtggaaaagagcttcgagacagacaccaacctgaacttccagaacctgagcgtgatcggcttcagaatcctgctgctgaaagtggccggctttaacctgctgatgaccctgcggctgtggtccagc

SEQ ID NO: 7754-7758 - skipped (5 entries)

SEQ ID NO: 7759 - DNA, 2754 bp, Artificial Sequence
  Synthetic Polynucloetide
atggccttaccagtgaccgccttgctcctgccgctggccttgctgctccacgccgccaggccgagctacgtgctgacacagcctccatccgtgtctgtggctccaggacagaccgccagaatcacatgcggcggcaacaacatcggcagcaagagcgtgcactggtatcagcagccacctggacaggctccagtggtggtggtgtacgacgacagcgatagacctagcggcatccccgagagattcagcggcagcaattccggcaataccgccacactgaccatcagcagagtggaagctggcgacgaggccgtgtactactgccaagtgtgggacagcagcagcgatcacgtggtgtttggcggcggaacaaagctgacagtgcttggcggaggcggaagtggaggcggaggatctggcggcggaggctctcaactccagctgcaagagtctggccctggcctggtcaagcctagcgaaacactgagcctgacctgtaccgtgtctggcggctctatcagctccggcagctatttctggggctggatcagacaacctcctggcaaaggactggaatggatcggctccatctactacagcggcatcacctactacaaccccggcctgaagtccagagtgaccatctccgtggacaccagcaagaaccagttctccctgaagctgagcagcgtgacagccgccgataccgccgtgtattattgtgccagacatgacggcgctgtggccggcctgtttgattattggggacagggcaccctggtcaccgtgtcatctgctacgcgtgagcagaaactgatctcggaagaggatctggcgaagcccaccacgacgccagcgccgcgaccaccaacaccggcgcccaccatcgcgtcgcagcccctgtccctgcgcccagaggcgtgccggccagcggcggggggcgcagtgcacacgagggggctggacttcgcctgtgacatctacatctgggcgcccttggccgggacttgtggggtccttctcctgtcactggttatcaccctttactgcgggcgcgccagagtgaagttcagcaggagcgcagacgcccccgcgtaccagcagggccagaaccagctctataacgagctgaatctaggacgaagagaggagtacgatgttttggacaagagacgtggccgggaccctgagatggggggaaagccgagaaggaagaaccctcaggaaggcctgtacaatgaactgcagaaagataagatggcggaggcctacagtgagattgggatgaaaggcgagcgccggaggggcaaggggcacgatggcctttaccagggtctcagtacagccaccaaggacacctacgacgcccttcacatgcaggccctgccccctcgctctagaggatctggagcaacaaacttctcactactcaaacaagcaggtgacgtggaggagaatcccgggcctgggatccacatggccacttacgaggttctctgtgaggtggcgcggaaactgggcacggatgacagggaagtggtattgttcctcctaaacgtgttcatacctcaacccacactggcccaattaattggagctcttagagctttaaaggaggagggcaggttaacgtttcccctgttagcggaatgtctgtttcgtgcaggtcgcagagacctcttgcgcgacctgcttcacttagacccgcgttttttagagcgccacctagcgggcacaatgagttatttcagcccttatcagctcactgttctccacgtagacggggagctgtgtgcgagggatattaggtctttgatatttttaagcaaggacactatagggtctcgcagcacaccacagacattcttacactgggtgtactgtatggaaaacttagacctactgggtcccactgacgtggatgccctaatgtcaatgcttagatctttgtcaagagtagacctacagcgccaagtgcaaaccctaatgggccttcacctttccggcccatcacactcccaacactatcgccatacaccactcgagaccgatttctacgactacaaggacgacgatgacaagactagtggctccggcgagggcagaggaagtctactaacctgcggagatgtggaagaaaatcctggcccacatatgaccgagtacaagcccacggtgcgcctcgccacccgcgacgacgtccccagggccgtacgcaccctcgccgccgcgttcgccgactaccccgccacgcgccacaccgtcgatccggaccgccacatcgagcgggtcaccgagctgcaagaactcttcctcacgcgcgtcgggctcgacatcggcaaggtgtgggtcgcggacgacggcgccgcggtggcggtctggaccacgccggagagcgtcgaagcgggggcggtgttcgccgagatcggcccgcgcatggccgagttgagcggttcccggctggccgcgcagcaacagatggaaggcctcctggcgccgcaccggcccaaggagcccgcgtggttcctggccaccgtcggcgtctcgcccgaccaccagggcaagggtctgggcagcgccgtcgtgctccccggagtggaggcggccgagcgcgccggggtgcccgccttcctggagacctccgcgccccgcaacctccccttctacgagcggctcggcttcaccgtcaccgccgacgtcgaggtgcccgaaggaccgcgcacctggtgcatgacccgcaagcccggtgcctga

SEQ ID NO: 7760 - skipped

SEQ ID NO: 7761 - DNA, 2571 bp, Artificial Sequence
  Synthetic Polynucloetide
atggccttaccagtgaccgccttgctcctgccgctggccttgctgctccacgccgccaggccgagctacgtgctgacacagcctccatccgtgtctgtggctccaggacagaccgccagaatcacatgcggcggcaacaacatcggcagcaagagcgtgcactggtatcagcagccacctggacaggctccagtggtggtggtgtacgacgacagcgatagacctagcggcatccccgagagattcagcggcagcaattccggcaataccgccacactgaccatcagcagagtggaagctggcgacgaggccgtgtactactgccaagtgtgggacagcagcagcgatcacgtggtgtttggcggcggaacaaagctgacagtgcttctcgaggacctgaagaacgtgttcccacctgaggtggccgtgttcgagcctagcaaggccgagatcgcccacacccagaaagccaccctcgtgtgcctggctaccggcttctaccccgaccatgtggaactgtcttggtgggtcaacggcaaagaggtgcacagcggcgtgtgtaccgacccccagccactgaaagaacagcccgccctgaacgacagccggtactgcctgagcagcagactgagagtgtccgccaccttctggcagaacccccggaaccacttcagatgccaggtgcagttctacggcctgagcgagaacgacgagtggacccaggacagagccaagcccgtgacccagatcgtgtctgccgaagcctggggcagagccgattgcggcatcaccagcgccagctaccaccagggcgtgctgagcgccaccatcctgtacgagatcctgctgggcaaggccaccctgtacgccgtgctggtgtctgccctggtgctgatggctatggtcaagcggaaggacagccggggaagggccaagcgatctggatctggagcaacaaacttctcactactcaaacaagcaggtgacgtggaggagaatcccgggcctactagtatggactggatttggcgcatccttttccttgtcggcgctgctaccggcgcgcattccttcgaacaactccagctgcaagagtctggccctggcctggtcaagcctagcgaaacactgagcctgacctgtaccgtgtctggcggctctatcagctccggcagctatttctggggctggatcagacaacctcctggcaaaggactggaatggatcggctccatctactacagcggcatcacctactacaaccccggcctgaagtccagagtgaccatctccgtggacaccagcaagaaccagttctccctgaagctgagcagcgtgacagccgccgataccgccgtgtattattgtgccagacatgacggcgctgtggccggcctgtttgattattggggacagggcaccctggtcaccgtgtcatctgctacgcgtatccagaaccctgatcctgccgtgtaccagctgcgggatagcaagagcagcgacaagagcgtgtgtctgttcaccgacttcgacagccagaccaacgtgtcccagagcaaggactccgacgtgtacatcaccgataagtgcgtgctggacatgcggagcatggacttcaagagcaactccgccgtggcctggtccaacaagtccgatttcgcctgcgccaacgccttcaacaacagcattatccccgaggacacattcttcccaagcagcgacgtgccctgcgacgtgaagctggtggaaaagagcttcgagacagacaccaacctgaacttccagaacctgagcgtgatcggcttcagaatcctgctgctgaaagtggccggctttaacctgctgatgaccctgcggctgtggtccagccgcgccaagagaagcggatctggcgtgaagcagaccctgaatttcgacctgctgaagctggctggcgacgtggaatccaacccaggcccttctagaggccatatgaccgagtacaagcccacggtgcgcctcgccacccgcgacgacgtccccagggccgtacgcaccctcgccgccgcgttcgccgactaccccgccacgcgccacaccgtcgatccggaccgccacatcgagcgggtcaccgagctgcaagaactcttcctcacgcgcgtcgggctcgacatcggcaaggtgtgggtcgcggacgacggcgccgcggtggcggtctggaccacgccggagagcgtcgaagcgggggcggtgttcgccgagatcggcccgcgcatggccgagttgagcggttcccggctggccgcgcagcaacagatggaaggcctcctggcgccgcaccggcccaaggagcccgcgtggttcctggccaccgtcggcgtctcgcccgaccaccagggcaagggtctgggcagcgccgtcgtgctccccggagtggaggcggccgagcgcgccggggtgcccgccttcctggagacctccgcgccccgcaacctccccttctacgagcggctcggcttcaccgtcaccgccgacgtcgaggtgcccgaaggaccgcgcacctggtgcatgacccgcaagcccggtgcctga

SEQ ID NO: 7762-7763 - skipped (2 entries)

SEQ ID NO: 7764 - DNA, 1881 bp, Artificial Sequence
  Synthetic Polynucloetide
atggccttaccagtgaccgccttgctcctgccgctggccttgctgctccacgccgccaggccgagctacgtgctgacacagcctccatccgtgtctgtggctccaggacagaccgccagaatcacatgcggcggcaacaacatcggcagcaagagcgtgcactggtatcagcagccacctggacaggctccagtggtggtggtgtacgacgacagcgatagacctagcggcatccccgagagattcagcggcagcaattccggcaataccgccacactgaccatcagcagagtggaagctggcgacgaggccgtgtactactgccaagtgtgggacagcagcagcgatcacgtggtgtttggcggcggaacaaagctgacagtgcttctcgagatccagaaccctgatcctgccgtgtaccagctgcgggatagcaagagcagcgacaagagcgtgtgtctgttcaccgacttcgacagccagaccaacgtgtcccagagcaaggactccgacgtgtacatcaccgataagtgcgtgctggacatgcggagcatggacttcaagagcaactccgccgtggcctggtccaacaagtccgatttcgcctgcgccaacgccttcaacaacagcattatccccgaggacacattcttcccaagccccgagagcagctgcgacgtgaagctggtggaaaagagcttcgagacagacaccaacctgaacttccagaacctgagcgtgatcggcttcagaatcctgctgctgaaagtggccggctttaacctgctgatgaccctgcggctgtggtccagccgcgccaagagaagcggatctggcgtgaagcagaccctgaatttcgacctgctgaagctggctggcgacgtggaatccaacccaggccctactagtatggactggatttggcgcatccttttccttgtcggcgctgctaccggcgcgcattccttcgaacaactccagctgcaagagtctggccctggcctggtcaagcctagcgaaacactgagcctgacctgtaccgtgtctggcggctctatcagctccggcagctatttctggggctggatcagacaacctcctggcaaaggactggaatggatcggctccatctactacagcggcatcacctactacaaccccggcctgaagtccagagtgaccatctccgtggacaccagcaagaaccagttctccctgaagctgagcagcgtgacagccgccgataccgccgtgtattattgtgccagacatgacggcgctgtggccggcctgtttgattattggggacagggcaccctggtcaccgtgtcatctgctacgcgtgaggacctgaagaacgtgttcccacctgaggtggccgtgttcgagcctagcgaggccgagatcagccacacccagaaagccaccctcgtgtgcctggctaccggcttctaccccgaccatgtggaactgtcttggtgggtcaacggcaaagaggtgcacagcggcgtgtgtaccgacccccagccactgaaagaacagcccgccctgaacgacagccggtactgcctgagcagcagactgagagtgtccgccaccttctggcagaacccccggaaccacttcagatgccaggtgcagttctacggcctgagcgagaacgacgagtggacccaggacagagccaagcccgtgacccagatcgtgtctgccgaagcctggggcagagccgattgcggctttaccagcgagagctaccagcagggcgtgctgagcgccaccatcctgtacgagatcctgctgggcaaggccaccctgtacgccgtgctggtgtctgccctggtgctgatggctatggtcaagcggaaggacagccgggga

SEQ ID NO: 7765-7766 - skipped (2 entries)

SEQ ID NO: 7767 - DNA, 2709 bp, Artificial Sequence
  Synthetic Polynucloetide
atggccttaccagtgaccgccttgctcctgccgctggccttgctgctccacgccgccaggccgctcgagcagaaactgatctcggaagaggatctgggctccggcgatcgccctgatcctgccgtgtaccagctgcgggatagcaagagcagcgacaagagcgtgtgtctgttcaccgacttcgacagccagaccaacgtgtcccagagcaaggactccgacgtgtacatcaccgataagtgcgtgctggacatgcggagcatggacttcaagagcaactccgccgtggcctggtccaacaagtccgatttcgcctgcgccaacgccttcaacaacagcattatccccgaggacacattcttcccaagccccgagagcagctgcgacgtgaagctggtggaaaagagcttcgagacagacaccaacctgaacttccagaacctgagcgtgatcggcttcagaatcctgctgctgaaagtggccggctttaacctgctgatgaccctgcggctgtggtccagctctagtcgcgccaagagaagcggatctggcgtgaagcagaccctgaatttcgacctgctgaagctggctggcgacgtggaatccaacccaggccccactagcatggccttaccagtgaccgccttgctcctgccgctggccttgctgctccacgccgccaggccgagctacgtgctgacacagcctccatccgtgtctgtggctccaggacagaccgccagaatcacatgcggcggcaacaacatcggcagcaagagcgtgcactggtatcagcagccacctggacaggctccagtggtggtggtgtacgacgacagcgatagacctagcggcatccccgagagattcagcggcagcaattccggcaataccgccacactgaccatcagcagagtggaagctggcgacgaggccgtgtactactgccaagtgtgggacagcagcagcgatcacgtggtgtttggcggcggaacaaagctgacagtgcttggcggaggcggaagtggaggcggaggatctggcggcggaggctctcaactccagctgcaagagtctggccctggcctggtcaagcctagcgaaacactgagcctgacctgtaccgtgtctggcggctctatcagctccggcagctatttctggggctggatcagacaacctcctggcaaaggactggaatggatcggctccatctactacagcggcatcacctactacaaccccggcctgaagtccagagtgaccatctccgtggacaccagcaagaaccagttctccctgaagctgagcagcgtgacagccgccgataccgccgtgtattattgtgccagacatgacggcgctgtggccggcctgtttgattattggggacagggcaccctggtcaccgtgtcatctgctacgcgtgggaaaccaattcccaaccctcttctgggactggattcaaccggcagcggcgaggacctgaagaacgtgttcccacctgaggtggccgtgttcgagcctagcgaggccgagatcagccacacccagaaagccaccctcgtgtgcctggctaccggcttctaccccgaccatgtggaactgtcttggtgggtcaacggcaaagaggtgcacagcggcgtgtgtaccgacccccagccactgaaagaacagcccgccctgaacgacagccggtactgcctgagcagcagactgagagtgtccgccaccttctggcagaacccccggaaccacttcagatgccaggtgcagttctacggcctgagcgagaacgacgagtggacccaggacagagccaagcccgtgacccagatcgtgtctgccgaagcctggggcagagccgattgcggctttaccagcgagagctaccagcagggcgtgctgagcgccaccatcctgtacgagatcctgctgggcaaggccaccctgtacgccgtgctggtgtctgccctggtgctgatggctatggtcaagcggaaggacagccggggaagggccaagcgatctggatctggagcaacaaacttctcactactcaaacaagcaggtgacgtggaggagaatcccgggccttctagaggccatatgaccgagtacaagcccacggtgcgcctcgccacccgcgacgacgtccccagggccgtacgcaccctcgccgccgcgttcgccgactaccccgccacgcgccacaccgtcgatccggaccgccacatcgagcgggtcaccgagctgcaagaactcttcctcacgcgcgtcgggctcgacatcggcaaggtgtgggtcgcggacgacggcgccgcggtggcggtctggaccacgccggagagcgtcgaagcgggggcggtgttcgccgagatcggcccgcgcatggccgagttgagcggttcccggctggccgcgcagcaacagatggaaggcctcctggcgccgcaccggcccaaggagcccgcgtggttcctggccaccgtcggcgtctcgcccgaccaccagggcaagggtctgggcagcgccgtcgtgctccccggagtggaggcggccgagcgcgccggggtgcccgccttcctggagacctccgcgccccgcaacctccccttctacgagcggctcggcttcaccgtcaccgccgacgtcgaggtgcccgaaggaccgcgcacctggtgcatgacccgcaagcccggtgcctga

SEQ ID NO: 7768-7771 - skipped (4 entries)

SEQ ID NO: 7772 - DNA, 1893 bp, Artificial Sequence
  Synthetic Polynucloetide
atggccttaccagtgaccgccttgctcctgccgctggccttgctgctccacgccgccaggccgagctacgtgctgacacagcctccatccgtgtctgtggctccaggacagaccgccagaatcacatgcggcggcaacaacatcggcagcaagagcgtgcactggtatcagcagccacctggacaggctccagtggtggtggtgtacgacgacagcgatagacctagcggcatccccgagagattcagcggcagcaattccggcaataccgccacactgaccatcagcagagtggaagctggcgacgaggccgtgtactactgccaagtgtgggacagcagcagcgatcacgtggtgtttggcggcggaacaaagctgacagtgcttctcgagagccagcctcacaccaagcccagcgtgttcgtgatgaagaacggcaccaacgtggcctgcctcgtgaaagagttctaccccaaggacatcaggatcaacctggtgtccagcaagaagatcaccgagttcgaccccgccatcgtgatctcccccagcggcaagtacaacgccgtgaagctggggaagtacgaggacagcaacagcgtgacctgctccgtgcagcacgacaacaagaccgtgcacagcaccgactttgaagtgaaaaccgactccaccgaccacgtgaagcccaaagagacagagaacaccaagcagcccagcaagagctgccacaagcccaaggccatcgtgcacaccgagaaagtgaacatgatgagcctgaccgtgctgggcctgcggatgctgttcgccaaaaccgtggccgtgaacttcctgctgaccgccaagctgttcttcctcagggccaagcgatctggatctggagcaacaaacttctcactactcaaacaagcaggtgacgtggaggagaatcccgggcctactagtatggactggatttggcgcatccttttccttgtcggcgctgctaccggcgcgcattccttcgaacaactccagctgcaagagtctggccctggcctggtcaagcctagcgaaacactgagcctgacctgtaccgtgtctggcggctctatcagctccggcagctatttctggggctggatcagacaacctcctggcaaaggactggaatggatcggctccatctactacagcggcatcacctactacaaccccggcctgaagtccagagtgaccatctccgtggacaccagcaagaaccagttctccctgaagctgagcagcgtgacagccgccgataccgccgtgtattattgtgccagacatgacggcgctgtggccggcctgtttgattattggggacagggcaccctggtcaccgtgtcatctgctacgcgtgacaagcagctggacgccgacgtgtcccccaagcctaccatcttcctgccctctatcgccgagacaaagctccagaaggccggcacctacctgtgcctgctggaaaagttcttcccagatgtgattaagatccactggcaggaaaagaagtccaacaccatcctgggcagccaggaaggcaacaccatgaagaccaacgacacctacatgaagttcagctggctgaccgtgcccgagaagtccctggacaaagaacacagatgcatcgtgcggcacgaaaacaacaagaacggcgtggaccaggaaatcatcttcccacccatcaagaccgatgtgattacaatggaccccaaggacaactgctccaaggacgccaacgataccctgctgctccagctgaccaacaccagcgcctactacatgtacttgttgctgctgctgaagtccgtggtgtacttcgccatcatcacatgctgcctgctgcggagaaccgccttctgctgcaacggcgagaagtct

SEQ ID NO: 7773-7782 - skipped (10 entries)

SEQ ID NO: 7783 - DNA, 1881 bp, Artificial Sequence
  Synthetic Polynucloetide
atggccttaccagtgaccgccttgctcctgccgctggccttgctgctccacgccgccaggccgagctacgtgctgacacagcctccatccgtgtctgtggctccaggacagaccgccagaatcacatgcggcggcaacaacatcggcagcaagagcgtgcactggtatcagcagccacctggacaggctccagtggtggtggtgtacgacgacagcgatagacctagcggcatccccgagagattcagcggcagcaattccggcaataccgccacactgaccatcagcagagtggaagctggcgacgaggccgtgtactactgccaagtgtgggacagcagcagcgatcacgtggtgtttggcggcggaacaaagctgacagtgcttctcgagggacagcctaaggccaatcctaccgtgacactgttccctccaagcagcgaagaactccaggccaacaaggccacacttgtgtgcctgatctccgacttctaccctggggctgtgacagtggcttggaaggccgatggatctcctgtgaaagccggcgtggaaaccaccaagccatccaagcagagcaacaacaaatacgccgccagctcctacctgagcctgacacctgagcagtggaagtcccacagatcctacagctgccaagtgacccacgaaggcagcaccgtggaaaagacagtggcccctacagagtgcagcggcagagccgattgcggcatcaccagcgccagctaccaccagggcgtgctgagcgccaccatcctgtacgagatcctgctgggcaaggccaccctgtacgccgtgctggtgtctgccctggtgctgatggctatggtcaagcggaaggacagccggggaagggccaagcgatctggatctggagcaacaaacttctcactactcaaacaagcaggtgacgtggaggagaatcccgggcctactagtatggactggatttggcgcatccttttccttgtcggcgctgctaccggcgcgcattccttcgaacaactccagctgcaagagtctggccctggcctggtcaagcctagcgaaacactgagcctgacctgtaccgtgtctggcggctctatcagctccggcagctatttctggggctggatcagacaacctcctggcaaaggactggaatggatcggctccatctactacagcggcatcacctactacaaccccggcctgaagtccagagtgaccatctccgtggacaccagcaagaaccagttctccctgaagctgagcagcgtgacagccgccgataccgccgtgtattattgtgccagacatgacggcgctgtggccggcctgtttgattattggggacagggcaccctggtcaccgtgtcatctgctacgcgtgcctctacaaagggaccctccgtgtttcctctggctcccagcagcaagtctacaagcggaggaacagccgctctgggctgcctggtcaaggattactttcccgagcctgtgaccgtgtcctggaatagcggagcactgacaagcggcgtgcacacctttccagccgtgctgcaaagcagcggcctgtactctctgagcagcgtggtcacagtgcctagctctagcctgggcacccagacctacatctgcaatgtgaaccacaagcctagcaacaccaaggtggacaagagagtggaacccaagagctgtatccccgaggacacattcttcccaagcagcgacgtgccctgcgacgtgaagctggtggaaaagagcttcgagacagacaccaacctgaacttccagaacctgagcgtgatcggcttcagaatcctgctgctgaaagtggccggctttaacctgctgatgaccctgcggctgtggtccagc

SEQ ID NO: 7784-7786 - skipped (3 entries)

SEQ ID NO: 7787 - DNA, 1284 bp, Artificial Sequence
  Synthetic Polynucloetide
atggccttaccagtgaccgccttgctcctgccgctggccttgctgctccacgccgccaggccgagctacgtgctgacacagcctccatccgtgtctgtggctccaggacagaccgccagaatcacatgcggcggcaacaacatcggcagcaagagcgtgcactggtatcagcagccacctggacaggctccagtggtggtggtgtacgacgacagcgatagacctagcggcatccccgagagattcagcggcagcaattccggcaataccgccacactgaccatcagcagagtggaagctggcgacgaggccgtgtactactgccaagtgtgggacagcagcagcgatcacgtggtgtttggcggcggaacaaagctgacagtgcttggcggaggcggaagtggaggcggaggatctggcggcggaggctctcaactccagctgcaagagtctggccctggcctggtcaagcctagcgaaacactgagcctgacctgtaccgtgtctggcggctctatcagctccggcagctatttctggggctggatcagacaacctcctggcaaaggactggaatggatcggctccatctactacagcggcatcacctactacaaccccggcctgaagtccagagtgaccatctccgtggacaccagcaagaaccagttctccctgaagctgagcagcgtgacagccgccgataccgccgtgtattattgtgccagacatgacggcgctgtggccggcctgtttgattattggggacagggcaccctggtcaccgtgtcatctgctacgcgtcagagcatcaagggcaaccacctggtcaaggtgtacgactaccaagaggacggcagcgtgctgctgacatgtgatgccgaggccaagaacatcacctggtttaaggacggcaagatgatcggcttcctgaccgaggacaagaagaagtggaacctgggcagcaacgctaaggaccccagaggcatgtatcagtgcaagggcagccagaacaagagcaagcccctccaggtgtactaccggatgtgccagaactgcatcgagctgaacgccgctaccatcagcggctttctgttcgccgagatcgtgtccatcttcgtgctggccgtgggcgtgtactttatcgctggacaggatggcgtgcggcagagcagagcttccgataagcaaaccctgctgcctaacgaccagctgtaccagcctctgaaggacagagaggacgaccagtacagccacctccagggcaatcagctgagaagaaac

SEQ ID NO: 7788 - skipped

SEQ ID NO: 7789 - DNA, 1359 bp, Artificial Sequence
  Synthetic Polynucloetide
atggccttaccagtgaccgccttgctcctgccgctggccttgctgctccacgccgccaggccgcaactccagctgcaagagtctggccctggcctggtcaagcctagcgaaacactgagcctgacctgtaccgtgtctggcggctctatcagctccggcagctatttctggggctggatcagacaacctcctggcaaaggactggaatggatcggctccatctactacagcggcatcacctactacaaccccggcctgaagtccagagtgaccatctccgtggacaccagcaagaaccagttctccctgaagctgagcagcgtgacagccgccgataccgccgtgtattattgtgccagacatgacggcgctgtggccggcctgtttgattattggggacagggcaccctggtcaccgtgtcatctgctggcggaggcggaagtggaggcggaggatctggcggcggaggctctagctacgtgctgacacagcctccatccgtgtctgtggctccaggacagaccgccagaatcacatgcggcggcaacaacatcggcagcaagagcgtgcactggtatcagcagccacctggacaggctccagtggtggtggtgtacgacgacagcgatagacctagcggcatccccgagagattcagcggcagcaattccggcaataccgccacactgaccatcagcagagtggaagctggcgacgaggccgtgtactactgccaagtgtgggacagcagcagcgatcacgtggtgtttggcggcggaacaaagctgacagtgcttacgcgtgacggtaacgaggagatgggaggaatcactcaaaccccttacaaagtctcaatttcaggaacaactgttatccttacatgtccccagtatcctggcagcgagatcctttggcagcataacgacaagaatatagggggagatgaagacgataagaatatcggatctgacgaggatcacttgagcctgaaagagttctccgagcttgaacaaagcggatattatgtgtgctatccgcgcgggtcaaagccggaagacgctaacttttacctttatctccgagccagagtgtgcgaaaattgcatggaaatggacgttatgtccgttgctacaatagttatcgtagatatatgcatcacgggtggactgcttctgctggtttattattggtccaagaatagaaaggccaaagctaaacccgtgaccagaggcgctggcgcaggcggaaggcaaaggggacaaaacaaagaacggccaccaccagtgccaaatccagattatgagcctattcggaaaggacagagggacctgtactctggcctgaatcagagaagaatc

SEQ ID NO: 7790 - skipped

SEQ ID NO: 7791 - DNA, 1284 bp, Artificial Sequence
  Synthetic Polynucloetide
atggccttaccagtgaccgccttgctcctgccgctggccttgctgctccacgccgccaggccgcaactccagctgcaagagtctggccctggcctggtcaagcctagcgaaacactgagcctgacctgtaccgtgtctggcggctctatcagctccggcagctatttctggggctggatcagacaacctcctggcaaaggactggaatggatcggctccatctactacagcggcatcacctactacaaccccggcctgaagtccagagtgaccatctccgtggacaccagcaagaaccagttctccctgaagctgagcagcgtgacagccgccgataccgccgtgtattattgtgccagacatgacggcgctgtggccggcctgtttgattattggggacagggcaccctggtcaccgtgtcatctgctggcggaggcggaagtggaggcggaggatctggcggcggaggctctagctacgtgctgacacagcctccatccgtgtctgtggctccaggacagaccgccagaatcacatgcggcggcaacaacatcggcagcaagagcgtgcactggtatcagcagccacctggacaggctccagtggtggtggtgtacgacgacagcgatagacctagcggcatccccgagagattcagcggcagcaattccggcaataccgccacactgaccatcagcagagtggaagctggcgacgaggccgtgtactactgccaagtgtgggacagcagcagcgatcacgtggtgtttggcggcggaacaaagctgacagtgcttacgcgtcagagcatcaagggcaaccacctggtcaaggtgtacgactaccaagaggacggcagcgtgctgctgacatgtgatgccgaggccaagaacatcacctggtttaaggacggcaagatgatcggcttcctgaccgaggacaagaagaagtggaacctgggcagcaacgctaaggaccccagaggcatgtatcagtgcaagggcagccagaacaagagcaagcccctccaggtgtactaccggatgtgccagaactgcatcgagctgaacgccgctaccatcagcggctttctgttcgccgagatcgtgtccatcttcgtgctggccgtgggcgtgtactttatcgctggacaggatggcgtgcggcagagcagagcttccgataagcaaaccctgctgcctaacgaccagctgtaccagcctctgaaggacagagaggacgaccagtacagccacctccagggcaatcagctgagaagaaac

SEQ ID NO: 7792-7793 - skipped (2 entries)

SEQ ID NO: 7794 - DNA, 2031 bp, Artificial Sequence
  Synthetic Polynucloetide
atggccttaccagtgaccgccttgctcctgccgctggccttgctgctccacgccgccaggccgagctacgtgctgacacagcctccatccgtgtctgtggctccaggacagaccgccagaatcacatgcggcggcaacaacatcggcagcaagagcgtgcactggtatcagcagccacctggacaggctccagtggtggtggtgtacgacgacagcgatagacctagcggcatccccgagagattcagcggcagcaattccggcaataccgccacactgaccatcagcagagtggaagctggcgacgaggccgtgtactactgccaagtgtgggacagcagcagcgatcacgtggtgtttggcggcggaacaaagctgacagtgcttggcggaggcggaagtggaggcggaggatctggcggcggaggctctcaactccagctgcaagagtctggccctggcctggtcaagcctagcgaaacactgagcctgacctgtaccgtgtctggcggctctatcagctccggcagctatttctggggctggatcagacaacctcctggcaaaggactggaatggatcggctccatctactacagcggcatcacctactacaaccccggcctgaagtccagagtgaccatctccgtggacaccagcaagaaccagttctccctgaagctgagcagcgtgacagccgccgataccgccgtgtattattgtgccagacatgacggcgctgtggccggcctgtttgattattggggacagggcaccctggtcaccgtgtcatctgctctcgaggacctgaagaacgtgttcccacctgaggtggccgtgttcgagcctagcgaggccgagatcagccacacccagaaagccaccctcgtgtgcctggctaccggcttctaccccgaccatgtggaactgtcttggtgggtcaacggcaaagaggtgcacagcggcgtgtctaccgacccccagccactgaaagaacagcccgccctgaacgacagccggtactgcctgagcagcagactgagagtgtccgccaccttctggcagaacccccggaaccacttcagatgccaggtgcagttctacggcctgagcgagaacgacgagtggacccaggacagagccaagcccgtgacccagatcgtgtctgccgaagcctggggcagagccgattgcggctttaccagcgagagctaccagcagggcgtgctgagcgccaccatcctgtacgagatcctgctgggcaaggccaccctgtacgccgtgctggtgtctgccctggtgctgatggctatggtcaagcggaaggacagccggggaagggccaagcgatctggatctggagcaacaaacttctcactactcaaacaagcaggtgacgtggaggagaatcccgggcctactagaggccatatgaccgagtacaagcccacggtgcgcctcgccacccgcgacgacgtccccagggccgtacgcaccctcgccgccgcgttcgccgactaccccgccacgcgccacaccgtcgatccggaccgccacatcgagcgggtcaccgagctgcaagaactcttcctcacgcgcgtcgggctcgacatcggcaaggtgtgggtcgcggacgacggcgccgcggtggcggtctggaccacgccggagagcgtcgaagcgggggcggtgttcgccgagatcggcccgcgcatggccgagttgagcggttcccggctggccgcgcagcaacagatggaaggcctcctggcgccgcaccggcccaaggagcccgcgtggttcctggccaccgtcggcgtctcgcccgaccaccagggcaagggtctgggcagcgccgtcgtgctccccggagtggaggcggccgagcgcgccggggtgcccgccttcctggagacctccgcgccccgcaacctccccttctacgagcggctcggcttcaccgtcaccgccgacgtcgaggtgcccgaaggaccgcgcacctggtgcatgacccgcaagcccggtgcctga

SEQ ID NO: 7795 - DNA, 2181 bp, Artificial Sequence
  Synthetic Polynucloetide
atggccttaccagtgaccgccttgctcctgccgctggccttgctgctccacgccgccaggccgagctacgtgctgacacagcctccatccgtgtctgtggctccaggacagaccgccagaatcacatgcggcggcaacaacatcggcagcaagagcgtgcactggtatcagcagccacctggacaggctccagtggtggtggtgtacgacgacagcgatagacctagcggcatccccgagagattcagcggcagcaattccggcaataccgccacactgaccatcagcagagtggaagctggcgacgaggccgtgtactactgccaagtgtgggacagcagcagcgatcacgtggtgtttggcggcggaacaaagctgacagtgcttggcggaggcggaagtggaggcggaggatctggcggcggaggctctcaactccagctgcaagagtctggccctggcctggtcaagcctagcgaaacactgagcctgacctgtaccgtgtctggcggctctatcagctccggcagctatttctggggctggatcagacaacctcctggcaaaggactggaatggatcggctccatctactacagcggcatcacctactacaaccccggcctgaagtccagagtgaccatctccgtggacaccagcaagaaccagttctccctgaagctgagcagcgtgacagccgccgataccgccgtgtattattgtgccagacatgacggcgctgtggccggcctgtttgattattggggacagggcaccctggtcaccgtgtcatctgctacgcgtgagcagaaactgatctcggaagaggatctggggagcggcaccccattcccttctctggcccctcccatcatgctgctggtggacggcaagcagcagatggtggtcgtgtgcctggtgctggatgtggccccacctggactggacagccccatctggtttagcgccggcaatggctctgccctggacgcctttacctacggcccaagccctgccaccgatggcacctggacaaatctggcccacctgagcctgcccagcgaggaactggcttcttgggagcctctcgtgtgccacacaggacctggcgctgagggacacagcagatccacccagcctatgcacctgtctggcgaggccagcaccgccagaacctgtcctcaggaacctctgagaggcacccctggcggagcactgtggctgggagtgctgagactgctgctgttcaagctgctgctgtttgacctgctgctgacctgctcctgtctgtgcgatcctgccggccctctgccttctcctgccaccaccacaagactgagagccctgggcagccacagactgcaccctgccacagagacaggcggcagagaggccacaagcagccctagaccccagcccagagacagaagatggggcgataccccccctggcagaaagcctggatctccagtccgcgccaagagaagcggatctggcgtgaagcagaccctgaatttcgacctgctgaagctggctggcgacgtggaatccaacccaggcccttctagatctagaggccatatgaccgagtacaagcccacggtgcgcctcgccacccgcgacgacgtccccagggccgtacgcaccctcgccgccgcgttcgccgactaccccgccacgcgccacaccgtcgatccggaccgccacatcgagcgggtcaccgagctgcaagaactcttcctcacgcgcgtcgggctcgacatcggcaaggtgtgggtcgcggacgacggcgccgcggtggcggtctggaccacgccggagagcgtcgaagcgggggcggtgttcgccgagatcggcccgcgcatggccgagttgagcggttcccggctggccgcgcagcaacagatggaaggcctcctggcgccgcaccggcccaaggagcccgcgtggttcctggccaccgtcggcgtctcgcccgaccaccagggcaagggtctgggcagcgccgtcgtgctccccggagtggaggcggccgagcgcgccggggtgcccgccttcctggagacctccgcgccccgcaacctccccttctacgagcggctcggcttcaccgtcaccgccgacgtcgaggtgcccgaaggaccgcgcacctggtgcatgacccgcaagcccggtgcctga

SEQ ID NO: 7796-7809 - skipped (14 entries)

SEQ ID NO: 7810 - DNA, 2274 bp, Artificial Sequence
  Synthetic Polynucloetide
atggccttaccagtgaccgccttgctcctgccgctggccttgctgctccacgccgccaggccggaagtgcagctggttgaatctggcggaggactggttcagcctggcggatctctgagactgtcttgtgccgccagcggcttcagcttcagcgacttttggatgagctgggtccgacaggcccctggcaaaggacttgaatgggtcgccacaatcagccaggccggcagcgagaaggactacgtggactctgtgaagggcagattcaccatcagccgggacaacgccaagaagtccctgtacctccagatgaacagcctgagagccgaggacaccgccgtgtactattgtgcctctggcgtgtacagcttcgactacagaggccagggcaccctggtcacagtctcttctggtaccggcggaggcggatctggcggcggaggtagcggtggcggaggatctgaattcagctacgtgctgacacagcctccatccgtgtctgtggctccaggacagaccgccagaatcacatgcggcggcaacaacatcggcagcaagagcgtgcactggtatcagcagccacctggacaggctccagtggtggtggtgtacgacgacagcgatagacctagcggcatccccgagagattcagcggcagcaattccggcaataccgccacactgaccatcagcagagtggaagctggcgacgaggccgtgtactactgccaagtgtgggacagcagcagcgatcacgtggtgtttggcggcggaacaaagctgacagtgcttctcgaggacctgaagaacgtgttcccacctgaggtggccgtgttcgagcctagcgaggccgagatcagccacacccagaaagccaccctcgtgtgcctggctaccggcttctaccccgaccatgtggaactgtcttggtgggtcaacggcaaagaggtgcacagcggcgtgtgtaccgacccccagccactgaaagaacagcccgccctgaacgacagccggtactgcctgagcagcagactgagagtgtccgccaccttctggcagaacccccggaaccacttcagatgccaggtgcagttctacggcctgagcgagaacgacgagtggacccaggacagagccaagcccgtgacccagatcgtgtctgccgaagcctggggcagagccgattgcggctttaccagcgagagctaccagcagggcgtgctgagcgccaccatcctgtacgagatcctgctgggcaaggccaccctgtacgccgtgctggtgtctgccctggtgctgatggctatggtcaagcggaaggacagccggggaagggccaagcgatctggatctggagcaacaaacttctcactactcaaacaagcaggtgacgtggaggagaatcccgggcctactagtatggactggatttggcgcatccttttccttgtcggcgctgctaccggcgcgcattccttcgaacaactccagctgcaagagtctggccctggcctggtcaagcctagcgaaacactgagcctgacctgtaccgtgtctggcggctctatcagctccggcagctatttctggggctggatcagacaacctcctggcaaaggactggaatggatcggctccatctactacagcggcatcacctactacaaccccggcctgaagtccagagtgaccatctccgtggacaccagcaagaaccagttctccctgaagctgagcagcgtgacagccgccgataccgccgtgtattattgtgccagacatgacggcgctgtggccggcctgtttgattattggggacagggcaccctggtcaccgtgtcatctgctacgcgtatccagaaccctgatcctgccgtgtaccagctgcgggatagcaagagcagcgacaagagcgtgtgtctgttcaccgacttcgacagccagaccaacgtgtcccagagcaaggactccgacgtgtacatcaccgataagtgcgtgctggacatgcggagcatggacttcaagagcaactccgccgtggcctggtccaacaagtccgatttcgcctgcgccaacgccttcaacaacagcattatccccgaggacacattcttcccaagccccgagagcagctgcgacgtgaagctggtggaaaagagcttcgagacagacaccaacctgaacttccagaacctgagcgtgatcggcttcagaatcctgctgctgaaagtggccggctttaacctgctgatgaccctgcggctgtggtccagc

SEQ ID NO: 7811-7812 - skipped (2 entries)

SEQ ID NO: 7813 - DNA, 2352 bp, Artificial Sequence
  Synthetic Polynucloetide
atggccttaccagtgaccgccttgctcctgccgctggccttgctgctccacgccgccaggccggaagtgcagctggttgaatctggcggaggactggttcagcctggcggatctctgagactgtcttgtgccgccagcggcttcagcttcagcgacttttggatgagctgggtccgacaggcccctggcaaaggacttgaatgggtcgccacaatcagccaggccggcagcgagaaggactacgtggactctgtgaagggcagattcaccatcagccgggacaacgccaagaagtccctgtacctccagatgaacagcctgagagccgaggacaccgccgtgtactattgtgcctctggcgtgtacagcttcgactacagaggccagggcaccctggtcacagtctcttctggtaccggcggaggcggatctggcggcggaggtagcggtggcggaggatctgaattcagctacgtgctgacacagcctccatccgtgtctgtggctccaggacagaccgccagaatcacatgcggcggcaacaacatcggcagcaagagcgtgcactggtatcagcagccacctggacaggctccagtggtggtggtgtacgacgacagcgatagacctagcggcatccccgagagattcagcggcagcaattccggcaataccgccacactgaccatcagcagagtggaagctggcgacgaggccgtgtactactgccaagtgtgggacagcagcagcgatcacgtggtgtttggcggcggaacaaagctgacagtgcttctcgagggacagcctaaggccaatcctaccgtgacactgttccctccaagcagcgaagaactccaggccaacaaggccacacttgtgtgcctgatctccgacttctaccctggggctgtgacagtggcttggaaggccgatggatctcctgtgaaagccggcgtggaaaccaccaagccatccaagcagagcaacaacaaatacgccgccagctcctacctgagcctgacacctgagcagtggaagtcccacagatcctacagctgccaagtgacccacgaaggcagcaccgtggaaaagacagtggcccctacagagtgcagccccatcaagaccgatgtgattacaatggaccccaaggacaactgctccaaggacgccaacgataccctgctgctccagctgaccaacaccagcgcctactacatgtacttgttgctgctgctgaagtccgtggtgtacttcgccatcatcacatgctgcctgctgcggagaaccgccttctgctgcaacggcgagaagtctagggccaagcgatctggatctggagcaacaaacttctcactactcaaacaagcaggtgacgtggaggagaatcccgggcctactagtatggactggatttggcgcatccttttccttgtcggcgctgctaccggcgcgcattccttcgaacaactccagctgcaagagtctggccctggcctggtcaagcctagcgaaacactgagcctgacctgtaccgtgtctggcggctctatcagctccggcagctatttctggggctggatcagacaacctcctggcaaaggactggaatggatcggctccatctactacagcggcatcacctactacaaccccggcctgaagtccagagtgaccatctccgtggacaccagcaagaaccagttctccctgaagctgagcagcgtgacagccgccgataccgccgtgtattattgtgccagacatgacggcgctgtggccggcctgtttgattattggggacagggcaccctggtcaccgtgtcatctgctacgcgtgcctctacaaagggaccctccgtgtttcctctggctcccagcagcaagtctacaagcggaggaacagccgctctgggctgcctggtcaaggattactttcccgagcctgtgaccgtgtcctggaatagcggagcactgacaagcggcgtgcacacctttccagccgtgctgcaaagcagcggcctgtactctctgagcagcgtggtcacagtgcctagctctagcctgggcacccagacctacatctgcaatgtgaaccacaagcctagcaacaccaaggtggacaagagagtggaacccaagagctgtgaagtgaaaaccgactccaccgaccacgtgaagcccaaagagacagagaacaccaagcagcccagcaagagctgccacaagcccaaggccatcgtgcacaccgagaaagtgaacatgatgagcctgaccgtgctgggcctgcggatgctgttcgccaaaaccgtggccgtgaacttcctgctgaccgccaagctgttcttcctc

SEQ ID NO: 7814-7857 - skipped (44 entries)

SEQ ID NO: 7858 - DNA, 1359 bp, Artificial Sequence
  Synthetic Polynucloetide
atggccttaccagtgaccgccttgctcctgccgctggccttgctgctccacgccgccaggccgcaactccagctgcaagagtctggccctggcctggtcaagcctagcgaaacactgagcctgacctgtaccgtgtctggcggctctatcagctccggcagctatttctggggctggatcagacaacctcctggcaaaggactggaatggatcggctccatctactacagcggcatcacctactacaaccccaccctgaagtccagagtgaccatctccgtggacaccagcaagaaccagttctccctgaagctgagcagcgtgacagccgccgataccgccgtgtattattgtgccagacatgacggcgctgtggccggcctgtttgattattggggacagggcaccctggtcaccgtgtcatctgctggcggaggcggaagtggaggcggaggatctggcggcggaggctctagctacgtgctgacacagcctccatccgtgtctgtggctccaggacagaccgccagaatcacatgcggcggcaacaacatcggcagcaagagcgtgcactggtatcagcagccacctggacaggctccagtggtggtggtgtacgacgacagcgatagacctagcggcatccccgagagattcagcggcagcaattccggcaataccgccacactgaccatcagcagagtggaagctggcgacgaggccgtgtactactgccaagtgtgggacagcagcagcgatcacgtggtgtttggcggcggaacaaagctgacagtgcttacgcgtgacggtaacgaggagatgggaggaatcactcaaaccccttacaaagtctcaatttcaggaacaactgttatccttacatgtccccagtatcctggcagcgagatcctttggcagcataacgacaagaatatagggggagatgaagacgataagaatatcggatctgacgaggatcacttgagcctgaaagagttctccgagcttgaacaaagcggatattatgtgtgctatccgcgcgggtcaaagccggaagacgctaacttttacctttatctccgagccagagtgtgcgaaaattgcatggaaatggacgttatgtccgttgctacaatagttatcgtagatatatgcatcacgggtggactgcttctgctggtttattattggtccaagaatagaaaggccaaagctaaacccgtgaccagaggcgctggcgcaggcggaaggcaaaggggacaaaacaaagaacggccaccaccagtgccaaatccagattatgagcctattcggaaaggacagagggacctgtactctggcctgaatcagagaagaatc

SEQ ID NO: 7859 - skipped

SEQ ID NO: 7860 - DNA, 1284 bp, Artificial Sequence
  Synthetic Polynucloetide
atggccttaccagtgaccgccttgctcctgccgctggccttgctgctccacgccgccaggccgcaactccagctgcaagagtctggccctggcctggtcaagcctagcgaaacactgagcctgacctgtaccgtgtctggcggctctatcagctccggcagctatttctggggctggatcagacaacctcctggcaaaggactggaatggatcggctccatctactacagcggcatcacctactacaaccccaccctgaagtccagagtgaccatctccgtggacaccagcaagaaccagttctccctgaagctgagcagcgtgacagccgccgataccgccgtgtattattgtgccagacatgacggcgctgtggccggcctgtttgattattggggacagggcaccctggtcaccgtgtcatctgctggcggaggcggaagtggaggcggaggatctggcggcggaggctctagctacgtgctgacacagcctccatccgtgtctgtggctccaggacagaccgccagaatcacatgcggcggcaacaacatcggcagcaagagcgtgcactggtatcagcagccacctggacaggctccagtggtggtggtgtacgacgacagcgatagacctagcggcatccccgagagattcagcggcagcaattccggcaataccgccacactgaccatcagcagagtggaagctggcgacgaggccgtgtactactgccaagtgtgggacagcagcagcgatcacgtggtgtttggcggcggaacaaagctgacagtgcttacgcgtcagagcatcaagggcaaccacctggtcaaggtgtacgactaccaagaggacggcagcgtgctgctgacatgtgatgccgaggccaagaacatcacctggtttaaggacggcaagatgatcggcttcctgaccgaggacaagaagaagtggaacctgggcagcaacgctaaggaccccagaggcatgtatcagtgcaagggcagccagaacaagagcaagcccctccaggtgtactaccggatgtgccagaactgcatcgagctgaacgccgctaccatcagcggctttctgttcgccgagatcgtgtccatcttcgtgctggccgtgggcgtgtactttatcgctggacaggatggcgtgcggcagagcagagcttccgataagcaaaccctgctgcctaacgaccagctgtaccagcctctgaaggacagagaggacgaccagtacagccacctccagggcaatcagctgagaagaaac

SEQ ID NO: 7861-7868 - skipped (8 entries)

SEQ ID NO: 7869 - DNA, 1674 bp, Artificial Sequence; identical to SEQ ID NO: 7455
  Synthetic Polynucloetide

SEQ ID NO: 7870-7872 - skipped (3 entries)

SEQ ID NO: 7873 - DNA, 1935 bp, Artificial Sequence
  Synthetic Polynucloetide
atggccttaccagtgaccgccttgctcctgccgctggccttgctgctccacgccgccaggccgagctacgtgctgacacagcctccatccgtgtctgtggctccaggacagaccgccagaatcacatgcggcggcaacaacatcggcagcaagagcgtgcactggtatcagcagccacctggacaggctccagtggtggtggtgtacgacgacagcgatagacctagcggcatccccgagagattcagcggcagcaattccggcaataccgccacactgaccatcagcagagtggaagctggcgacgaggccgtgtactactgccaagtgtgggacagcagcagcgatcacgtggtgtttggcggcggaacaaagctgacagtgcttggcggaggcggaagtggaggcggaggatctggcggcggaggctctcaactccagctgcaagagtctggccctggcctggtcaagcctagcgaaacactgagcctgacctgtaccgtgtctggcggctctatcagctccggcagctatttctggggctggatcagacaacctcctggcaaaggactggaatggatcggctccatctactacagcggcatcacctactacaaccccaccctgaagtccagagtgaccatctccgtggacaccagcaagaaccagttctccctgaagctgagcagcgtgacagccgccgataccgccgtgtattattgtgccagacatgacggcgctgtggccggcctgtttgattattggggacagggcaccctggtcaccgtgtcatctgctacgcgtgggagcggcatccagaaccctgatcctgccgtgtaccagctgcgggatagcaagagcagcgacaagagcgtgtgtctgttcaccgacttcgacagccagaccaacgtgtcccagagcaaggactccgacgtgtacatcaccgataagaccgtgctggacatgcggagcatggacttcaagagcaactccgccgtggcctggtccaacaagtccgatttcgcctgcgccaacgccttcaacaacagcattatccccgaggacacattcttcccaagcagcgacgtgccctgcgacgtgaagctggtggaaaagagcttcgagacagacaccaacctgaacttccagaacctgagcgtgatcggcttcagaatcctgctgctgaaagtggccggctttaacctgctgatgaccctgcggctgtggtccagccgcgccaagagaagcggatctggcgtgaagcagaccctgaatttcgacctgctgaagctggctggcgacgtggaatccaacccaggcccttctagaggccatatgaccgagtacaagcccacggtgcgcctcgccacccgcgacgacgtccccagggccgtacgcaccctcgccgccgcgttcgccgactaccccgccacgcgccacaccgtcgatccggaccgccacatcgagcgggtcaccgagctgcaagaactcttcctcacgcgcgtcgggctcgacatcggcaaggtgtgggtcgcggacgacggcgccgcggtggcggtctggaccacgccggagagcgtcgaagcgggggcggtgttcgccgagatcggcccgcgcatggccgagttgagcggttcccggctggccgcgcagcaacagatggaaggcctcctggcgccgcaccggcccaaggagcccgcgtggttcctggccaccgtcggcgtctcgcccgaccaccagggcaagggtctgggcagcgccgtcgtgctccccggagtggaggcggccgagcgcgccggggtgcccgccttcctggagacctccgcgccccgcaacctccccttctacgagcggctcggcttcaccgtcaccgccgacgtcgaggtgcccgaaggaccgcgcacctggtgcatgacccgcaagcccggtgcctga

SEQ ID NO: 7874-7877 - skipped (4 entries)

SEQ ID NO: 7878 - DNA, 1974 bp, Artificial Sequence
  Synthetic Polynucloetide
atggccttaccagtgaccgccttgctcctgccgctggccttgctgctccacgccgccaggccgagctacgtgctgacacagcctccatccgtgtctgtggctccaggacagaccgccagaatcacatgcggcggcaacaacatcggcagcaagagcgtgcactggtatcagcagccacctggacaggctccagtggtggtggtgtacgacgacagcgatagacctagcggcatccccgagagattcagcggcagcaattccggcaataccgccacactgaccatcagcagagtggaagctggcgacgaggccgtgtactactgccaagtgtgggacagcagcagcgatcacgtggtgtttggcggcggaacaaagctgacagtgcttggcggaggcggaagtggaggcggaggatctggcggcggaggctctcaactccagctgcaagagtctggccctggcctggtcaagcctagcgaaacactgagcctgacctgtaccgtgtctggcggctctatcagctccggcagctatttctggggctggatcagacaacctcctggcaaaggactggaatggatcggctccatctactacagcggcatcacctactacaaccccaccctgaagtccagagtgaccatctccgtggacaccagcaagaaccagttctccctgaagctgagcagcgtgacagccgccgataccgccgtgtattattgtgccagacatgacggcgctgtggccggcctgtttgattattggggacagggcaccctggtcaccgtgtcatctgctacgcgtgggtctggaggcggaggcagcggcggaggcgggagcggccagagttttgggttgttggaccctaaattgtgctatctgttggacggaatcctgttcatttacggagtgatcctgaccgcattgttcctgcgggttaagttttccagatccgcagacgcacccgcttaccaacaagggcagaaccaactctacaatgaacttaatttggggcggagggaagagtacgacgttctggacaaaaggaggggacgagatcccgagatgggcggaaagcctcagcgaaggaagaatccgcaagaggggctttataacgaactccagaaagataaaatggcagaagcctatagtgagattgggatgaagggagaaaggaggaggggtaaaggtcacgatgggttgtaccaaggattgagcacagccactaaagatacctatgatgcgctccacatgcaggccctgccgccaagacgcgccaagagaagcggatctggcgtgaagcagaccctgaatttcgacctgctgaagctggctggcgacgtggaatccaacccaggcccttctagaggccatatgaccgagtacaagcccacggtgcgcctcgccacccgcgacgacgtccccagggccgtacgcaccctcgccgccgcgttcgccgactaccccgccacgcgccacaccgtcgatccggaccgccacatcgagcgggtcaccgagctgcaagaactcttcctcacgcgcgtcgggctcgacatcggcaaggtgtgggtcgcggacgacggcgccgcggtggcggtctggaccacgccggagagcgtcgaagcgggggcggtgttcgccgagatcggcccgcgcatggccgagttgagcggttcccggctggccgcgcagcaacagatggaaggcctcctggcgccgcaccggcccaaggagcccgcgtggttcctggccaccgtcggcgtctcgcccgaccaccagggcaagggtctgggcagcgccgtcgtgctccccggagtggaggcggccgagcgcgccggggtgcccgccttcctggagacctccgcgccccgcaacctccccttctacgagcggctcggcttcaccgtcaccgccgacgtcgaggtgcccgaaggaccgcgcacctggtgcatgacccgcaagcccggtgcctga

SEQ ID NO: 7879-7891 - skipped (13 entries)

SEQ ID NO: 7892 - DNA, 2184 bp, Artificial Sequence
  Synthetic Polynucloetide
atggccttaccagtgaccgccttgctcctgccgctggccttgctgctccacgccgccaggccgagctacgtgctgacacagcctccatccgtgtctgtggctccaggacagaccgccagaatcacatgcggcggcaagaacatcggcagcaagagcgtgcactggtatcagcagccacctggacaggctccagtggtggtggtgtacgacgacagcgatagacctagcggcatccccgagagattcagcggcagcaattccggcaataccgccacactgaccatcagcagagtggaagctggcgacgaggccgtgtactactgccaagtgtgggacagcagcagcgatcacgtggtgtttggcggcggaacaaagctgacagtgcttggcggaggcggaagtggaggcggaggatctggcggcggaggctctcaactccagctgcaagagtctggccctggcctggtcaagcctagcgaaacactgagcctgacctgtaccgtgtctggcggctctatcagctccggcagctatttctggggctggatcagacaacctcctggcaaaggactggaatggatcggctccatctactacagcggcatcacctactacaaccccagcctgaagtccagagtgaccatctccgtggacaccagcaagaaccagttctccctgaagctgagcagcgtgacagccgccgataccgccgtgtattattgtgccagacatgacggcgctgtggccggcctgtttgattattggggacagggcaccctggtcaccgtgtcatctgctacgcgtgagcagaaactgatctcggaagaggatctggcgaagcccaccacgacgccagcgccgcgaccaccaacaccggcgcccaccatcgcgtcgcagcccctgtccctgcgcccagaggcgtgccggccagcggcggggggcgcagtgcacacgagggggctggacttcgcctgtgacatctacatctgggcgcccttggccgggacttgtggggtccttctcctgtcactggttatcaccctttactgcaaacggggcagaaagaaactcctgtatatattcaaacaaccatttatgagaccagtacaaactactcaagaggaagatggctgtagctgccgatttccagaagaagaagaaggaggatgtgaactgagagtgaagttcagcaggagcgcagacgcccccgcgtaccagcagggccagaaccagctctataacgagctgaatctaggacgaagagaggagtacgatgttttggacaagagacgtggccgggaccctgagatggggggaaagccgagaaggaagaaccctcaggaaggcctgtacaatgaactgcagaaagataagatggcggaggcctacagtgagattgggatgaaaggcgagcgccggaggggcaaggggcacgatggcctttaccagggtctcagtacagccaccaaggacacctacgacgcccttcacatgcaggccctgccccctcgctctagtggctccggcgagggcagaggaagtctactaacctgcggagatgtggaagaaaatcctggcccacatatgaccgagtacaagcccacggtgcgcctcgccacccgcgacgacgtccccagggccgtacgcaccctcgccgccgcgttcgccgactaccccgccacgcgccacaccgtcgatccggaccgccacatcgagcgggtcaccgagctgcaagaactcttcctcacgcgcgtcgggctcgacatcggcaaggtgtgggtcgcggacgacggcgccgcggtggcggtctggaccacgccggagagcgtcgaagcgggggcggtgttcgccgagatcggcccgcgcatggccgagttgagcggttcccggctggccgcgcagcaacagatggaaggcctcctggcgccgcaccggcccaaggagcccgcgtggttcctggccaccgtcggcgtctcgcccgaccaccagggcaagggtctgggcagcgccgtcgtgctccccggagtggaggcggccgagcgcgccggggtgcccgccttcctggagacctccgcgccccgcaacctccccttctacgagcggctcggcttcaccgtcaccgccgacgtcgaggtgcccgaaggaccgcgcacctggtgcatgacccgcaagcccggtgcctga

SEQ ID NO: 7893 - DNA, 2166 bp, Artificial Sequence
  Synthetic Polynucloetide
atggccttaccagtgaccgccttgctcctgccgctggccttgctgctccacgccgccaggccgagctacgtgctgacacagcctccatccgtgtctgtggctccaggacagaccgccagaatcacatgcggcggcaagaacatcggcagcaagagcgtgcactggtatcagcagccacctggacaggctccagtggtggtggtgtacgacgacagcgatagacctagcggcatccccgagagattcagcggcagcaattccggcaataccgccacactgaccatcagcagagtggaagctggcgacgaggccgtgtactactgccaagtgtgggacagcagcagcgatcacgtggtgtttggcggcggaacaaagctgacagtgcttggcggaggcggaagtggaggcggaggatctggcggcggaggctctcaactccagctgcaagagtctggccctggcctggtcaagcctagcgaaacactgagcctgacctgtaccgtgtctggcggctctatcagctccggcagctatttctggggctggatcagacaacctcctggcaaaggactggaatggatcggctccatctactacagcggcatcacctactacaaccccagcctgaagtccagagtgaccatctccgtggacaccagcaagaaccagttctccctgaagctgagcagcgtgacagccgccgataccgccgtgtattattgtgccagacatgacggcgctgtggccggcctgtttgattattggggacagggcaccctggtcaccgtgtcatctgctacgcgtgagcagaaactgatctcggaagaggatctgaaaattgaagttatgtatcctcctccttacctagacaatgagaagagcaatggaaccattatccatgtgaaagggaaacacctttgtccaagtcccctatttcccggaccttctaagcccttttgggtgctggtggtggttgggggagtcctggcttgctatagcttgctagtaacagtggcctttattattttctgggtgaggagtaagaggagcaggctcctgcacagtgactacatgaacatgactccacgccgccccggacccacccgcaagcattaccagccctatgccccaccacgcgacttcgcagcctatcgctccagagtgaagttcagcaggagcgcagacgcccccgcgtaccagcagggccagaaccagctctataacgagctcaatctaggacgaagagaggagtacgatgttttggacaagagacgtggccgggaccctgagatggggggaaagccgagaaggaagaaccctcaggaaggcctgtacaatgaactgcagaaagataagatggcggaggcctacagtgagattgggatgaaaggcgagcgccggaggggcaaggggcacgatggcctttaccagggtctcagtacagccaccaaggacacctacgacgcccttcacatgcaggccctgccccctcgctctagtggctccggcgagggcagaggaagtctactaacctgcggagatgtggaagaaaatcctggcccacatatgaccgagtacaagcccacggtgcgcctcgccacccgcgacgacgtccccagggccgtacgcaccctcgccgccgcgttcgccgactaccccgccacgcgccacaccgtcgatccggaccgccacatcgagcgggtcaccgagctgcaagaactcttcctcacgcgcgtcgggctcgacatcggcaaggtgtgggtcgcggacgacggcgccgcggtggcggtctggaccacgccggagagcgtcgaagcgggggcggtgttcgccgagatcggcccgcgcatggccgagttgagcggttcccggctggccgcgcagcaacagatggaaggcctcctggcgccgcaccggcccaaggagcccgcgtggttcctggccaccgtcggcgtctcgcccgaccaccagggcaagggtctgggcagcgccgtcgtgctccccggagtggaggcggccgagcgcgccggggtgcccgccttcctggagacctccgcgccccgcaacctccccttctacgagcggctcggcttcaccgtcaccgccgacgtcgaggtgcccgaaggaccgcgcacctggtgcatgacccgcaagcccggtgcctga

SEQ ID NO: 7894 - DNA, 1494 bp, Artificial Sequence
  Synthetic Polynucloetide
atggccttaccagtgaccgccttgctcctgccgctggccttgctgctccacgccgccaggccgagctacgtgctgacacagcctccatccgtgtctgtggctccaggacagaccgccagaatcacatgcggcggcaagaacatcggcagcaagagcgtgcactggtatcagcagccacctggacaggctccagtggtggtggtgtacgacgacagcgatagacctagcggcatccccgagagattcagcggcagcaattccggcaataccgccacactgaccatcagcagagtggaagctggcgacgaggccgtgtactactgccaagtgtgggacagcagcagcgatcacgtggtgtttggcggcggaacaaagctgacagtgcttggcggaggcggaagtggaggcggaggatctggcggcggaggctctcaactccagctgcaagagtctggccctggcctggtcaagcctagcgaaacactgagcctgacctgtaccgtgtctggcggctctatcagctccggcagctatttctggggctggatcagacaacctcctggcaaaggactggaatggatcggctccatctactacagcggcatcacctactacaaccccagcctgaagtccagagtgaccatctccgtggacaccagcaagaaccagttctccctgaagctgagcagcgtgacagccgccgataccgccgtgtattattgtgccagacatgacggcgctgtggccggcctgtttgattattggggacagggcaccctggtcaccgtgtcatctgctacgcgtgagcagaaactgatctcggaagaggatctgaaaattgaagttatgtatcctcctccttacctagacaatgagaagagcaatggaaccattatccatgtgaaagggaaacacctttgtccaagtcccctatttcccggaccttctaagcccttttgggtgctggtggtggttgggggagtcctggcttgctatagcttgctagtaacagtggcctttattattttctgggtgaggagtaagaggagcaggctcctgcacagtgactacatgaacatgactccacgccgccccggacccacccgcaagcattaccagccctatgccccaccacgcgacttcgcagcctatcgctccagagtgaagttcagcaggagcgcagacgcccccgcgtaccagcagggccagaaccagctctataacgagctcaatctaggacgaagagaggagtacgatgttttggacaagagacgtggccgggaccctgagatggggggaaagccgagaaggaagaaccctcaggaaggcctgtacaatgaactgcagaaagataagatggcggaggcctacagtgagattgggatgaaaggcgagcgccggaggggcaaggggcacgatggcctttaccagggtctcagtacagccaccaaggacacctacgacgcccttcacatgcaggccctgccccctcgc

SEQ ID NO: 7895 - DNA, 1515 bp, Artificial Sequence
  Synthetic Polynucloetide
atggccttaccagtgaccgccttgctcctgccgctggccttgctgctccacgccgccaggccgagctacgtgctgacacagcctccatccgtgtctgtggctccaggacagaccgccagaatcacatgcggcggcaagaacatcggcagcaagagcgtgcactggtatcagcagccacctggacaggctccagtggtggtggtgtacgacgacagcgatagacctagcggcatccccgagagattcagcggcagcaattccggcaataccgccacactgaccatcagcagagtggaagctggcgacgaggccgtgtactactgccaagtgtgggacagcagcagcgatcacgtggtgtttggcggcggaacaaagctgacagtgcttggcggaggcggaagtggaggcggaggatctggcggcggaggctctcaactccagctgcaagagtctggccctggcctggtcaagcctagcgaaacactgagcctgacctgtaccgtgtctggcggctctatcagctccggcagctatttctggggctggatcagacaacctcctggcaaaggactggaatggatcggctccatctactacagcggcatcacctactacaaccccagcctgaagtccagagtgaccatctccgtggacaccagcaagaaccagttctccctgaagctgagcagcgtgacagccgccgataccgccgtgtattattgtgccagacatgacggcgctgtggccggcctgtttgattattggggacagggcaccctggtcaccgtgtcatctgctacgcgtgagcagaaactgatctcggaagaggatctggcgaagcccaccacgacgccagcgccgcgaccaccaacaccggcgcccaccatcgcgtcgcagcccctgtccctgcgcccagaggcgtgccggccagcggcggggggcgcagtgcacacgagggggctggacttcgcctgtgacatctacatctgggcgcccttggccgggacttgtggggtccttctcctgtcactggttatcaccctttactgcaaacggggcagaaagaaactcctgtatatattcaaacaaccatttatgagaccagtacaaactactcaagaggaagatggctgtagctgccgatttccagaagaagaagaaggaggatgtgaactgagagtgaagttcagcaggagcgcagacgcccccgcgtaccagcagggccagaaccagctctataacgagctgaatctaggacgaagagaggagtacgatgttttggacaagagacgtggccgggaccctgagatggggggaaagccgagaaggaagaaccctcaggaaggcctgtacaatgaactgcagaaagataagatggcggaggcctacagtgagattgggatgaaaggcgagcgccggaggggcaaggggcacgatggcctttaccagggtctcagtacagccaccaaggacacctacgacgcccttcacatgcaggccctgccccctcgctga

SEQ ID NO: 7896 - DNA, 1515 bp, Artificial Sequence
  Synthetic Polynucloetide
atggccttaccagtgaccgccttgctcctgccgctggccttgctgctccacgccgccaggccgcaactccagctgcaagagtctggccctggcctggtcaagcctagcgaaacactgagcctgacctgtaccgtgtctggcggctctatcagctccggcagctatttctggggctggatcagacaacctcctggcaaaggactggaatggatcggctccatctactacagcggcatcacctactacaaccccagcctgaagtccagagtgaccatctccgtggacaccagcaagaaccagttctccctgaagctgagcagcgtgacagccgccgataccgccgtgtattattgtgccagacatgacggcgctgtggccggcctgtttgattattggggacagggcaccctggtcaccgtgtcatctgctggcggaggcggaagtggaggcggaggatctggcggcggaggctctagctacgtgctgacacagcctccatccgtgtctgtggctccaggacagaccgccagaatcacatgcggcggcaagaacatcggcagcaagagcgtgcactggtatcagcagccacctggacaggctccagtggtggtggtgtacgacgacagcgatagacctagcggcatccccgagagattcagcggcagcaattccggcaataccgccacactgaccatcagcagagtggaagctggcgacgaggccgtgtactactgccaagtgtgggacagcagcagcgatcacgtggtgtttggcggcggaacaaagctgacagtgcttacgcgtgagcagaaactgatctcggaagaggatctggcgaagcccaccacgacgccagcgccgcgaccaccaacaccggcgcccaccatcgcgtcgcagcccctgtccctgcgcccagaggcgtgccggccagcggcggggggcgcagtgcacacgagggggctggacttcgcctgtgacatctacatctgggcgcccttggccgggacttgtggggtccttctcctgtcactggttatcaccctttactgcaaacggggcagaaagaaactcctgtatatattcaaacaaccatttatgagaccagtacaaactactcaagaggaagatggctgtagctgccgatttccagaagaagaagaaggaggatgtgaactgagagtgaagttcagcaggagcgcagacgcccccgcgtaccagcagggccagaaccagctctataacgagctgaatctaggacgaagagaggagtacgatgttttggacaagagacgtggccgggaccctgagatggggggaaagccgagaaggaagaaccctcaggaaggcctgtacaatgaactgcagaaagataagatggcggaggcctacagtgagattgggatgaaaggcgagcgccggaggggcaaggggcacgatggcctttaccagggtctcagtacagccaccaaggacacctacgacgcccttcacatgcaggccctgccccctcgctga

SEQ ID NO: 7897 - DNA, 2754 bp, Artificial Sequence
  Synthetic Polynucloetide
atggccttaccagtgaccgccttgctcctgccgctggccttgctgctccacgccgccaggccgagctacgtgctgacacagcctccatccgtgtctgtggctccaggacagaccgccagaatcacatgcggcggcaagaacatcggcagcaagagcgtgcactggtatcagcagccacctggacaggctccagtggtggtggtgtacgacgacagcgatagacctagcggcatccccgagagattcagcggcagcaattccggcaataccgccacactgaccatcagcagagtggaagctggcgacgaggccgtgtactactgccaagtgtgggacagcagcagcgatcacgtggtgtttggcggcggaacaaagctgacagtgcttggcggaggcggaagtggaggcggaggatctggcggcggaggctctcaactccagctgcaagagtctggccctggcctggtcaagcctagcgaaacactgagcctgacctgtaccgtgtctggcggctctatcagctccggcagctatttctggggctggatcagacaacctcctggcaaaggactggaatggatcggctccatctactacagcggcatcacctactacaaccccagcctgaagtccagagtgaccatctccgtggacaccagcaagaaccagttctccctgaagctgagcagcgtgacagccgccgataccgccgtgtattattgtgccagacatgacggcgctgtggccggcctgtttgattattggggacagggcaccctggtcaccgtgtcatctgctacgcgtgagcagaaactgatctcggaagaggatctggcgaagcccaccacgacgccagcgccgcgaccaccaacaccggcgcccaccatcgcgtcgcagcccctgtccctgcgcccagaggcgtgccggccagcggcggggggcgcagtgcacacgagggggctggacttcgcctgtgacatctacatctgggcgcccttggccgggacttgtggggtccttctcctgtcactggttatcaccctttactgcgggcgcgccagagtgaagttcagcaggagcgcagacgcccccgcgtaccagcagggccagaaccagctctataacgagctgaatctaggacgaagagaggagtacgatgttttggacaagagacgtggccgggaccctgagatggggggaaagccgagaaggaagaaccctcaggaaggcctgtacaatgaactgcagaaagataagatggcggaggcctacagtgagattgggatgaaaggcgagcgccggaggggcaaggggcacgatggcctttaccagggtctcagtacagccaccaaggacacctacgacgcccttcacatgcaggccctgccccctcgctctagaggatctggagcaacaaacttctcactactcaaacaagcaggtgacgtggaggagaatcccgggcctgggatccacatggccacttacgaggttctctgtgaggtggcgcggaaactgggcacggatgacagggaagtggtattgttcctcctaaacgtgttcatacctcaacccacactggcccaattaattggagctcttagagctttaaaggaggagggcaggttaacgtttcccctgttagcggaatgtctgtttcgtgcaggtcgcagagacctcttgcgcgacctgcttcacttagacccgcgttttttagagcgccacctagcgggcacaatgagttatttcagcccttatcagctcactgttctccacgtagacggggagctgtgtgcgagggatattaggtctttgatatttttaagcaaggacactatagggtctcgcagcacaccacagacattcttacactgggtgtactgtatggaaaacttagacctactgggtcccactgacgtggatgccctaatgtcaatgcttagatctttgtcaagagtagacctacagcgccaagtgcaaaccctaatgggccttcacctttccggcccatcacactcccaacactatcgccatacaccactcgagaccgatttctacgactacaaggacgacgatgacaagactagtggctccggcgagggcagaggaagtctactaacctgcggagatgtggaagaaaatcctggcccacatatgaccgagtacaagcccacggtgcgcctcgccacccgcgacgacgtccccagggccgtacgcaccctcgccgccgcgttcgccgactaccccgccacgcgccacaccgtcgatccggaccgccacatcgagcgggtcaccgagctgcaagaactcttcctcacgcgcgtcgggctcgacatcggcaaggtgtgggtcgcggacgacggcgccgcggtggcggtctggaccacgccggagagcgtcgaagcgggggcggtgttcgccgagatcggcccgcgcatggccgagttgagcggttcccggctggccgcgcagcaacagatggaaggcctcctggcgccgcaccggcccaaggagcccgcgtggttcctggccaccgtcggcgtctcgcccgaccaccagggcaagggtctgggcagcgccgtcgtgctccccggagtggaggcggccgagcgcgccggggtgcccgccttcctggagacctccgcgccccgcaacctccccttctacgagcggctcggcttcaccgtcaccgccgacgtcgaggtgcccgaaggaccgcgcacctggtgcatgacccgcaagcccggtgcctga

SEQ ID NO: 7898 - DNA, 2574 bp, Artificial Sequence
  Synthetic Polynucloetide
atggccttaccagtgaccgccttgctcctgccgctggccttgctgctccacgccgccaggccgagctacgtgctgacacagcctccatccgtgtctgtggctccaggacagaccgccagaatcacatgcggcggcaagaacatcggcagcaagagcgtgcactggtatcagcagccacctggacaggctccagtggtggtggtgtacgacgacagcgatagacctagcggcatccccgagagattcagcggcagcaattccggcaataccgccacactgaccatcagcagagtggaagctggcgacgaggccgtgtactactgccaagtgtgggacagcagcagcgatcacgtggtgtttggcggcggaacaaagctgacagtgcttctcgagatccagaaccctgatcctgccgtgtaccagctgcgggatagcaagagcagcgacaagagcgtgtgtctgttcaccgacttcgacagccagaccaacgtgtcccagagcaaggactccgacgtgtacatcaccgataagtgcgtgctggacatgcggagcatggacttcaagagcaactccgccgtggcctggtccaacaagtccgatttcgcctgcgccaacgccttcaacaacagcattatccccgaggacacattcttcccaagcagcgacgtgccctgcgacgtgaagctggtggaaaagagcttcgagacagacaccaacctgaacttccagaacctgagcgtgatcggcttcagaatcctgctgctgaaagtggccggctttaacctgctgatgaccctgcggctgtggtccagccgcgccaagagaagcggatctggcgtgaagcagaccctgaatttcgacctgctgaagctggctggcgacgtggaatccaacccaggccctactagtatggactggatttggcgcatccttttccttgtcggcgctgctaccggcgcgcattccttcgaacaactccagctgcaagagtctggccctggcctggtcaagcctagcgaaacactgagcctgacctgtaccgtgtctggcggctctatcagctccggcagctatttctggggctggatcagacaacctcctggcaaaggactggaatggatcggctccatctactacagcggcatcacctactacaaccccagcctgaagtccagagtgaccatctccgtggacaccagcaagaaccagttctccctgaagctgagcagcgtgacagccgccgataccgccgtgtattattgtgccagacatgacggcgctgtggccggcctgtttgattattggggacagggcaccctggtcaccgtgtcatctgctacgcgtgaggacctgaagaacgtgttcccacctgaggtggccgtgttcgagcctagcaaggccgagatcgcccacacccagaaagccaccctcgtgtgcctggctaccggcttctaccccgaccatgtggaactgtcttggtgggtcaacggcaaagaggtgcacagcggcgtgtgtaccgacccccagccactgaaagaacagcccgccctgaacgacagccggtactgcctgagcagcagactgagagtgtccgccaccttctggcagaacccccggaaccacttcagatgccaggtgcagttctacggcctgagcgagaacgacgagtggacccaggacagagccaagcccgtgacccagatcgtgtctgccgaagcctggggcagagccgattgcggcatcaccagcgccagctaccaccagggcgtgctgagcgccaccatcctgtacgagatcctgctgggcaaggccaccctgtacgccgtgctggtgtctgccctggtgctgatggctatggtcaagcggaaggacagccggggaagggccaagcgatctggatctggagcaacaaacttctcactactcaaacaagcaggtgacgtggaggagaatcccgggccttctagaggccatatgaccgagtacaagcccacggtgcgcctcgccacccgcgacgacgtccccagggccgtacgcaccctcgccgccgcgttcgccgactaccccgccacgcgccacaccgtcgatccggaccgccacatcgagcgggtcaccgagctgcaagaactcttcctcacgcgcgtcgggctcgacatcggcaaggtgtgggtcgcggacgacggcgccgcggtggcggtctggaccacgccggagagcgtcgaagcgggggcggtgttcgccgagatcggcccgcgcatggccgagttgagcggttcccggctggccgcgcagcaacagatggaaggcctcctggcgccgcaccggcccaaggagcccgcgtggttcctggccaccgtcggcgtctcgcccgaccaccagggcaagggtctgggcagcgccgtcgtgctccccggagtggaggcggccgagcgcgccggggtgcccgccttcctggagacctccgcgccccgcaacctccccttctacgagcggctcggcttcaccgtcaccgccgacgtcgaggtgcccgaaggaccgcgcacctggtgcatgacccgcaagcccggtgcctga

SEQ ID NO: 7899 - DNA, 2571 bp, Artificial Sequence
  Synthetic Polynucloetide
atggccttaccagtgaccgccttgctcctgccgctggccttgctgctccacgccgccaggccgagctacgtgctgacacagcctccatccgtgtctgtggctccaggacagaccgccagaatcacatgcggcggcaagaacatcggcagcaagagcgtgcactggtatcagcagccacctggacaggctccagtggtggtggtgtacgacgacagcgatagacctagcggcatccccgagagattcagcggcagcaattccggcaataccgccacactgaccatcagcagagtggaagctggcgacgaggccgtgtactactgccaagtgtgggacagcagcagcgatcacgtggtgtttggcggcggaacaaagctgacagtgcttctcgaggacctgaagaacgtgttcccacctgaggtggccgtgttcgagcctagcaaggccgagatcgcccacacccagaaagccaccctcgtgtgcctggctaccggcttctaccccgaccatgtggaactgtcttggtgggtcaacggcaaagaggtgcacagcggcgtgtgtaccgacccccagccactgaaagaacagcccgccctgaacgacagccggtactgcctgagcagcagactgagagtgtccgccaccttctggcagaacccccggaaccacttcagatgccaggtgcagttctacggcctgagcgagaacgacgagtggacccaggacagagccaagcccgtgacccagatcgtgtctgccgaagcctggggcagagccgattgcggcatcaccagcgccagctaccaccagggcgtgctgagcgccaccatcctgtacgagatcctgctgggcaaggccaccctgtacgccgtgctggtgtctgccctggtgctgatggctatggtcaagcggaaggacagccggggaagggccaagcgatctggatctggagcaacaaacttctcactactcaaacaagcaggtgacgtggaggagaatcccgggcctactagtatggactggatttggcgcatccttttccttgtcggcgctgctaccggcgcgcattccttcgaacaactccagctgcaagagtctggccctggcctggtcaagcctagcgaaacactgagcctgacctgtaccgtgtctggcggctctatcagctccggcagctatttctggggctggatcagacaacctcctggcaaaggactggaatggatcggctccatctactacagcggcatcacctactacaaccccagcctgaagtccagagtgaccatctccgtggacaccagcaagaaccagttctccctgaagctgagcagcgtgacagccgccgataccgccgtgtattattgtgccagacatgacggcgctgtggccggcctgtttgattattggggacagggcaccctggtcaccgtgtcatctgctacgcgtatccagaaccctgatcctgccgtgtaccagctgcgggatagcaagagcagcgacaagagcgtgtgtctgttcaccgacttcgacagccagaccaacgtgtcccagagcaaggactccgacgtgtacatcaccgataagtgcgtgctggacatgcggagcatggacttcaagagcaactccgccgtggcctggtccaacaagtccgatttcgcctgcgccaacgccttcaacaacagcattatccccgaggacacattcttcccaagcagcgacgtgccctgcgacgtgaagctggtggaaaagagcttcgagacagacaccaacctgaacttccagaacctgagcgtgatcggcttcagaatcctgctgctgaaagtggccggctttaacctgctgatgaccctgcggctgtggtccagccgcgccaagagaagcggatctggcgtgaagcagaccctgaatttcgacctgctgaagctggctggcgacgtggaatccaacccaggcccttctagaggccatatgaccgagtacaagcccacggtgcgcctcgccacccgcgacgacgtccccagggccgtacgcaccctcgccgccgcgttcgccgactaccccgccacgcgccacaccgtcgatccggaccgccacatcgagcgggtcaccgagctgcaagaactcttcctcacgcgcgtcgggctcgacatcggcaaggtgtgggtcgcggacgacggcgccgcggtggcggtctggaccacgccggagagcgtcgaagcgggggcggtgttcgccgagatcggcccgcgcatggccgagttgagcggttcccggctggccgcgcagcaacagatggaaggcctcctggcgccgcaccggcccaaggagcccgcgtggttcctggccaccgtcggcgtctcgcccgaccaccagggcaagggtctgggcagcgccgtcgtgctccccggagtggaggcggccgagcgcgccggggtgcccgccttcctggagacctccgcgccccgcaacctccccttctacgagcggctcggcttcaccgtcaccgccgacgtcgaggtgcccgaaggaccgcgcacctggtgcatgacccgcaagcccggtgcctga

SEQ ID NO: 7900 - DNA, 1869 bp, Artificial Sequence
  Synthetic Polynucloetide
atggccttaccagtgaccgccttgctcctgccgctggccttgctgctccacgccgccaggccgagctacgtgctgacacagcctccatccgtgtctgtggctccaggacagaccgccagaatcacatgcggcggcaagaacatcggcagcaagagcgtgcactggtatcagcagccacctggacaggctccagtggtggtggtgtacgacgacagcgatagacctagcggcatccccgagagattcagcggcagcaattccggcaataccgccacactgaccatcagcagagtggaagctggcgacgaggccgtgtactactgccaagtgtgggacagcagcagcgatcacgtggtgtttggcggcggaacaaagctgacagtgcttctcgaggacctgaagaacgtgttcccacctgaggtggccgtgttcgagcctagcgaggccgagatcagccacacccagaaagccaccctcgtgtgcctggctaccggcttctaccccgaccatgtggaactgtcttggtgggtcaacggcaaagaggtgcacagcggcgtgtgtaccgacccccagccactgaaagaacagcccgccctgaacgacagccggtactgcctgagcagcagactgagagtgtccgccaccttctggcagaacccccggaaccacttcagatgccaggtgcagttctacggcctgagcgagaacgacgagtggacccaggacagagccaagcccgtgacccagatcgtgtctgccgaagcctggggcagagccgattgcggctttaccagcgagagctaccagcagggcgtgctgagcgccaccatcctgtacgagatcctgctgggcaaggccaccctgtacgccgtgctggtgtctgccctggtgctgatggctatggtcaagcggaaggacagccggggaagggccaagcgatctggatctggagcaacaaacttctcactactcaaacaagcaggtgacgtggaggagaatcccgggcctactagtatggactggatttggcgcatccttttccttgtcggcgctgctaccggcgcgcattccttcgaacaactccagctgcaagagtctggccctggcctggtcaagcctagcgaaacactgagcctgacctgtaccgtgtctggcggctctatcagctccggcagctatttctggggctggatcagacaacctcctggcaaaggactggaatggatcggctccatctactacagcggcatcacctactacaaccccagcctgaagtccagagtgaccatctccgtggacaccagcaagaaccagttctccctgaagctgagcagcgtgacagccgccgataccgccgtgtattattgtgccagacatgacggcgctgtggccggcctgtttgattattggggacagggcaccctggtcaccgtgtcatctgctacgcgtatccagaaccctgatcctgccgtgtaccagctgcgggatagcaagagcagcgacaagagcgtgtgtctgttcaccgacttcgacagccagaccaacgtgtcccagagcaaggactccgacgtgtacatcaccgataagtgcgtgctggacatgcggagcatggacttcaagagcaactccgccgtggcctggtccaacaagtccgatttcgcctgcgccaacgccttcaacaacagcattatccccgaggacacattcttcccaagccccgagagcagctgcgacgtgaagctggtggaaaagagcttcgagacagacaccaacctgaacttccagaacctgagcgtgatcggcttcagaatcctgctgctgaaagtggccggctttaacctgctgatgaccctgcggctgtggtccagc

SEQ ID NO: 7901 - DNA, 2544 bp, Artificial Sequence
  Synthetic Polynucloetide
atggccttaccagtgaccgccttgctcctgccgctggccttgctgctccacgccgccaggccgagctacgtgctgacacagcctccatccgtgtctgtggctccaggacagaccgccagaatcacatgcggcggcaagaacatcggcagcaagagcgtgcactggtatcagcagccacctggacaggctccagtggtggtggtgtacgacgacagcgatagacctagcggcatccccgagagattcagcggcagcaattccggcaataccgccacactgaccatcagcagagtggaagctggcgacgaggccgtgtactactgccaagtgtgggacagcagcagcgatcacgtggtgtttggcggcggaacaaagctgacagtgcttctcgaggacctgaagaacgtgttcccacctgaggtggccgtgttcgagcctagcgaggccgagatcagccacacccagaaagccaccctcgtgtgcctggctaccggcttctaccccgaccatgtggaactgtcttggtgggtcaacggcaaagaggtgcacagcggcgtgtgtaccgacccccagccactgaaagaacagcccgccctgaacgacagccggtactgcctgagcagcagactgagagtgtccgccaccttctggcagaacccccggaaccacttcagatgccaggtgcagttctacggcctgagcgagaacgacgagtggacccaggacagagccaagcccgtgacccagatcgtgtctgccgaagcctggggcagagccgattgcggctttaccagcgagagctaccagcagggcgtgctgagcgccaccatcctgtacgagatcctgctgggcaaggccaccctgtacgccgtgctggtgtctgccctggtgctgatggctatggtcaagcggaaggacagccggggaagggccaagcgatctggatctggagcaacaaacttctcactactcaaacaagcaggtgacgtggaggagaatcccgggcctactagtatggactggatttggcgcatccttttccttgtcggcgctgctaccggcgcgcattccttcgaacaactccagctgcaagagtctggccctggcctggtcaagcctagcgaaacactgagcctgacctgtaccgtgtctggcggctctatcagctccggcagctatttctggggctggatcagacaacctcctggcaaaggactggaatggatcggctccatctactacagcggcatcacctactacaaccccagcctgaagtccagagtgaccatctccgtggacaccagcaagaaccagttctccctgaagctgagcagcgtgacagccgccgataccgccgtgtattattgtgccagacatgacggcgctgtggccggcctgtttgattattggggacagggcaccctggtcaccgtgtcatctgctacgcgtatccagaaccctgatcctgccgtgtaccagctgcgggatagcaagagcagcgacaagagcgtgtgtctgttcaccgacttcgacagccagaccaacgtgtcccagagcaaggactccgacgtgtacatcaccgataagtgcgtgctggacatgcggagcatggacttcaagagcaactccgccgtggcctggtccaacaagtccgatttcgcctgcgccaacgccttcaacaacagcattatccccgaggacacattcttcccaagccccgagagcagctgcgacgtgaagctggtggaaaagagcttcgagacagacaccaacctgaacttccagaacctgagcgtgatcggcttcagaatcctgctgctgaaagtggccggctttaacctgctgatgaccctgcggctgtggtccagccgcgccaagagaagcggatctggcgtgaagcagaccctgaatttcgacctgctgaagctggctggcgacgtggaatccaacccaggcccttctagaggcgggatccacaccatggctacctacgaggtgctgtgcgaggtggcaagaaagctgggcaccgacgacagagaagtggtgctgttcctgctgaacgtgttcatccctcagcctacactggcccagctgatcggtgcactgagagccctgaaagaggaaggccggctgacctttcctctgctggccgaatgcctgttcagagccggaagaagggatctgctgcgggacctgctgcatctggaccccagatttctggaaagacacctggccggcaccatgagctacttcagcccttaccagctgaccgtgctgcacgttgacggcgaactgtgcgccagagatattcggagcctgatcttcctgagcaaggacaccatcggcagccggtctacccctcagacatttctgcactgggtgtactgcatggaaaacctggacctgctcggccccacagatgtggatgccctgatgtccatgctgagaagcctgagcagagtggacctccagagacaggtgcagacactgatgggactgcacctgagcggacctagccacagccagcactacagacacacccct

SEQ ID NO: 7902 - DNA, 1881 bp, Artificial Sequence
  Synthetic Polynucloetide
atggccttaccagtgaccgccttgctcctgccgctggccttgctgctccacgccgccaggccgagctacgtgctgacacagcctccatccgtgtctgtggctccaggacagaccgccagaatcacatgcggcggcaagaacatcggcagcaagagcgtgcactggtatcagcagccacctggacaggctccagtggtggtggtgtacgacgacagcgatagacctagcggcatccccgagagattcagcggcagcaattccggcaataccgccacactgaccatcagcagagtggaagctggcgacgaggccgtgtactactgccaagtgtgggacagcagcagcgatcacgtggtgtttggcggcggaacaaagctgacagtgcttctcgagatccagaaccctgatcctgccgtgtaccagctgcgggatagcaagagcagcgacaagagcgtgtgtctgttcaccgacttcgacagccagaccaacgtgtcccagagcaaggactccgacgtgtacatcaccgataagtgcgtgctggacatgcggagcatggacttcaagagcaactccgccgtggcctggtccaacaagtccgatttcgcctgcgccaacgccttcaacaacagcattatccccgaggacacattcttcccaagccccgagagcagctgcgacgtgaagctggtggaaaagagcttcgagacagacaccaacctgaacttccagaacctgagcgtgatcggcttcagaatcctgctgctgaaagtggccggctttaacctgctgatgaccctgcggctgtggtccagccgcgccaagagaagcggatctggcgtgaagcagaccctgaatttcgacctgctgaagctggctggcgacgtggaatccaacccaggccctactagtatggactggatttggcgcatccttttccttgtcggcgctgctaccggcgcgcattccttcgaacaactccagctgcaagagtctggccctggcctggtcaagcctagcgaaacactgagcctgacctgtaccgtgtctggcggctctatcagctccggcagctatttctggggctggatcagacaacctcctggcaaaggactggaatggatcggctccatctactacagcggcatcacctactacaaccccagcctgaagtccagagtgaccatctccgtggacaccagcaagaaccagttctccctgaagctgagcagcgtgacagccgccgataccgccgtgtattattgtgccagacatgacggcgctgtggccggcctgtttgattattggggacagggcaccctggtcaccgtgtcatctgctacgcgtgaggacctgaagaacgtgttcccacctgaggtggccgtgttcgagcctagcgaggccgagatcagccacacccagaaagccaccctcgtgtgcctggctaccggcttctaccccgaccatgtggaactgtcttggtgggtcaacggcaaagaggtgcacagcggcgtgtgtaccgacccccagccactgaaagaacagcccgccctgaacgacagccggtactgcctgagcagcagactgagagtgtccgccaccttctggcagaacccccggaaccacttcagatgccaggtgcagttctacggcctgagcgagaacgacgagtggacccaggacagagccaagcccgtgacccagatcgtgtctgccgaagcctggggcagagccgattgcggctttaccagcgagagctaccagcagggcgtgctgagcgccaccatcctgtacgagatcctgctgggcaaggccaccctgtacgccgtgctggtgtctgccctggtgctgatggctatggtcaagcggaaggacagccgggga

SEQ ID NO: 7903 - DNA, 2547 bp, Artificial Sequence
  Synthetic Polynucloetide
atggccttaccagtgaccgccttgctcctgccgctggccttgctgctccacgccgccaggccgagctacgtgctgacacagcctccatccgtgtctgtggctccaggacagaccgccagaatcacatgcggcggcaagaacatcggcagcaagagcgtgcactggtatcagcagccacctggacaggctccagtggtggtggtgtacgacgacagcgatagacctagcggcatccccgagagattcagcggcagcaattccggcaataccgccacactgaccatcagcagagtggaagctggcgacgaggccgtgtactactgccaagtgtgggacagcagcagcgatcacgtggtgtttggcggcggaacaaagctgacagtgcttctcgagatccagaaccctgatcctgccgtgtaccagctgcgggatagcaagagcagcgacaagagcgtgtgtctgttcaccgacttcgacagccagaccaacgtgtcccagagcaaggactccgacgtgtacatcaccgataagtgcgtgctggacatgcggagcatggacttcaagagcaactccgccgtggcctggtccaacaagtccgatttcgcctgcgccaacgccttcaacaacagcattatccccgaggacacattcttcccaagccccgagagcagctgcgacgtgaagctggtggaaaagagcttcgagacagacaccaacctgaacttccagaacctgagcgtgatcggcttcagaatcctgctgctgaaagtggccggctttaacctgctgatgaccctgcggctgtggtccagccgcgccaagagaagcggatctggcgtgaagcagaccctgaatttcgacctgctgaagctggctggcgacgtggaatccaacccaggccctactagtatggactggatttggcgcatccttttccttgtcggcgctgctaccggcgcgcattccttcgaacaactccagctgcaagagtctggccctggcctggtcaagcctagcgaaacactgagcctgacctgtaccgtgtctggcggctctatcagctccggcagctatttctggggctggatcagacaacctcctggcaaaggactggaatggatcggctccatctactacagcggcatcacctactacaaccccagcctgaagtccagagtgaccatctccgtggacaccagcaagaaccagttctccctgaagctgagcagcgtgacagccgccgataccgccgtgtattattgtgccagacatgacggcgctgtggccggcctgtttgattattggggacagggcaccctggtcaccgtgtcatctgctacgcgtgaggacctgaagaacgtgttcccacctgaggtggccgtgttcgagcctagcgaggccgagatcagccacacccagaaagccaccctcgtgtgcctggctaccggcttctaccccgaccatgtggaactgtcttggtgggtcaacggcaaagaggtgcacagcggcgtgtgtaccgacccccagccactgaaagaacagcccgccctgaacgacagccggtactgcctgagcagcagactgagagtgtccgccaccttctggcagaacccccggaaccacttcagatgccaggtgcagttctacggcctgagcgagaacgacgagtggacccaggacagagccaagcccgtgacccagatcgtgtctgccgaagcctggggcagagccgattgcggctttaccagcgagagctaccagcagggcgtgctgagcgccaccatcctgtacgagatcctgctgggcaaggccaccctgtacgccgtgctggtgtctgccctggtgctgatggctatggtcaagcggaaggacagccggggaagggccaagcgatctggatctggagcaacaaacttctcactactcaaacaagcaggtgacgtggaggagaatcccgggccttctagaggcgggatccacaccatggctacctacgaggtgctgtgcgaggtggcaagaaagctgggcaccgacgacagagaagtggtgctgttcctgctgaacgtgttcatccctcagcctacactggcccagctgatcggtgcactgagagccctgaaagaggaaggccggctgacctttcctctgctggccgaatgcctgttcagagccggaagaagggatctgctgcgggacctgctgcatctggaccccagatttctggaaagacacctggccggcaccatgagctacttcagcccttaccagctgaccgtgctgcacgttgacggcgaactgtgcgccagagatattcggagcctgatcttcctgagcaaggacaccatcggcagccggtctacccctcagacatttctgcactgggtgtactgcatggaaaacctggacctgctcggccccacagatgtggatgccctgatgtccatgctgagaagcctgagcagagtggacctccagagacaggtgcagacactgatgggactgcacctgagcggacctagccacagccagcactacagacacacccct

SEQ ID NO: 7904 - DNA, 2706 bp, Artificial Sequence
  Synthetic Polynucloetide
atggccttaccagtgaccgccttgctcctgccgctggccttgctgctccacgccgccaggccgctcgaggggaaaccaattcccaaccctcttctgggactggattcaaccggcagcggcgaggacctgaagaacgtgttcccacctgaggtggccgtgttcgagcctagcaaggccgagatcgcccacacccagaaagccaccctcgtgtgcctggctaccggcttctaccccgaccatgtggaactgtcttggtgggtcaacggcaaagaggtgcacagcggcgtgtgtaccgacccccagccactgaaagaacagcccgccctgaacgacagccggtactgcctgagcagcagactgagagtgtccgccaccttctggcagaacccccggaaccacttcagatgccaggtgcagttctacggcctgagcgagaacgacgagtggacccaggacagagccaagcccgtgacccagatcgtgtctgccgaagcctggggcagagccgattgcggcatcaccagcgccagctaccaccagggcgtgctgagcgccaccatcctgtacgagatcctgctgggcaaggccaccctgtacgccgtgctggtgtctgccctggtgctgatggctatggtcaagcggaaggacagccggggaagggccaagcgatctggatctggagcaacaaacttctcactactcaaacaagcaggtgacgtggaggagaatcccgggcctactagcatggccttaccagtgaccgccttgctcctgccgctggccttgctgctccacgccgccaggccgagctacgtgctgacacagcctccatccgtgtctgtggctccaggacagaccgccagaatcacatgcggcggcaagaacatcggcagcaagagcgtgcactggtatcagcagccacctggacaggctccagtggtggtggtgtacgacgacagcgatagacctagcggcatccccgagagattcagcggcagcaattccggcaataccgccacactgaccatcagcagagtggaagctggcgacgaggccgtgtactactgccaagtgtgggacagcagcagcgatcacgtggtgtttggcggcggaacaaagctgacagtgcttggcggaggcggaagtggaggcggaggatctggcggcggaggctctcaactccagctgcaagagtctggccctggcctggtcaagcctagcgaaacactgagcctgacctgtaccgtgtctggcggctctatcagctccggcagctatttctggggctggatcagacaacctcctggcaaaggactggaatggatcggctccatctactacagcggcatcacctactacaaccccagcctgaagtccagagtgaccatctccgtggacaccagcaagaaccagttctccctgaagctgagcagcgtgacagccgccgataccgccgtgtattattgtgccagacatgacggcgctgtggccggcctgtttgattattggggacagggcaccctggtcaccgtgtcatctgctacgcgtgagcagaaactgatctcggaagaggatgggagcggcatccagaaccctgatcctgccgtgtaccagctgcgggatagcaagagcagcgacaagagcgtgtgtctgttcaccgacttcgacagccagaccaacgtgtcccagagcaaggactccgacgtgtacatcaccgataagtgcgtgctggacatgcggagcatggacttcaagagcaactccgccgtggcctggtccaacaagtccgatttcgcctgcgccaacgccttcaacaacagcattatccccgaggacacattcttcccaagcagcgacgtgccctgcgacgtgaagctggtggaaaagagcttcgagacagacaccaacctgaacttccagaacctgagcgtgatcggcttcagaatcctgctgctgaaagtggccggctttaacctgctgatgaccctgcggctgtggtccagccgcgccaagagaagcggatctggcgtgaagcagaccctgaatttcgacctgctgaagctggctggcgacgtggaatccaacccaggcccttctagaggccatatgaccgagtacaagcccacggtgcgcctcgccacccgcgacgacgtccccagggccgtacgcaccctcgccgccgcgttcgccgactaccccgccacgcgccacaccgtcgatccggaccgccacatcgagcgggtcaccgagctgcaagaactcttcctcacgcgcgtcgggctcgacatcggcaaggtgtgggtcgcggacgacggcgccgcggtggcggtctggaccacgccggagagcgtcgaagcgggggcggtgttcgccgagatcggcccgcgcatggccgagttgagcggttcccggctggccgcgcagcaacagatggaaggcctcctggcgccgcaccggcccaaggagcccgcgtggttcctggccaccgtcggcgtctcgcccgaccaccagggcaagggtctgggcagcgccgtcgtgctccccggagtggaggcggccgagcgcgccggggtgcccgccttcctggagacctccgcgccccgcaacctccccttctacgagcggctcggcttcaccgtcaccgccgacgtcgaggtgcccgaaggaccgcgcacctggtgcatgacccgcaagcccggtgcctga

SEQ ID NO: 7905 - DNA, 2709 bp, Artificial Sequence
  Synthetic Polynucloetide
atggccttaccagtgaccgccttgctcctgccgctggccttgctgctccacgccgccaggccgctcgagcagaaactgatctcggaagaggatctgggctccggcgatcgccctgatcctgccgtgtaccagctgcgggatagcaagagcagcgacaagagcgtgtgtctgttcaccgacttcgacagccagaccaacgtgtcccagagcaaggactccgacgtgtacatcaccgataagtgcgtgctggacatgcggagcatggacttcaagagcaactccgccgtggcctggtccaacaagtccgatttcgcctgcgccaacgccttcaacaacagcattatccccgaggacacattcttcccaagccccgagagcagctgcgacgtgaagctggtggaaaagagcttcgagacagacaccaacctgaacttccagaacctgagcgtgatcggcttcagaatcctgctgctgaaagtggccggctttaacctgctgatgaccctgcggctgtggtccagctctagtcgcgccaagagaagcggatctggcgtgaagcagaccctgaatttcgacctgctgaagctggctggcgacgtggaatccaacccaggccccactagcatggccttaccagtgaccgccttgctcctgccgctggccttgctgctccacgccgccaggccgagctacgtgctgacacagcctccatccgtgtctgtggctccaggacagaccgccagaatcacatgcggcggcaagaacatcggcagcaagagcgtgcactggtatcagcagccacctggacaggctccagtggtggtggtgtacgacgacagcgatagacctagcggcatccccgagagattcagcggcagcaattccggcaataccgccacactgaccatcagcagagtggaagctggcgacgaggccgtgtactactgccaagtgtgggacagcagcagcgatcacgtggtgtttggcggcggaacaaagctgacagtgcttggcggaggcggaagtggaggcggaggatctggcggcggaggctctcaactccagctgcaagagtctggccctggcctggtcaagcctagcgaaacactgagcctgacctgtaccgtgtctggcggctctatcagctccggcagctatttctggggctggatcagacaacctcctggcaaaggactggaatggatcggctccatctactacagcggcatcacctactacaaccccagcctgaagtccagagtgaccatctccgtggacaccagcaagaaccagttctccctgaagctgagcagcgtgacagccgccgataccgccgtgtattattgtgccagacatgacggcgctgtggccggcctgtttgattattggggacagggcaccctggtcaccgtgtcatctgctacgcgtgggaaaccaattcccaaccctcttctgggactggattcaaccggcagcggcgaggacctgaagaacgtgttcccacctgaggtggccgtgttcgagcctagcgaggccgagatcagccacacccagaaagccaccctcgtgtgcctggctaccggcttctaccccgaccatgtggaactgtcttggtgggtcaacggcaaagaggtgcacagcggcgtgtgtaccgacccccagccactgaaagaacagcccgccctgaacgacagccggtactgcctgagcagcagactgagagtgtccgccaccttctggcagaacccccggaaccacttcagatgccaggtgcagttctacggcctgagcgagaacgacgagtggacccaggacagagccaagcccgtgacccagatcgtgtctgccgaagcctggggcagagccgattgcggctttaccagcgagagctaccagcagggcgtgctgagcgccaccatcctgtacgagatcctgctgggcaaggccaccctgtacgccgtgctggtgtctgccctggtgctgatggctatggtcaagcggaaggacagccggggaagggccaagcgatctggatctggagcaacaaacttctcactactcaaacaagcaggtgacgtggaggagaatcccgggccttctagaggccatatgaccgagtacaagcccacggtgcgcctcgccacccgcgacgacgtccccagggccgtacgcaccctcgccgccgcgttcgccgactaccccgccacgcgccacaccgtcgatccggaccgccacatcgagcgggtcaccgagctgcaagaactcttcctcacgcgcgtcgggctcgacatcggcaaggtgtgggtcgcggacgacggcgccgcggtggcggtctggaccacgccggagagcgtcgaagcgggggcggtgttcgccgagatcggcccgcgcatggccgagttgagcggttcccggctggccgcgcagcaacagatggaaggcctcctggcgccgcaccggcccaaggagcccgcgtggttcctggccaccgtcggcgtctcgcccgaccaccagggcaagggtctgggcagcgccgtcgtgctccccggagtggaggcggccgagcgcgccggggtgcccgccttcctggagacctccgcgccccgcaacctccccttctacgagcggctcggcttcaccgtcaccgccgacgtcgaggtgcccgaaggaccgcgcacctggtgcatgacccgcaagcccggtgcctga

SEQ ID NO: 7906 - DNA, 2571 bp, Artificial Sequence
  Synthetic Polynucloetide
atggccttaccagtgaccgccttgctcctgccgctggccttgctgctccacgccgccaggccgagctacgtgctgacacagcctccatccgtgtctgtggctccaggacagaccgccagaatcacatgcggcggcaagaacatcggcagcaagagcgtgcactggtatcagcagccacctggacaggctccagtggtggtggtgtacgacgacagcgatagacctagcggcatccccgagagattcagcggcagcaattccggcaataccgccacactgaccatcagcagagtggaagctggcgacgaggccgtgtactactgccaagtgtgggacagcagcagcgatcacgtggtgtttggcggcggaacaaagctgacagtgcttctcgaggacctgaagaacgtgttcccacctgaggtggccgtgttcgagcctagcgaggccgagatcagccacacccagaaagccaccctcgtgtgcctggctaccggcttctaccccgaccatgtggaactgtcttggtgggtcaacggcaaagaggtgcacagcggcgtgtctaccgacccccagccactgaaagaacagcccgccctgaacgacagccggtactgcctgagcagcagactgagagtgtccgccaccttctggcagaacccccggaaccacttcagatgccaggtgcagttctacggcctgagcgagaacgacgagtggacccaggacagagccaagcccgtgacccagatcgtgtctgccgaagcctggggcagagccgattgcggctttaccagcgagagctaccagcagggcgtgctgagcgccaccatcctgtacgagatcctgctgggcaaggccaccctgtacgccgtgctggtgtctgccctggtgctgatggctatggtcaagcggaaggacagccggggaagggccaagcgatctggatctggagcaacaaacttctcactactcaaacaagcaggtgacgtggaggagaatcccgggcctactagtatggactggatttggcgcatccttttccttgtcggcgctgctaccggcgcgcattccttcgaacaactccagctgcaagagtctggccctggcctggtcaagcctagcgaaacactgagcctgacctgtaccgtgtctggcggctctatcagctccggcagctatttctggggctggatcagacaacctcctggcaaaggactggaatggatcggctccatctactacagcggcatcacctactacaaccccagcctgaagtccagagtgaccatctccgtggacaccagcaagaaccagttctccctgaagctgagcagcgtgacagccgccgataccgccgtgtattattgtgccagacatgacggcgctgtggccggcctgtttgattattggggacagggcaccctggtcaccgtgtcatctgctacgcgtatccagaaccctgatcctgccgtgtaccagctgcgggatagcaagagcagcgacaagagcgtgtgtctgttcaccgacttcgacagccagaccaacgtgtcccagagcaaggactccgacgtgtacatcaccgataagaccgtgctggacatgcggagcatggacttcaagagcaactccgccgtggcctggtccaacaagtccgatttcgcctgcgccaacgccttcaacaacagcattatccccgaggacacattcttcccaagccccgagagcagctgcgacgtgaagctggtggaaaagagcttcgagacagacaccaacctgaacttccagaacctgagcgtgatcggcttcagaatcctgctgctgaaagtggccggctttaacctgctgatgaccctgcggctgtggtccagccgcgccaagagaagcggatctggcgtgaagcagaccctgaatttcgacctgctgaagctggctggcgacgtggaatccaacccaggcccttctagaggccatatgaccgagtacaagcccacggtgcgcctcgccacccgcgacgacgtccccagggccgtacgcaccctcgccgccgcgttcgccgactaccccgccacgcgccacaccgtcgatccggaccgccacatcgagcgggtcaccgagctgcaagaactcttcctcacgcgcgtcgggctcgacatcggcaaggtgtgggtcgcggacgacggcgccgcggtggcggtctggaccacgccggagagcgtcgaagcgggggcggtgttcgccgagatcggcccgcgcatggccgagttgagcggttcccggctggccgcgcagcaacagatggaaggcctcctggcgccgcaccggcccaaggagcccgcgtggttcctggccaccgtcggcgtctcgcccgaccaccagggcaagggtctgggcagcgccgtcgtgctccccggagtggaggcggccgagcgcgccggggtgcccgccttcctggagacctccgcgccccgcaacctccccttctacgagcggctcggcttcaccgtcaccgccgacgtcgaggtgcccgaaggaccgcgcacctggtgcatgacccgcaagcccggtgcctga

SEQ ID NO: 7907 - DNA, 2817 bp, Artificial Sequence
  Synthetic Polynucloetide
atggccttaccagtgaccgccttgctcctgccgctggccttgctgctccacgccgccaggccgagctacgtgctgacacagcctccatccgtgtctgtggctccaggacagaccgccagaatcacatgcggcggcaagaacatcggcagcaagagcgtgcactggtatcagcagccacctggacaggctccagtggtggtggtgtacgacgacagcgatagacctagcggcatccccgagagattcagcggcagcaattccggcaataccgccacactgaccatcagcagagtggaagctggcgacgaggccgtgtactactgccaagtgtgggacagcagcagcgatcacgtggtgtttggcggcggaacaaagctgacagtgcttctcgaggacctgaagaacgtgttcccacctgaggtggccgtgttcgagcctagcgaggccgagatcagccacacccagaaagccaccctcgtgtgcctggctaccggcttctaccccgaccatgtggaactgtcttggtgggtcaacggcaaagaggtgcacagcggcgtgtctaccgacccccagccactgaaagaacagcccgccctgaacgacagccggtactgcctgagcagcagactgagagtgtccgccaccttctggcagaacccccggaaccacttcagatgccaggtgcagttctacggcctgagcgagaacgacgagtggacccaggacagagccaagcccgtgacccagatcgtgtctgccgaagcctggggcagagccgattgcggctttaccagcgagagctaccagcagggcgtgctgagcgccaccatcctgtacgagatcctgctgggcaaggccaccctgtacgccgtgctggtgtctgccctggtgctgatggctatggtcaagcggaaggacagccggggaagggccaagcgatctggatctggagcaacaaacttctcactactcaaacaagcaggtgacgtggaggagaatcccgggcctactagtatggactggatttggcgcatccttttccttgtcggcgctgctaccggcgcgcattccttcgaacaactccagctgcaagagtctggccctggcctggtcaagcctagcgaaacactgagcctgacctgtaccgtgtctggcggctctatcagctccggcagctatttctggggctggatcagacaacctcctggcaaaggactggaatggatcggctccatctactacagcggcatcacctactacaaccccagcctgaagtccagagtgaccatctccgtggacaccagcaagaaccagttctccctgaagctgagcagcgtgacagccgccgataccgccgtgtattattgtgccagacatgacggcgctgtggccggcctgtttgattattggggacagggcaccctggtcaccgtgtcatctgctacgcgtgagcagaaactgatctcggaagaggatgggagcggcaccccattcccttctctggcccctcccatcatgctgctggtggacggcaagcagcagatggtggtcgtgtgcctggtgctggatgtggccccacctggactggacagccccatctggtttagcgccggcaatggctctgccctggacgcctttacctacggcccaagccctgccaccgatggcacctggacaaatctggcccacctgagcctgcccagcgaggaactggcttcttgggagcctctcgtgtgccacacaggacctggcgctgagggacacagcagatccacccagcctatgcacctgtctggcgaggccagcaccgccagaacctgtcctcaggaacctctgagaggcacccctggcggagcactgtggctgggagtgctgagactgctgctgttcaagctgctgctgtttgacctgctgctgacctgctcctgtctgtgcgatcctgccggccctctgccttctcctgccaccaccacaagactgagagccctgggcagccacagactgcaccctgccacagagacaggcggcagagaggccacaagcagccctagaccccagcccagagacagaagatggggcgataccccccctggcagaaagcctggatctccagtccgcgccaagagaagcggatctggcgtgaagcagaccctgaatttcgacctgctgaagctggctggcgacgtggaatccaacccaggcccttctagaggccatatgaccgagtacaagcccacggtgcgcctcgccacccgcgacgacgtccccagggccgtacgcaccctcgccgccgcgttcgccgactaccccgccacgcgccacaccgtcgatccggaccgccacatcgagcgggtcaccgagctgcaagaactcttcctcacgcgcgtcgggctcgacatcggcaaggtgtgggtcgcggacgacggcgccgcggtggcggtctggaccacgccggagagcgtcgaagcgggggcggtgttcgccgagatcggcccgcgcatggccgagttgagcggttcccggctggccgcgcagcaacagatggaaggcctcctggcgccgcaccggcccaaggagcccgcgtggttcctggccaccgtcggcgtctcgcccgaccaccagggcaagggtctgggcagcgccgtcgtgctccccggagtggaggcggccgagcgcgccggggtgcccgccttcctggagacctccgcgccccgcaacctccccttctacgagcggctcggcttcaccgtcaccgccgacgtcgaggtgcccgaaggaccgcgcacctggtgcatgacccgcaagcccggtgcctga

SEQ ID NO: 7908 - DNA, 2871 bp, Artificial Sequence
  Synthetic Polynucloetide
atggccttaccagtgaccgccttgctcctgccgctggccttgctgctccacgccgccaggccgctcgaggacctgaagaacgtgttcccacctgaggtggccgtgttcgagcctagcgaggccgagatcagccacacccagaaagccaccctcgtgtgcctggctaccggcttctaccccgaccatgtggaactgtcttggtgggtcaacggcaaagaggtgcacagcggcgtgtctaccgacccccagccactgaaagaacagcccgccctgaacgacagccggtactgcctgagcagcagactgagagtgtccgccaccttctggcagaacccccggaaccacttcagatgccaggtgcagttctacggcctgagcgagaacgacgagtggacccaggacagagccaagcccgtgacccagatcgtgtctgccgaagcctggggcagagccgattgcggctttaccagcgagagctaccagcagggcgtgctgagcgccaccatcctgtacgagatcctgctgggcaaggccaccctgtacgccgtgctggtgtctgccctggtgctgatggctatggtcaagcggaaggacagccggggaagggccaagcgatctggatctggagcaacaaacttctcactactcaaacaagcaggtgacgtggaggagaatcccgggcctactagcatggccttaccagtgaccgccttgctcctgccgctggccttgctgctccacgccgccaggccgagctacgtgctgacacagcctccatccgtgtctgtggctccaggacagaccgccagaatcacatgcggcggcaagaacatcggcagcaagagcgtgcactggtatcagcagccacctggacaggctccagtggtggtggtgtacgacgacagcgatagacctagcggcatccccgagagattcagcggcagcaattccggcaataccgccacactgaccatcagcagagtggaagctggcgacgaggccgtgtactactgccaagtgtgggacagcagcagcgatcacgtggtgtttggcggcggaacaaagctgacagtgcttggcggaggcggaagtggaggcggaggatctggcggcggaggctctcaactccagctgcaagagtctggccctggcctggtcaagcctagcgaaacactgagcctgacctgtaccgtgtctggcggctctatcagctccggcagctatttctggggctggatcagacaacctcctggcaaaggactggaatggatcggctccatctactacagcggcatcacctactacaaccccagcctgaagtccagagtgaccatctccgtggacaccagcaagaaccagttctccctgaagctgagcagcgtgacagccgccgataccgccgtgtattattgtgccagacatgacggcgctgtggccggcctgtttgattattggggacagggcaccctggtcaccgtgtcatctgctacgcgtgagcagaaactgatctcggaagaggatctggggagcggcaccccattcccttctctggcccctcccatcatgctgctggtggacggcaagcagcagatggtggtcgtgtgcctggtgctggatgtggccccacctggactggacagccccatctggtttagcgccggcaatggctctgccctggacgcctttacctacggcccaagccctgccaccgatggcacctggacaaatctggcccacctgagcctgcccagcgaggaactggcttcttgggagcctctcgtgtgccacacaggacctggcgctgagggacacagcagatccacccagcctatgcacctgtctggcgaggccagcaccgccagaacctgtcctcaggaacctctgagaggcacccctggcggagcactgtggctgggagtgctgagactgctgctgttcaagctgctgctgtttgacctgctgctgacctgctcctgtctgtgcgatcctgccggccctctgccttctcctgccaccaccacaagactgagagccctgggcagccacagactgcaccctgccacagagacaggcggcagagaggccacaagcagccctagaccccagcccagagacagaagatggggcgataccccccctggcagaaagcctggatctccagtccgcgccaagagaagcggatctggcgtgaagcagaccctgaatttcgacctgctgaagctggctggcgacgtggaatccaacccaggcccttctagatctagaggccatatgaccgagtacaagcccacggtgcgcctcgccacccgcgacgacgtccccagggccgtacgcaccctcgccgccgcgttcgccgactaccccgccacgcgccacaccgtcgatccggaccgccacatcgagcgggtcaccgagctgcaagaactcttcctcacgcgcgtcgggctcgacatcggcaaggtgtgggtcgcggacgacggcgccgcggtggcggtctggaccacgccggagagcgtcgaagcgggggcggtgttcgccgagatcggcccgcgcatggccgagttgagcggttcccggctggccgcgcagcaacagatggaaggcctcctggcgccgcaccggcccaaggagcccgcgtggttcctggccaccgtcggcgtctcgcccgaccaccagggcaagggtctgggcagcgccgtcgtgctccccggagtggaggcggccgagcgcgccggggtgcccgccttcctggagacctccgcgccccgcaacctccccttctacgagcggctcggcttcaccgtcaccgccgacgtcgaggtgcccgaaggaccgcgcacctggtgcatgacccgcaagcccggtgcctga

SEQ ID NO: 7909 - DNA, 2682 bp, Artificial Sequence
  Synthetic Polynucloetide
atggccttaccagtgaccgccttgctcctgccgctggccttgctgctccacgccgccaggccgagctacgtgctgacacagcctccatccgtgtctgtggctccaggacagaccgccagaatcacatgcggcggcaagaacatcggcagcaagagcgtgcactggtatcagcagccacctggacaggctccagtggtggtggtgtacgacgacagcgatagacctagcggcatccccgagagattcagcggcagcaattccggcaataccgccacactgaccatcagcagagtggaagctggcgacgaggccgtgtactactgccaagtgtgggacagcagcagcgatcacgtggtgtttggcggcggaacaaagctgacagtgcttctcgaggggaaaccaattcccaaccctcttctgggactggattcaaccggcagcggcgacaagcagctggacgccgacgtgtcccccaagcctaccatcttcctgccctctatcgccgagacaaagctccagaaggccggcacctacctgtgcctgctggaaaagttcttcccagatgtgattaagatccactggcaggaaaagaagtccaacaccatcctgggcagccaggaaggcaacaccatgaagaccaacgacacctacatgaagttcagctggctgaccgtgcccgagaagtccctggacaaagaacacagatgcatcgtgcggcacgaaaacaacaagaacggcgtggaccaggaaatcatcttcccacccatcaagaccgatgtgattacaatggaccccaaggacaactgctccaaggacgccaacgataccctgctgctccagctgaccaacaccagcgcctactacatgtacttgttgctgctgctgaagtccgtggtgtacttcgccatcatcacatgctgcctgctgcggagaaccgccttctgctgcaacggcgagaagtctagggccaagcgatctggatctggagcaacaaacttctcactactcaaacaagcaggtgacgtggaggagaatcccgggcctactagtatggactggatttggcgcatccttttccttgtcggcgctgctaccggcgcgcattccttcgaacaactccagctgcaagagtctggccctggcctggtcaagcctagcgaaacactgagcctgacctgtaccgtgtctggcggctctatcagctccggcagctatttctggggctggatcagacaacctcctggcaaaggactggaatggatcggctccatctactacagcggcatcacctactacaaccccagcctgaagtccagagtgaccatctccgtggacaccagcaagaaccagttctccctgaagctgagcagcgtgacagccgccgataccgccgtgtattattgtgccagacatgacggcgctgtggccggcctgtttgattattggggacagggcaccctggtcaccgtgtcatctgctacgcgtgagcagaaactgatctcggaagaggatgggagcggcagccagcctcacaccaagcccagcgtgttcgtgatgaagaacggcaccaacgtggcctgcctcgtgaaagagttctaccccaaggacatcaggatcaacctggtgtccagcaagaagatcaccgagttcgaccccgccatcgtgatctcccccagcggcaagtacaacgccgtgaagctggggaagtacgaggacagcaacagcgtgacctgctccgtgcagcacgacaacaagaccgtgcacagcaccgactttgaagtgaaaaccgactccaccgaccacgtgaagcccaaagagacagagaacaccaagcagcccagcaagagctgccacaagcccaaggccatcgtgcacaccgagaaagtgaacatgatgagcctgaccgtgctgggcctgcggatgctgttcgccaaaaccgtggccgtgaacttcctgctgaccgccaagctgttcttcctccgcgccaagagaagcggatctggcgtgaagcagaccctgaatttcgacctgctgaagctggctggcgacgtggaatccaacccaggcccttctagaggccatatgaccgagtacaagcccacggtgcgcctcgccacccgcgacgacgtccccagggccgtacgcaccctcgccgccgcgttcgccgactaccccgccacgcgccacaccgtcgatccggaccgccacatcgagcgggtcaccgagctgcaagaactcttcctcacgcgcgtcgggctcgacatcggcaaggtgtgggtcgcggacgacggcgccgcggtggcggtctggaccacgccggagagcgtcgaagcgggggcggtgttcgccgagatcggcccgcgcatggccgagttgagcggttcccggctggccgcgcagcaacagatggaaggcctcctggcgccgcaccggcccaaggagcccgcgtggttcctggccaccgtcggcgtctcgcccgaccaccagggcaagggtctgggcagcgccgtcgtgctccccggagtggaggcggccgagcgcgccggggtgcccgccttcctggagacctccgcgccccgcaacctccccttctacgagcggctcggcttcaccgtcaccgccgacgtcgaggtgcccgaaggaccgcgcacctggtgcatgacccgcaagcccggtgcctga

SEQ ID NO: 7910 - DNA, 1893 bp, Artificial Sequence
  Synthetic Polynucloetide
atggccttaccagtgaccgccttgctcctgccgctggccttgctgctccacgccgccaggccgagctacgtgctgacacagcctccatccgtgtctgtggctccaggacagaccgccagaatcacatgcggcggcaagaacatcggcagcaagagcgtgcactggtatcagcagccacctggacaggctccagtggtggtggtgtacgacgacagcgatagacctagcggcatccccgagagattcagcggcagcaattccggcaataccgccacactgaccatcagcagagtggaagctggcgacgaggccgtgtactactgccaagtgtgggacagcagcagcgatcacgtggtgtttggcggcggaacaaagctgacagtgcttctcgagagccagcctcacaccaagcccagcgtgttcgtgatgaagaacggcaccaacgtggcctgcctcgtgaaagagttctaccccaaggacatcaggatcaacctggtgtccagcaagaagatcaccgagttcgaccccgccatcgtgatctcccccagcggcaagtacaacgccgtgaagctggggaagtacgaggacagcaacagcgtgacctgctccgtgcagcacgacaacaagaccgtgcacagcaccgactttgaagtgaaaaccgactccaccgaccacgtgaagcccaaagagacagagaacaccaagcagcccagcaagagctgccacaagcccaaggccatcgtgcacaccgagaaagtgaacatgatgagcctgaccgtgctgggcctgcggatgctgttcgccaaaaccgtggccgtgaacttcctgctgaccgccaagctgttcttcctcagggccaagcgatctggatctggagcaacaaacttctcactactcaaacaagcaggtgacgtggaggagaatcccgggcctactagtatggactggatttggcgcatccttttccttgtcggcgctgctaccggcgcgcattccttcgaacaactccagctgcaagagtctggccctggcctggtcaagcctagcgaaacactgagcctgacctgtaccgtgtctggcggctctatcagctccggcagctatttctggggctggatcagacaacctcctggcaaaggactggaatggatcggctccatctactacagcggcatcacctactacaaccccagcctgaagtccagagtgaccatctccgtggacaccagcaagaaccagttctccctgaagctgagcagcgtgacagccgccgataccgccgtgtattattgtgccagacatgacggcgctgtggccggcctgtttgattattggggacagggcaccctggtcaccgtgtcatctgctacgcgtgacaagcagctggacgccgacgtgtcccccaagcctaccatcttcctgccctctatcgccgagacaaagctccagaaggccggcacctacctgtgcctgctggaaaagttcttcccagatgtgattaagatccactggcaggaaaagaagtccaacaccatcctgggcagccaggaaggcaacaccatgaagaccaacgacacctacatgaagttcagctggctgaccgtgcccgagaagtccctggacaaagaacacagatgcatcgtgcggcacgaaaacaacaagaacggcgtggaccaggaaatcatcttcccacccatcaagaccgatgtgattacaatggaccccaaggacaactgctccaaggacgccaacgataccctgctgctccagctgaccaacaccagcgcctactacatgtacttgttgctgctgctgaagtccgtggtgtacttcgccatcatcacatgctgcctgctgcggagaaccgccttctgctgcaacggcgagaagtct

SEQ ID NO: 7911 - DNA, 2727 bp, Artificial Sequence
  Synthetic Polynucloetide
atggccttaccagtgaccgccttgctcctgccgctggccttgctgctccacgccgccaggccgctcgaggggaaaccaattcccaaccctcttctgggactggattcaaccggcagcggcgacaagcagctggacgccgacgtgtcccccaagcctaccatcttcctgccctctatcgccgagacaaagctccagaaggccggcacctacctgtgcctgctggaaaagttcttcccagatgtgattaagatccactggcaggaaaagaagtccaacaccatcctgggcagccaggaaggcaacaccatgaagaccaacgacacctacatgaagttcagctggctgaccgtgcccgagaagtccctggacaaagaacacagatgcatcgtgcggcacgaaaacaacaagaacggcgtggaccaggaaatcatcttcccacccatcaagaccgatgtgattacaatggaccccaaggacaactgctccaaggacgccaacgataccctgctgctccagctgaccaacaccagcgcctactacatgtacttgttgctgctgctgaagtccgtggtgtacttcgccatcatcacatgctgcctgctgcggagaaccgccttctgctgcaacggcgagaagtctagggccaagcgatctggatctggagcaacaaacttctcactactcaaacaagcaggtgacgtggaggagaatcccgggcctactagcatggccttaccagtgaccgccttgctcctgccgctggccttgctgctccacgccgccaggccgagctacgtgctgacacagcctccatccgtgtctgtggctccaggacagaccgccagaatcacatgcggcggcaagaacatcggcagcaagagcgtgcactggtatcagcagccacctggacaggctccagtggtggtggtgtacgacgacagcgatagacctagcggcatccccgagagattcagcggcagcaattccggcaataccgccacactgaccatcagcagagtggaagctggcgacgaggccgtgtactactgccaagtgtgggacagcagcagcgatcacgtggtgtttggcggcggaacaaagctgacagtgcttggcggaggcggaagtggaggcggaggatctggcggcggaggctctcaactccagctgcaagagtctggccctggcctggtcaagcctagcgaaacactgagcctgacctgtaccgtgtctggcggctctatcagctccggcagctatttctggggctggatcagacaacctcctggcaaaggactggaatggatcggctccatctactacagcggcatcacctactacaaccccagcctgaagtccagagtgaccatctccgtggacaccagcaagaaccagttctccctgaagctgagcagcgtgacagccgccgataccgccgtgtattattgtgccagacatgacggcgctgtggccggcctgtttgattattggggacagggcaccctggtcaccgtgtcatctgctacgcgtgagcagaaactgatctcggaagaggatgggagcggcagccagcctcacaccaagcccagcgtgttcgtgatgaagaacggcaccaacgtggcctgcctcgtgaaagagttctaccccaaggacatcaggatcaacctggtgtccagcaagaagatcaccgagttcgaccccgccatcgtgatctcccccagcggcaagtacaacgccgtgaagctggggaagtacgaggacagcaacagcgtgacctgctccgtgcagcacgacaacaagaccgtgcacagcaccgactttgaagtgaaaaccgactccaccgaccacgtgaagcccaaagagacagagaacaccaagcagcccagcaagagctgccacaagcccaaggccatcgtgcacaccgagaaagtgaacatgatgagcctgaccgtgctgggcctgcggatgctgttcgccaaaaccgtggccgtgaacttcctgctgaccgccaagctgttcttcctccgcgccaagagaagcggatctggcgtgaagcagaccctgaatttcgacctgctgaagctggctggcgacgtggaatccaacccaggcccttctagaggccatatgaccgagtacaagcccacggtgcgcctcgccacccgcgacgacgtccccagggccgtacgcaccctcgccgccgcgttcgccgactaccccgccacgcgccacaccgtcgatccggaccgccacatcgagcgggtcaccgagctgcaagaactcttcctcacgcgcgtcgggctcgacatcggcaaggtgtgggtcgcggacgacggcgccgcggtggcggtctggaccacgccggagagcgtcgaagcgggggcggtgttcgccgagatcggcccgcgcatggccgagttgagcggttcccggctggccgcgcagcaacagatggaaggcctcctggcgccgcaccggcccaaggagcccgcgtggttcctggccaccgtcggcgtctcgcccgaccaccagggcaagggtctgggcagcgccgtcgtgctccccggagtggaggcggccgagcgcgccggggtgcccgccttcctggagacctccgcgccccgcaacctccccttctacgagcggctcggcttcaccgtcaccgccgacgtcgaggtgcccgaaggaccgcgcacctggtgcatgacccgcaagcccggtgcctga

SEQ ID NO: 7912 - DNA, 3102 bp, Artificial Sequence
  Synthetic Polynucloetide
atggccttaccagtgaccgccttgctcctgccgctggccttgctgctccacgccgccaggccgagctacgtgctgacacagcctccatccgtgtctgtggctccaggacagaccgccagaatcacatgcggcggcaagaacatcggcagcaagagcgtgcactggtatcagcagccacctggacaggctccagtggtggtggtgtacgacgacagcgatagacctagcggcatccccgagagattcagcggcagcaattccggcaataccgccacactgaccatcagcagagtggaagctggcgacgaggccgtgtactactgccaagtgtgggacagcagcagcgatcacgtggtgtttggcggcggaacaaagctgacagtgcttggacagcctaaggccaatcctaccgtgacactgttccctccaagcagcgaagaactccaggccaacaaggccacacttgtgtgcctgatctccgacttctaccctggggctgtgacagtggcttggaaggccgatggatctcctgtgaaagccggcgtggaaaccaccaagccatccaagcagagcaacaacaaatacgccgccagctcctacctgagcctgacacctgagcagtggaagtcccacagatcctacagctgccaagtgacccacgaaggcagcaccgtggaaaagacagtggcccctacagagtgcagcggatcccagagcttcggcctgctggaccccaagctgtgctacctgctggatggcatcctgttcatctacggcgtgatcctgaccgccctgttcctgagagtgaagttcagcagaagcgccgacgcccctgcctaccagcagggacagaaccaactgtacaacgagctgaacctgggcagacgggaagagtacgacgtgctggacaagcggagaggcagggaccctgagatgggcggaaagccccagcggagaaagaacccccaggaaggactgtataacgaactccagaaagacaagatggccgaagcctacagcgagatcggcatgaagggcgagcggagaagaggcaagggccacgatggcctgtaccagggcctgagcaccgccaccaaggacacctatgacgccctgcacatgcaggccctgcctccaagaagggccaagcgatctggatctggagcaacaaacttctcactactcaaacaagcaggtgacgtggaggagaatcccgggcctactagtatggactggatttggcgcatccttttccttgtcggcgctgctaccggcgcgcattccttcgaacaactccagctgcaagagtctggccctggcctggtcaagcctagcgaaacactgagcctgacctgtaccgtgtctggcggctctatcagctccggcagctatttctggggctggatcagacaacctcctggcaaaggactggaatggatcggctccatctactacagcggcatcacctactacaaccccagcctgaagtccagagtgaccatctccgtggacaccagcaagaaccagttctccctgaagctgagcagcgtgacagccgccgataccgccgtgtattattgtgccagacatgacggcgctgtggccggcctgtttgattattggggacagggcaccctggtcaccgtgtcatctgctgcctctacaaagggaccctccgtgtttcctctggctcccagcagcaagtctacaagcggaggaacagccgctctgggctgcctggtcaaggattactttcccgagcctgtgaccgtgtcctggaatagcggagcactgacaagcggcgtgcacacctttccagccgtgctgcaaagcagcggcctgtactctctgagcagcgtggtcacagtgcctagctctagcctgggcacccagacctacatctgcaatgtgaaccacaagcctagcaacaccaaggtggacaagagagtggaacccaagagctgtggtacccagagttttgggttgttggaccctaaattgtgctatctgttggacggaatcctgttcatttacggagtgatcctgaccgcattgttcctgcgggttaagttttccagatccgcagacgcacccgcttaccaacaagggcagaaccaactctacaatgaacttaatttggggcggagggaagagtacgacgttctggacaaaaggaggggacgagatcccgagatgggcggaaagcctcagcgaaggaagaatccgcaagaggggctttataacgaactccagaaagataaaatggcagaagcctatagtgagattgggatgaagggagaaaggaggaggggtaaaggtcacgatgggttgtaccaaggattgagcacagccactaaagatacctatgatgcgctccacatgcaggccctgccgccaagacgcgccaagagaagcggatctggcgtgaagcagaccctgaatttcgacctgctgaagctggctggcgacgtggaatccaacccaggcccttctagaggccatatgaccgagtacaagcccacggtgcgcctcgccacccgcgacgacgtccccagggccgtacgcaccctcgccgccgcgttcgccgactaccccgccacgcgccacaccgtcgatccggaccgccacatcgagcgggtcaccgagctgcaagaactcttcctcacgcgcgtcgggctcgacatcggcaaggtgtgggtcgcggacgacggcgccgcggtggcggtctggaccacgccggagagcgtcgaagcgggggcggtgttcgccgagatcggcccgcgcatggccgagttgagcggttcccggctggccgcgcagcaacagatggaaggcctcctggcgccgcaccggcccaaggagcccgcgtggttcctggccaccgtcggcgtctcgcccgaccaccagggcaagggtctgggcagcgccgtcgtgctccccggagtggaggcggccgagcgcgccggggtgcccgccttcctggagacctccgcgccccgcaacctccccttctacgagcggctcggcttcaccgtcaccgccgacgtcgaggtgcccgaaggaccgcgcacctggtgcatgacccgcaagcccggtgcctga

SEQ ID NO: 7913 - DNA, 2457 bp, Artificial Sequence
  Synthetic Polynucloetide
atggccttaccagtgaccgccttgctcctgccgctggccttgctgctccacgccgccaggccgagctacgtgctgacacagcctccatccgtgtctgtggctccaggacagaccgccagaatcacatgcggcggcaagaacatcggcagcaagagcgtgcactggtatcagcagccacctggacaggctccagtggtggtggtgtacgacgacagcgatagacctagcggcatccccgagagattcagcggcagcaattccggcaataccgccacactgaccatcagcagagtggaagctggcgacgaggccgtgtactactgccaagtgtgggacagcagcagcgatcacgtggtgtttggcggcggaacaaagctgacagtgcttctcgaggacctgaagaacgtgttcccacctgaggtggccgtgttcgagcctagcgaggccgagatcagccacacccagaaagccaccctcgtgtgcctggctaccggcttctaccccgaccatgtggaactgtcttggtgggtcaacggcaaagaggtgcacagcggcgtgtctaccgacccccagccactgaaagaacagcccgccctgaacgacagccggtactgcctgagcagcagactgagagtgtccgccaccttctggcagaacccccggaaccacttcagatgccaggtgcagttctacggcctgagcgagaacgacgagtggacccaggacagagccaagcccgtgacccagatcgtgtctgccgaagcctggggcagagccgattgcggatcccagagcttcggcctgctggaccccaagctgtgctacctgctggatggcatcctgttcatctacggcgtgatcctgaccgccctgttcctgagagtgaagttcagcagaagcgccgacgcccctgcctaccagcagggacagaaccaactgtacaacgagctgaacctgggcagacgggaagagtacgacgtgctggacaagcggagaggcagggaccctgagatgggcggaaagccccagcggagaaagaacccccaggaaggactgtataacgaactccagaaagacaagatggccgaagcctacagcgagatcggcatgaagggcgagcggagaagaggcaagggccacgatggcctgtaccagggcctgagcaccgccaccaaggacacctatgacgccctgcacatgcaggccctgcctccaagaagggccaagcgatctggatctggagcaacaaacttctcactactcaaacaagcaggtgacgtggaggagaatcccgggcctactagtatggactggatttggcgcatccttttccttgtcggcgctgctaccggcgcgcattccttcgaacaactccagctgcaagagtctggccctggcctggtcaagcctagcgaaacactgagcctgacctgtaccgtgtctggcggctctatcagctccggcagctatttctggggctggatcagacaacctcctggcaaaggactggaatggatcggctccatctactacagcggcatcacctactacaaccccagcctgaagtccagagtgaccatctccgtggacaccagcaagaaccagttctccctgaagctgagcagcgtgacagccgccgataccgccgtgtattattgtgccagacatgacggcgctgtggccggcctgtttgattattggggacagggcaccctggtcaccgtgtcatctgctacgcgtatccagaaccctgatcctgccgtgtaccagctgcgggatagcaagagcagcgacaagagcgtgtgtctgttcaccgacttcgacagccagaccaacgtgtcccagagcaaggactccgacgtgtacatcaccgataagaccgtgctggacatgcggagcatggacttcaagagcaactccgccgtggcctggtccaacaagtccgatttcgcctgcgccaacgccttcaacaacagcattatccccgaggacacattcttcccaagccccgagagcagctgcggtacccagagttttgggttgttggaccctaaattgtgctatctgttggacggaatcctgttcatttacggagtgatcctgaccgcattgttcctgcgggttaagttttccagatccgcagacgcacccgcttaccaacaagggcagaaccaactctacaatgaacttaatttggggcggagggaagagtacgacgttctggacaaaaggaggggacgagatcccgagatgggcggaaagcctcagcgaaggaagaatccgcaagaggggctttataacgaactccagaaagataaaatggcagaagcctatagtgagattgggatgaagggagaaaggaggaggggtaaaggtcacgatgggttgtaccaaggattgagcacagccactaaagatacctatgatgcgctccacatgcaggccctgccgccaaga

SEQ ID NO: 7914 - DNA, 2457 bp, Artificial Sequence
  Synthetic Polynucloetide
atggccttaccagtgaccgccttgctcctgccgctggccttgctgctccacgccgccaggccgagctacgtgctgacacagcctccatccgtgtctgtggctccaggacagaccgccagaatcacatgcggcggcaagaacatcggcagcaagagcgtgcactggtatcagcagccacctggacaggctccagtggtggtggtgtacgacgacagcgatagacctagcggcatccccgagagattcagcggcagcaattccggcaataccgccacactgaccatcagcagagtggaagctggcgacgaggccgtgtactactgccaagtgtgggacagcagcagcgatcacgtggtgtttggcggcggaacaaagctgacagtgcttctcgaggacctgaagaacgtgttcccacctgaggtggccgtgttcgagcctagcaaggccgagatcgcccacacccagaaagccaccctcgtgtgcctggctaccggcttctaccccgaccatgtggaactgtcttggtgggtcaacggcaaagaggtgcacagcggcgtgtgtaccgacccccagccactgaaagaacagcccgccctgaacgacagccggtactgcctgagcagcagactgagagtgtccgccaccttctggcagaacccccggaaccacttcagatgccaggtgcagttctacggcctgagcgagaacgacgagtggacccaggacagagccaagcccgtgacccagatcgtgtctgccgaagcctggggcagagccgattgcggatcccagagcttcggcctgctggaccccaagctgtgctacctgctggatggcatcctgttcatctacggcgtgatcctgaccgccctgttcctgagagtgaagttcagcagaagcgccgacgcccctgcctaccagcagggacagaaccaactgtacaacgagctgaacctgggcagacgggaagagtacgacgtgctggacaagcggagaggcagggaccctgagatgggcggaaagccccagcggagaaagaacccccaggaaggactgtataacgaactccagaaagacaagatggccgaagcctacagcgagatcggcatgaagggcgagcggagaagaggcaagggccacgatggcctgtaccagggcctgagcaccgccaccaaggacacctatgacgccctgcacatgcaggccctgcctccaagaagggccaagcgatctggatctggagcaacaaacttctcactactcaaacaagcaggtgacgtggaggagaatcccgggcctactagtatggactggatttggcgcatccttttccttgtcggcgctgctaccggcgcgcattccttcgaacaactccagctgcaagagtctggccctggcctggtcaagcctagcgaaacactgagcctgacctgtaccgtgtctggcggctctatcagctccggcagctatttctggggctggatcagacaacctcctggcaaaggactggaatggatcggctccatctactacagcggcatcacctactacaaccccagcctgaagtccagagtgaccatctccgtggacaccagcaagaaccagttctccctgaagctgagcagcgtgacagccgccgataccgccgtgtattattgtgccagacatgacggcgctgtggccggcctgtttgattattggggacagggcaccctggtcaccgtgtcatctgctacgcgtatccagaaccctgatcctgccgtgtaccagctgcgggatagcaagagcagcgacaagagcgtgtgtctgttcaccgacttcgacagccagaccaacgtgtcccagagcaaggactccgacgtgtacatcaccgataagtgcgtgctggacatgcggagcatggacttcaagagcaactccgccgtggcctggtccaacaagtccgatttcgcctgcgccaacgccttcaacaacagcattatccccgaggacacattcttcccaagcagcgacgtgccctgcggtacccagagttttgggttgttggaccctaaattgtgctatctgttggacggaatcctgttcatttacggagtgatcctgaccgcattgttcctgcgggttaagttttccagatccgcagacgcacccgcttaccaacaagggcagaaccaactctacaatgaacttaatttggggcggagggaagagtacgacgttctggacaaaaggaggggacgagatcccgagatgggcggaaagcctcagcgaaggaagaatccgcaagaggggctttataacgaactccagaaagataaaatggcagaagcctatagtgagattgggatgaagggagaaaggaggaggggtaaaggtcacgatgggttgtaccaaggattgagcacagccactaaagatacctatgatgcgctccacatgcaggccctgccgccaaga

SEQ ID NO: 7915 - DNA, 2670 bp, Artificial Sequence
  Synthetic Polynucloetide
atggccttaccagtgaccgccttgctcctgccgctggccttgctgctccacgccgccaggccgagctacgtgctgacacagcctccatccgtgtctgtggctccaggacagaccgccagaatcacatgcggcggcaagaacatcggcagcaagagcgtgcactggtatcagcagccacctggacaggctccagtggtggtggtgtacgacgacagcgatagacctagcggcatccccgagagattcagcggcagcaattccggcaataccgccacactgaccatcagcagagtggaagctggcgacgaggccgtgtactactgccaagtgtgggacagcagcagcgatcacgtggtgtttggcggcggaacaaagctgacagtgcttctcgaggggaaaccaattcccaaccctcttctgggactggattcaaccggcagcggcgaggacctgaagaacgtgttcccacctgaggtggccgtgttcgagcctagcgaggccgagatcagccacacccagaaagccaccctcgtgtgcctggctaccggcttctaccccgaccatgtggaactgtcttggtgggtcaacggcaaagaggtgcacagcggcgtgtctaccgacccccagccactgaaagaacagcccgccctgaacgacagccggtactgcctgagcagcagactgagagtgtccgccaccttctggcagaacccccggaaccacttcagatgccaggtgcagttctacggcctgagcgagaacgacgagtggacccaggacagagccaagcccgtgacccagatcgtgtctgccgaagcctggggcagagccgattgcggatcccagagcttcggcctgctggaccccaagctgtgctacctgctggatggcatcctgttcatctacggcgtgatcctgaccgccctgttcctgagagtgaagttcagcagaagcgccgacgcccctgcctaccagcagggacagaaccaactgtacaacgagctgaacctgggcagacgggaagagtacgacgtgctggacaagcggagaggcagggaccctgagatgggcggaaagccccagcggagaaagaacccccaggaaggactgtataacgaactccagaaagacaagatggccgaagcctacagcgagatcggcatgaagggcgagcggagaagaggcaagggccacgatggcctgtaccagggcctgagcaccgccaccaaggacacctatgacgccctgcacatgcaggccctgcctccaagaagggccaagcgatctggatctggagcaacaaacttctcactactcaaacaagcaggtgacgtggaggagaatcccgggcctactagtatggactggatttggcgcatccttttccttgtcggcgctgctaccggcgcgcattccttcgaacaactccagctgcaagagtctggccctggcctggtcaagcctagcgaaacactgagcctgacctgtaccgtgtctggcggctctatcagctccggcagctatttctggggctggatcagacaacctcctggcaaaggactggaatggatcggctccatctactacagcggcatcacctactacaaccccagcctgaagtccagagtgaccatctccgtggacaccagcaagaaccagttctccctgaagctgagcagcgtgacagccgccgataccgccgtgtattattgtgccagacatgacggcgctgtggccggcctgtttgattattggggacagggcaccctggtcaccgtgtcatctgctacgcgtgagcagaaactgatctcggaagaggatgggagcggcatccagaaccctgatcctgccgtgtaccagctgcgggatagcaagagcagcgacaagagcgtgtgtctgttcaccgacttcgacagccagaccaacgtgtcccagagcaaggactccgacgtgtacatcaccgataagaccgtgctggacatgcggagcatggacttcaagagcaactccgccgtggcctggtccaacaagtccgatttcgcctgcgccaacgccttcaacaacagcattatccccgaggacacattcttcccaagccccgagagcagctgcggtacccagagttttgggttgttggaccctaaattgtgctatctgttggacggaatcctgttcatttacggagtgatcctgaccgcattgttcctgaggagcaagcggtcacggctgctccacagcgattacatgaatatgacaccacgaagaccgggtcctactcgcaaacactaccaaccctacgcacctccccgcgactttgcagcgtaccgatctcgggttaagttttccagatccgcagacgcacccgcttaccaacaagggcagaaccaactctacaatgaacttaatttggggcggagggaagagtacgacgttctggacaaaaggaggggacgagatcccgagatgggcggaaagcctcagcgaaggaagaatccgcaagaggggctttataacgaactccagaaagataaaatggcagaagcctatagtgagattgggatgaagggagaaaggaggaggggtaaaggtcacgatgggttgtaccaaggattgagcacagccactaaagatacctatgatgcgctccacatgcaggccctgccgccaaga

SEQ ID NO: 7916 - DNA, 2793 bp, Artificial Sequence
  Synthetic Polynucloetide
atggccttaccagtgaccgccttgctcctgccgctggccttgctgctccacgccgccaggccgagctacgtgctgacacagcctccatccgtgtctgtggctccaggacagaccgccagaatcacatgcggcggcaagaacatcggcagcaagagcgtgcactggtatcagcagccacctggacaggctccagtggtggtggtgtacgacgacagcgatagacctagcggcatccccgagagattcagcggcagcaattccggcaataccgccacactgaccatcagcagagtggaagctggcgacgaggccgtgtactactgccaagtgtgggacagcagcagcgatcacgtggtgtttggcggcggaacaaagctgacagtgcttctcgaggggaaaccaattcccaaccctcttctgggactggattcaaccggcagcggcgaggacctgaagaacgtgttcccacctgaggtggccgtgttcgagcctagcgaggccgagatcagccacacccagaaagccaccctcgtgtgcctggctaccggcttctaccccgaccatgtggaactgtcttggtgggtcaacggcaaagaggtgcacagcggcgtgtctaccgacccccagccactgaaagaacagcccgccctgaacgacagccggtactgcctgagcagcagactgagagtgtccgccaccttctggcagaacccccggaaccacttcagatgccaggtgcagttctacggcctgagcgagaacgacgagtggacccaggacagagccaagcccgtgacccagatcgtgtctgccgaagcctggggcagagccgattgcggatcccagagcttcggcctgctggaccccaagctgtgctacctgctggatggcatcctgttcatctacggcgtgatcctgaccgccctgttcctgaggagtaagaggagcaggctcctgcacagtgactacatgaacatgactccacgccgccccggacccacccgcaagcattaccagccctatgccccaccacgcgacttcgcagcctatcgctccagagtgaagttcagcagaagcgccgacgcccctgcctaccagcagggacagaaccaactgtacaacgagctgaacctgggcagacgggaagagtacgacgtgctggacaagcggagaggcagggaccctgagatgggcggaaagccccagcggagaaagaacccccaggaaggactgtataacgaactccagaaagacaagatggccgaagcctacagcgagatcggcatgaagggcgagcggagaagaggcaagggccacgatggcctgtaccagggcctgagcaccgccaccaaggacacctatgacgccctgcacatgcaggccctgcctccaagaagggccaagcgatctggatctggagcaacaaacttctcactactcaaacaagcaggtgacgtggaggagaatcccgggcctactagtatggactggatttggcgcatccttttccttgtcggcgctgctaccggcgcgcattccttcgaacaactccagctgcaagagtctggccctggcctggtcaagcctagcgaaacactgagcctgacctgtaccgtgtctggcggctctatcagctccggcagctatttctggggctggatcagacaacctcctggcaaaggactggaatggatcggctccatctactacagcggcatcacctactacaaccccagcctgaagtccagagtgaccatctccgtggacaccagcaagaaccagttctccctgaagctgagcagcgtgacagccgccgataccgccgtgtattattgtgccagacatgacggcgctgtggccggcctgtttgattattggggacagggcaccctggtcaccgtgtcatctgctacgcgtgagcagaaactgatctcggaagaggatgggagcggcatccagaaccctgatcctgccgtgtaccagctgcgggatagcaagagcagcgacaagagcgtgtgtctgttcaccgacttcgacagccagaccaacgtgtcccagagcaaggactccgacgtgtacatcaccgataagaccgtgctggacatgcggagcatggacttcaagagcaactccgccgtggcctggtccaacaagtccgatttcgcctgcgccaacgccttcaacaacagcattatccccgaggacacattcttcccaagccccgagagcagctgcggtacccagagttttgggttgttggaccctaaattgtgctatctgttggacggaatcctgttcatttacggagtgatcctgaccgcattgttcctgaggagcaagcggtcacggctgctccacagcgattacatgaatatgacaccacgaagaccgggtcctactcgcaaacactaccaaccctacgcacctccccgcgactttgcagcgtaccgatctcgggttaagttttccagatccgcagacgcacccgcttaccaacaagggcagaaccaactctacaatgaacttaatttggggcggagggaagagtacgacgttctggacaaaaggaggggacgagatcccgagatgggcggaaagcctcagcgaaggaagaatccgcaagaggggctttataacgaactccagaaagataaaatggcagaagcctatagtgagattgggatgaagggagaaaggaggaggggtaaaggtcacgatgggttgtaccaaggattgagcacagccactaaagatacctatgatgcgctccacatgcaggccctgccgccaaga

SEQ ID NO: 7917 - DNA, 2676 bp, Artificial Sequence
  Synthetic Polynucloetide
atggccttaccagtgaccgccttgctcctgccgctggccttgctgctccacgccgccaggccgagctacgtgctgacacagcctccatccgtgtctgtggctccaggacagaccgccagaatcacatgcggcggcaagaacatcggcagcaagagcgtgcactggtatcagcagccacctggacaggctccagtggtggtggtgtacgacgacagcgatagacctagcggcatccccgagagattcagcggcagcaattccggcaataccgccacactgaccatcagcagagtggaagctggcgacgaggccgtgtactactgccaagtgtgggacagcagcagcgatcacgtggtgtttggcggcggaacaaagctgacagtgcttctcgaggggaaaccaattcccaaccctcttctgggactggattcaaccggcagcggcgaggacctgaagaacgtgttcccacctgaggtggccgtgttcgagcctagcgaggccgagatcagccacacccagaaagccaccctcgtgtgcctggctaccggcttctaccccgaccatgtggaactgtcttggtgggtcaacggcaaagaggtgcacagcggcgtgtctaccgacccccagccactgaaagaacagcccgccctgaacgacagccggtactgcctgagcagcagactgagagtgtccgccaccttctggcagaacccccggaaccacttcagatgccaggtgcagttctacggcctgagcgagaacgacgagtggacccaggacagagccaagcccgtgacccagatcgtgtctgccgaagcctggggcagagccgattgcggatcccagagcttcggcctgctggaccccaagctgtgctacctgctggatggcatcctgttcatctacggcgtgatcctgaccgccctgttcctgagagtgaagttcagcagaagcgccgacgcccctgcctaccagcagggacagaaccaactgtacaacgagctgaacctgggcagacgggaagagtacgacgtgctggacaagcggagaggcagggaccctgagatgggcggaaagccccagcggagaaagaacccccaggaaggactgtataacgaactccagaaagacaagatggccgaagcctacagcgagatcggcatgaagggcgagcggagaagaggcaagggccacgatggcctgtaccagggcctgagcaccgccaccaaggacacctatgacgccctgcacatgcaggccctgcctccaagaagggccaagcgatctggatctggagcaacaaacttctcactactcaaacaagcaggtgacgtggaggagaatcccgggcctactagtatggactggatttggcgcatccttttccttgtcggcgctgctaccggcgcgcattccttcgaacaactccagctgcaagagtctggccctggcctggtcaagcctagcgaaacactgagcctgacctgtaccgtgtctggcggctctatcagctccggcagctatttctggggctggatcagacaacctcctggcaaaggactggaatggatcggctccatctactacagcggcatcacctactacaaccccagcctgaagtccagagtgaccatctccgtggacaccagcaagaaccagttctccctgaagctgagcagcgtgacagccgccgataccgccgtgtattattgtgccagacatgacggcgctgtggccggcctgtttgattattggggacagggcaccctggtcaccgtgtcatctgctacgcgtgagcagaaactgatctcggaagaggatctggggagcggcatccagaaccctgatcctgccgtgtaccagctgcgggatagcaagagcagcgacaagagcgtgtgtctgttcaccgacttcgacagccagaccaacgtgtcccagagcaaggactccgacgtgtacatcaccgataagaccgtgctggacatgcggagcatggacttcaagagcaactccgccgtggcctggtccaacaagtccgatttcgcctgcgccaacgccttcaacaacagcattatccccgaggacacattcttcccaagccccgagagcagctgcggtacccagagttttgggttgttggaccctaaattgtgctatctgttggacggaatcctgttcatttacggagtgatcctgaccgcattgttcctgaagagaggccggaagaagctgctgtacatcttcaagcagcctttcatgcggcccgtgcagaccacccaggaagaggacggctgctcctgccggttccccgaggaagaagaaggcggctgcgagctgcgggttaagttttccagatccgcagacgcacccgcttaccaacaagggcagaaccaactctacaatgaacttaatttggggcggagggaagagtacgacgttctggacaaaaggaggggacgagatcccgagatgggcggaaagcctcagcgaaggaagaatccgcaagaggggctttataacgaactccagaaagataaaatggcagaagcctatagtgagattgggatgaagggagaaaggaggaggggtaaaggtcacgatgggttgtaccaaggattgagcacagccactaaagatacctatgatgcgctccacatgcaggccctgccgccaaga

SEQ ID NO: 7918 - DNA, 2802 bp, Artificial Sequence
  Synthetic Polynucloetide
atggccttaccagtgaccgccttgctcctgccgctggccttgctgctccacgccgccaggccgagctacgtgctgacacagcctccatccgtgtctgtggctccaggacagaccgccagaatcacatgcggcggcaagaacatcggcagcaagagcgtgcactggtatcagcagccacctggacaggctccagtggtggtggtgtacgacgacagcgatagacctagcggcatccccgagagattcagcggcagcaattccggcaataccgccacactgaccatcagcagagtggaagctggcgacgaggccgtgtactactgccaagtgtgggacagcagcagcgatcacgtggtgtttggcggcggaacaaagctgacagtgcttctcgaggggaaaccaattcccaaccctcttctgggactggattcaaccggcagcggcgaggacctgaagaacgtgttcccacctgaggtggccgtgttcgagcctagcgaggccgagatcagccacacccagaaagccaccctcgtgtgcctggctaccggcttctaccccgaccatgtggaactgtcttggtgggtcaacggcaaagaggtgcacagcggcgtgtctaccgacccccagccactgaaagaacagcccgccctgaacgacagccggtactgcctgagcagcagactgagagtgtccgccaccttctggcagaacccccggaaccacttcagatgccaggtgcagttctacggcctgagcgagaacgacgagtggacccaggacagagccaagcccgtgacccagatcgtgtctgccgaagcctggggcagagccgattgcggatcccagagcttcggcctgctggaccccaagctgtgctacctgctggatggcatcctgttcatctacggcgtgatcctgaccgccctgttcctgaaacggggcagaaagaaactcctgtatatattcaaacaaccatttatgagaccagtacaaactactcaagaggaagatggctgtagctgccgatttccagaagaagaagaaggaggatgtgaactgagagtgaagttcagcagaagcgccgacgcccctgcctaccagcagggacagaaccaactgtacaacgagctgaacctgggcagacgggaagagtacgacgtgctggacaagcggagaggcagggaccctgagatgggcggaaagccccagcggagaaagaacccccaggaaggactgtataacgaactccagaaagacaagatggccgaagcctacagcgagatcggcatgaagggcgagcggagaagaggcaagggccacgatggcctgtaccagggcctgagcaccgccaccaaggacacctatgacgccctgcacatgcaggccctgcctccaagaagggccaagcgatctggatctggagcaacaaacttctcactactcaaacaagcaggtgacgtggaggagaatcccgggcctactagtatggactggatttggcgcatccttttccttgtcggcgctgctaccggcgcgcattccttcgaacaactccagctgcaagagtctggccctggcctggtcaagcctagcgaaacactgagcctgacctgtaccgtgtctggcggctctatcagctccggcagctatttctggggctggatcagacaacctcctggcaaaggactggaatggatcggctccatctactacagcggcatcacctactacaaccccagcctgaagtccagagtgaccatctccgtggacaccagcaagaaccagttctccctgaagctgagcagcgtgacagccgccgataccgccgtgtattattgtgccagacatgacggcgctgtggccggcctgtttgattattggggacagggcaccctggtcaccgtgtcatctgctacgcgtgagcagaaactgatctcggaagaggatctggggagcggcatccagaaccctgatcctgccgtgtaccagctgcgggatagcaagagcagcgacaagagcgtgtgtctgttcaccgacttcgacagccagaccaacgtgtcccagagcaaggactccgacgtgtacatcaccgataagaccgtgctggacatgcggagcatggacttcaagagcaactccgccgtggcctggtccaacaagtccgatttcgcctgcgccaacgccttcaacaacagcattatccccgaggacacattcttcccaagccccgagagcagctgcggtacccagagttttgggttgttggaccctaaattgtgctatctgttggacggaatcctgttcatttacggagtgatcctgaccgcattgttcctgaagagaggccggaagaagctgctgtacatcttcaagcagcctttcatgcggcccgtgcagaccacccaggaagaggacggctgctcctgccggttccccgaggaagaagaaggcggctgcgagctgcgggttaagttttccagatccgcagacgcacccgcttaccaacaagggcagaaccaactctacaatgaacttaatttggggcggagggaagagtacgacgttctggacaaaaggaggggacgagatcccgagatgggcggaaagcctcagcgaaggaagaatccgcaagaggggctttataacgaactccagaaagataaaatggcagaagcctatagtgagattgggatgaagggagaaaggaggaggggtaaaggtcacgatgggttgtaccaaggattgagcacagccactaaagatacctatgatgcgctccacatgcaggccctgccgccaaga

SEQ ID NO: 7919 - DNA, 2475 bp, Artificial Sequence
  Synthetic Polynucloetide
atggccttaccagtgaccgccttgctcctgccgctggccttgctgctccacgccgccaggccgagctacgtgctgacacagcctccatccgtgtctgtggctccaggacagaccgccagaatcacatgcggcggcaagaacatcggcagcaagagcgtgcactggtatcagcagccacctggacaggctccagtggtggtggtgtacgacgacagcgatagacctagcggcatccccgagagattcagcggcagcaattccggcaataccgccacactgaccatcagcagagtggaagctggcgacgaggccgtgtactactgccaagtgtgggacagcagcagcgatcacgtggtgtttggcggcggaacaaagctgacagtgcttctcgagcagagcttcggcctgctggaccccaagctgtgctacctgctggatggcatcctgttcatctacggcgtgatcctgaccgccctgttcctgagagtgaagttcagcagaagcgccgacgcccctgcctaccagcagggacagaaccaactgtacaacgagctgaacctgggcagacgggaagagtacgacgtgctggacaagcggagaggcagggaccctgagatgggcggaaagccccagcggagaaagaacccccaggaaggactgtataacgaactccagaaagacaagatggccgaagcctacagcgagatcggcatgaagggcgagcggagaagaggcaagggccacgatggcctgtaccagggcctgagcaccgccaccaaggacacctatgacgccctgcacatgcaggccctgcctccaagaagggccaagcgatctggatctggagcaacaaacttctcactactcaaacaagcaggtgacgtggaggagaatcccgggcctactagtatggactggatttggcgcatccttttccttgtcggcgctgctaccggcgcgcattccttcgaacaactccagctgcaagagtctggccctggcctggtcaagcctagcgaaacactgagcctgacctgtaccgtgtctggcggctctatcagctccggcagctatttctggggctggatcagacaacctcctggcaaaggactggaatggatcggctccatctactacagcggcatcacctactacaaccccagcctgaagtccagagtgaccatctccgtggacaccagcaagaaccagttctccctgaagctgagcagcgtgacagccgccgataccgccgtgtattattgtgccagacatgacggcgctgtggccggcctgtttgattattggggacagggcaccctggtcaccgtgtcatctgctacgcgtcagagttttgggttgttggaccctaaattgtgctatctgttggacggaatcctgttcatttacggagtgatcctgaccgcattgttcctgcgggttaagttttccagatccgcagacgcacccgcttaccaacaagggcagaaccaactctacaatgaacttaatttggggcggagggaagagtacgacgttctggacaaaaggaggggacgagatcccgagatgggcggaaagcctcagcgaaggaagaatccgcaagaggggctttataacgaactccagaaagataaaatggcagaagcctatagtgagattgggatgaagggagaaaggaggaggggtaaaggtcacgatgggttgtaccaaggattgagcacagccactaaagatacctatgatgcgctccacatgcaggccctgccgccaagacgcgccaagagaagcggatctggcgtgaagcagaccctgaatttcgacctgctgaagctggctggcgacgtggaatccaacccaggcccttctagaggccatatgaccgagtacaagcccacggtgcgcctcgccacccgcgacgacgtccccagggccgtacgcaccctcgccgccgcgttcgccgactaccccgccacgcgccacaccgtcgatccggaccgccacatcgagcgggtcaccgagctgcaagaactcttcctcacgcgcgtcgggctcgacatcggcaaggtgtgggtcgcggacgacggcgccgcggtggcggtctggaccacgccggagagcgtcgaagcgggggcggtgttcgccgagatcggcccgcgcatggccgagttgagcggttcccggctggccgcgcagcaacagatggaaggcctcctggcgccgcaccggcccaaggagcccgcgtggttcctggccaccgtcggcgtctcgcccgaccaccagggcaagggtctgggcagcgccgtcgtgctccccggagtggaggcggccgagcgcgccggggtgcccgccttcctggagacctccgcgccccgcaacctccccttctacgagcggctcggcttcaccgtcaccgccgacgtcgaggtgcccgaaggaccgcgcacctggtgcatgacccgcaagcccggtgcctga

SEQ ID NO: 7920 - DNA, 1947 bp, Artificial Sequence
  Synthetic Polynucloetide
atggccttaccagtgaccgccttgctcctgccgctggccttgctgctccacgccgccaggccgagctacgtgctgacacagcctccatccgtgtctgtggctccaggacagaccgccagaatcacatgcggcggcaagaacatcggcagcaagagcgtgcactggtatcagcagccacctggacaggctccagtggtggtggtgtacgacgacagcgatagacctagcggcatccccgagagattcagcggcagcaattccggcaataccgccacactgaccatcagcagagtggaagctggcgacgaggccgtgtactactgccaagtgtgggacagcagcagcgatcacgtggtgtttggcggcggaacaaagctgacagtgcttctcgagggacagcctaaggccaatcctaccgtgacactgttccctccaagcagcgaagaactccaggccaacaaggccacacttgtgtgcctgatctccgacttctaccctggggctgtgacagtggcttggaaggccgatggatctcctgtgaaagccggcgtggaaaccaccaagccatccaagcagagcaacaacaaatacgccgccagctcctacctgagcctgacacctgagcagtggaagtcccacagatcctacagctgccaagtgacccacgaaggcagcaccgtggaaaagacagtggcccctacagagtgcagccccatcaagaccgatgtgattacaatggaccccaaggacaactgctccaaggacgccaacgataccctgctgctccagctgaccaacaccagcgcctactacatgtacttgttgctgctgctgaagtccgtggtgtacttcgccatcatcacatgctgcctgctgcggagaaccgccttctgctgcaacggcgagaagtctagggccaagcgatctggatctggagcaacaaacttctcactactcaaacaagcaggtgacgtggaggagaatcccgggcctactagtatggactggatttggcgcatccttttccttgtcggcgctgctaccggcgcgcattccttcgaacaactccagctgcaagagtctggccctggcctggtcaagcctagcgaaacactgagcctgacctgtaccgtgtctggcggctctatcagctccggcagctatttctggggctggatcagacaacctcctggcaaaggactggaatggatcggctccatctactacagcggcatcacctactacaaccccagcctgaagtccagagtgaccatctccgtggacaccagcaagaaccagttctccctgaagctgagcagcgtgacagccgccgataccgccgtgtattattgtgccagacatgacggcgctgtggccggcctgtttgattattggggacagggcaccctggtcaccgtgtcatctgctacgcgtgcctctacaaagggaccctccgtgtttcctctggctcccagcagcaagtctacaagcggaggaacagccgctctgggctgcctggtcaaggattactttcccgagcctgtgaccgtgtcctggaatagcggagcactgacaagcggcgtgcacacctttccagccgtgctgcaaagcagcggcctgtactctctgagcagcgtggtcacagtgcctagctctagcctgggcacccagacctacatctgcaatgtgaaccacaagcctagcaacaccaaggtggacaagagagtggaacccaagagctgtgaagtgaaaaccgactccaccgaccacgtgaagcccaaagagacagagaacaccaagcagcccagcaagagctgccacaagcccaaggccatcgtgcacaccgagaaagtgaacatgatgagcctgaccgtgctgggcctgcggatgctgttcgccaaaaccgtggccgtgaacttcctgctgaccgccaagctgttcttcctc

SEQ ID NO: 7921 - DNA, 1881 bp, Artificial Sequence
  Synthetic Polynucloetide
atggccttaccagtgaccgccttgctcctgccgctggccttgctgctccacgccgccaggccgagctacgtgctgacacagcctccatccgtgtctgtggctccaggacagaccgccagaatcacatgcggcggcaagaacatcggcagcaagagcgtgcactggtatcagcagccacctggacaggctccagtggtggtggtgtacgacgacagcgatagacctagcggcatccccgagagattcagcggcagcaattccggcaataccgccacactgaccatcagcagagtggaagctggcgacgaggccgtgtactactgccaagtgtgggacagcagcagcgatcacgtggtgtttggcggcggaacaaagctgacagtgcttctcgagggacagcctaaggccaatcctaccgtgacactgttccctccaagcagcgaagaactccaggccaacaaggccacacttgtgtgcctgatctccgacttctaccctggggctgtgacagtggcttggaaggccgatggatctcctgtgaaagccggcgtggaaaccaccaagccatccaagcagagcaacaacaaatacgccgccagctcctacctgagcctgacacctgagcagtggaagtcccacagatcctacagctgccaagtgacccacgaaggcagcaccgtggaaaagacagtggcccctacagagtgcagcggcagagccgattgcggcatcaccagcgccagctaccaccagggcgtgctgagcgccaccatcctgtacgagatcctgctgggcaaggccaccctgtacgccgtgctggtgtctgccctggtgctgatggctatggtcaagcggaaggacagccggggaagggccaagcgatctggatctggagcaacaaacttctcactactcaaacaagcaggtgacgtggaggagaatcccgggcctactagtatggactggatttggcgcatccttttccttgtcggcgctgctaccggcgcgcattccttcgaacaactccagctgcaagagtctggccctggcctggtcaagcctagcgaaacactgagcctgacctgtaccgtgtctggcggctctatcagctccggcagctatttctggggctggatcagacaacctcctggcaaaggactggaatggatcggctccatctactacagcggcatcacctactacaaccccagcctgaagtccagagtgaccatctccgtggacaccagcaagaaccagttctccctgaagctgagcagcgtgacagccgccgataccgccgtgtattattgtgccagacatgacggcgctgtggccggcctgtttgattattggggacagggcaccctggtcaccgtgtcatctgctacgcgtgcctctacaaagggaccctccgtgtttcctctggctcccagcagcaagtctacaagcggaggaacagccgctctgggctgcctggtcaaggattactttcccgagcctgtgaccgtgtcctggaatagcggagcactgacaagcggcgtgcacacctttccagccgtgctgcaaagcagcggcctgtactctctgagcagcgtggtcacagtgcctagctctagcctgggcacccagacctacatctgcaatgtgaaccacaagcctagcaacaccaaggtggacaagagagtggaacccaagagctgtatccccgaggacacattcttcccaagcagcgacgtgccctgcgacgtgaagctggtggaaaagagcttcgagacagacaccaacctgaacttccagaacctgagcgtgatcggcttcagaatcctgctgctgaaagtggccggctttaacctgctgatgaccctgcggctgtggtccagc

SEQ ID NO: 7922 - DNA, 1881 bp, Artificial Sequence
  Synthetic Polynucloetide
atggccttaccagtgaccgccttgctcctgccgctggccttgctgctccacgccgccaggccgagctacgtgctgacacagcctccatccgtgtctgtggctccaggacagaccgccagaatcacatgcggcggcaagaacatcggcagcaagagcgtgcactggtatcagcagccacctggacaggctccagtggtggtggtgtacgacgacagcgatagacctagcggcatccccgagagattcagcggcagcaattccggcaataccgccacactgaccatcagcagagtggaagctggcgacgaggccgtgtactactgccaagtgtgggacagcagcagcgatcacgtggtgtttggcggcggaacaaagctgacagtgcttctcgagggacagcctaaggccaatcctaccgtgacactgttccctccaagcagcgaagaactccaggccaacaaggccacacttgtgtgcctgatctccgacttctaccctggggctgtgacagtggcttggaaggccgatggatctcctgtgaaagccggcgtggaaaccaccaagccatccaagcagagcaacaacaaatacgccgccagctcctacctgagcctgacacctgagcagtggaagtcccacagatcctacagctgccaagtgacccacgaaggcagcaccgtggaaaagacagtggcccctacagagtgcagcggcagagccgattgcggctttaccagcgagagctaccagcagggcgtgctgagcgccaccatcctgtacgagatcctgctgggcaaggccaccctgtacgccgtgctggtgtctgccctggtgctgatggctatggtcaagcggaaggacagccggggaagggccaagcgatctggatctggagcaacaaacttctcactactcaaacaagcaggtgacgtggaggagaatcccgggcctactagtatggactggatttggcgcatccttttccttgtcggcgctgctaccggcgcgcattccttcgaacaactccagctgcaagagtctggccctggcctggtcaagcctagcgaaacactgagcctgacctgtaccgtgtctggcggctctatcagctccggcagctatttctggggctggatcagacaacctcctggcaaaggactggaatggatcggctccatctactacagcggcatcacctactacaaccccagcctgaagtccagagtgaccatctccgtggacaccagcaagaaccagttctccctgaagctgagcagcgtgacagccgccgataccgccgtgtattattgtgccagacatgacggcgctgtggccggcctgtttgattattggggacagggcaccctggtcaccgtgtcatctgctacgcgtgcctctacaaagggaccctccgtgtttcctctggctcccagcagcaagtctacaagcggaggaacagccgctctgggctgcctggtcaaggattactttcccgagcctgtgaccgtgtcctggaatagcggagcactgacaagcggcgtgcacacctttccagccgtgctgcaaagcagcggcctgtactctctgagcagcgtggtcacagtgcctagctctagcctgggcacccagacctacatctgcaatgtgaaccacaagcctagcaacaccaaggtggacaagagagtggaacccaagagctgtatccccgaggacacattcttcccaagccccgagagcagctgcgacgtgaagctggtggaaaagagcttcgagacagacaccaacctgaacttccagaacctgagcgtgatcggcttcagaatcctgctgctgaaagtggccggctttaacctgctgatgaccctgcggctgtggtccagc

SEQ ID NO: 7923 - DNA, 1359 bp, Artificial Sequence
  Synthetic Polynucloetide
atggccttaccagtgaccgccttgctcctgccgctggccttgctgctccacgccgccaggccgagctacgtgctgacacagcctccatccgtgtctgtggctccaggacagaccgccagaatcacatgcggcggcaagaacatcggcagcaagagcgtgcactggtatcagcagccacctggacaggctccagtggtggtggtgtacgacgacagcgatagacctagcggcatccccgagagattcagcggcagcaattccggcaataccgccacactgaccatcagcagagtggaagctggcgacgaggccgtgtactactgccaagtgtgggacagcagcagcgatcacgtggtgtttggcggcggaacaaagctgacagtgcttggcggaggcggaagtggaggcggaggatctggcggcggaggctctcaactccagctgcaagagtctggccctggcctggtcaagcctagcgaaacactgagcctgacctgtaccgtgtctggcggctctatcagctccggcagctatttctggggctggatcagacaacctcctggcaaaggactggaatggatcggctccatctactacagcggcatcacctactacaaccccagcctgaagtccagagtgaccatctccgtggacaccagcaagaaccagttctccctgaagctgagcagcgtgacagccgccgataccgccgtgtattattgtgccagacatgacggcgctgtggccggcctgtttgattattggggacagggcaccctggtcaccgtgtcatctgctacgcgtgacggtaacgaggagatgggaggaatcactcaaaccccttacaaagtctcaatttcaggaacaactgttatccttacatgtccccagtatcctggcagcgagatcctttggcagcataacgacaagaatatagggggagatgaagacgataagaatatcggatctgacgaggatcacttgagcctgaaagagttctccgagcttgaacaaagcggatattatgtgtgctatccgcgcgggtcaaagccggaagacgctaacttttacctttatctccgagccagagtgtgcgaaaattgcatggaaatggacgttatgtccgttgctacaatagttatcgtagatatatgcatcacgggtggactgcttctgctggtttattattggtccaagaatagaaaggccaaagctaaacccgtgaccagaggcgctggcgcaggcggaaggcaaaggggacaaaacaaagaacggccaccaccagtgccaaatccagattatgagcctattcggaaaggacagagggacctgtactctggcctgaatcagagaagaatc

SEQ ID NO: 7924 - DNA, 1254 bp, Artificial Sequence
  Synthetic Polynucloetide
atggccttaccagtgaccgccttgctcctgccgctggccttgctgctccacgccgccaggccgagctacgtgctgacacagcctccatccgtgtctgtggctccaggacagaccgccagaatcacatgcggcggcaagaacatcggcagcaagagcgtgcactggtatcagcagccacctggacaggctccagtggtggtggtgtacgacgacagcgatagacctagcggcatccccgagagattcagcggcagcaattccggcaataccgccacactgaccatcagcagagtggaagctggcgacgaggccgtgtactactgccaagtgtgggacagcagcagcgatcacgtggtgtttggcggcggaacaaagctgacagtgcttggcggaggcggaagtggaggcggaggatctggcggcggaggctctcaactccagctgcaagagtctggccctggcctggtcaagcctagcgaaacactgagcctgacctgtaccgtgtctggcggctctatcagctccggcagctatttctggggctggatcagacaacctcctggcaaaggactggaatggatcggctccatctactacagcggcatcacctactacaaccccagcctgaagtccagagtgaccatctccgtggacaccagcaagaaccagttctccctgaagctgagcagcgtgacagccgccgataccgccgtgtattattgtgccagacatgacggcgctgtggccggcctgtttgattattggggacagggcaccctggtcaccgtgtcatctgctacgcgtttcaagatccccatcgaggaactggaagatcgggtgttcgtgaactgcaacacctctatcacctgggtggaaggcaccgtgggaacactgctgagcgacatcaccagactggacctcggcaagcggattctggaccctcggggcatctacagatgcaacggcaccgacatctacaaggacaaagaaagcaccgtgcaggtccactacagaatgtgccagtcctgcgtggaactggaccctgctacagtggccggcatcatcgtgaccgatgtgatcgctactctgctgctggctctgggagtgttctgcttcgccggacacgaaacaggcagactgtctggcgctgccgatacacaggccctgctgagaaacgaccaagtgtatcagcccctgcgcgacagagatgatgcccagtattctcacctcggcggcaactgggctagaaacaag

SEQ ID NO: 7925 - DNA, 1284 bp, Artificial Sequence
  Synthetic Polynucloetide
atggccttaccagtgaccgccttgctcctgccgctggccttgctgctccacgccgccaggccgagctacgtgctgacacagcctccatccgtgtctgtggctccaggacagaccgccagaatcacatgcggcggcaagaacatcggcagcaagagcgtgcactggtatcagcagccacctggacaggctccagtggtggtggtgtacgacgacagcgatagacctagcggcatccccgagagattcagcggcagcaattccggcaataccgccacactgaccatcagcagagtggaagctggcgacgaggccgtgtactactgccaagtgtgggacagcagcagcgatcacgtggtgtttggcggcggaacaaagctgacagtgcttggcggaggcggaagtggaggcggaggatctggcggcggaggctctcaactccagctgcaagagtctggccctggcctggtcaagcctagcgaaacactgagcctgacctgtaccgtgtctggcggctctatcagctccggcagctatttctggggctggatcagacaacctcctggcaaaggactggaatggatcggctccatctactacagcggcatcacctactacaaccccagcctgaagtccagagtgaccatctccgtggacaccagcaagaaccagttctccctgaagctgagcagcgtgacagccgccgataccgccgtgtattattgtgccagacatgacggcgctgtggccggcctgtttgattattggggacagggcaccctggtcaccgtgtcatctgctacgcgtcagagcatcaagggcaaccacctggtcaaggtgtacgactaccaagaggacggcagcgtgctgctgacatgtgatgccgaggccaagaacatcacctggtttaaggacggcaagatgatcggcttcctgaccgaggacaagaagaagtggaacctgggcagcaacgctaaggaccccagaggcatgtatcagtgcaagggcagccagaacaagagcaagcccctccaggtgtactaccggatgtgccagaactgcatcgagctgaacgccgctaccatcagcggctttctgttcgccgagatcgtgtccatcttcgtgctggccgtgggcgtgtactttatcgctggacaggatggcgtgcggcagagcagagcttccgataagcaaaccctgctgcctaacgaccagctgtaccagcctctgaaggacagagaggacgaccagtacagccacctccagggcaatcagctgagaagaaac

SEQ ID NO: 7926 - DNA, 1233 bp, Artificial Sequence
  Synthetic Polynucloetide
atggccttaccagtgaccgccttgctcctgccgctggccttgctgctccacgccgccaggccgagctacgtgctgacacagcctccatccgtgtctgtggctccaggacagaccgccagaatcacatgcggcggcaagaacatcggcagcaagagcgtgcactggtatcagcagccacctggacaggctccagtggtggtggtgtacgacgacagcgatagacctagcggcatccccgagagattcagcggcagcaattccggcaataccgccacactgaccatcagcagagtggaagctggcgacgaggccgtgtactactgccaagtgtgggacagcagcagcgatcacgtggtgtttggcggcggaacaaagctgacagtgcttggcggaggcggaagtggaggcggaggatctggcggcggaggctctcaactccagctgcaagagtctggccctggcctggtcaagcctagcgaaacactgagcctgacctgtaccgtgtctggcggctctatcagctccggcagctatttctggggctggatcagacaacctcctggcaaaggactggaatggatcggctccatctactacagcggcatcacctactacaaccccagcctgaagtccagagtgaccatctccgtggacaccagcaagaaccagttctccctgaagctgagcagcgtgacagccgccgataccgccgtgtattattgtgccagacatgacggcgctgtggccggcctgtttgattattggggacagggcaccctggtcaccgtgtcatctgctacgcgtcagagttttgggttgttggaccctaaattgtgctatctgttggacggaatcctgttcatttacggagtgatcctgaccgcattgttcctgcgggttaagttttccagatccgcagacgcacccgcttaccaacaagggcagaaccaactctacaatgaacttaatttggggcggagggaagagtacgacgttctggacaaaaggaggggacgagatcccgagatgggcggaaagcctcagcgaaggaagaatccgcaagaggggctttataacgaactccagaaagataaaatggcagaagcctatagtgagattgggatgaagggagaaaggaggaggggtaaaggtcacgatgggttgtaccaaggattgagcacagccactaaagatacctatgatgcgctccacatgcaggccctgccgccaaga

SEQ ID NO: 7927 - DNA, 1359 bp, Artificial Sequence
  Synthetic Polynucloetide
atggccttaccagtgaccgccttgctcctgccgctggccttgctgctccacgccgccaggccgcaactccagctgcaagagtctggccctggcctggtcaagcctagcgaaacactgagcctgacctgtaccgtgtctggcggctctatcagctccggcagctatttctggggctggatcagacaacctcctggcaaaggactggaatggatcggctccatctactacagcggcatcacctactacaaccccagcctgaagtccagagtgaccatctccgtggacaccagcaagaaccagttctccctgaagctgagcagcgtgacagccgccgataccgccgtgtattattgtgccagacatgacggcgctgtggccggcctgtttgattattggggacagggcaccctggtcaccgtgtcatctgctggcggaggcggaagtggaggcggaggatctggcggcggaggctctagctacgtgctgacacagcctccatccgtgtctgtggctccaggacagaccgccagaatcacatgcggcggcaagaacatcggcagcaagagcgtgcactggtatcagcagccacctggacaggctccagtggtggtggtgtacgacgacagcgatagacctagcggcatccccgagagattcagcggcagcaattccggcaataccgccacactgaccatcagcagagtggaagctggcgacgaggccgtgtactactgccaagtgtgggacagcagcagcgatcacgtggtgtttggcggcggaacaaagctgacagtgcttacgcgtgacggtaacgaggagatgggaggaatcactcaaaccccttacaaagtctcaatttcaggaacaactgttatccttacatgtccccagtatcctggcagcgagatcctttggcagcataacgacaagaatatagggggagatgaagacgataagaatatcggatctgacgaggatcacttgagcctgaaagagttctccgagcttgaacaaagcggatattatgtgtgctatccgcgcgggtcaaagccggaagacgctaacttttacctttatctccgagccagagtgtgcgaaaattgcatggaaatggacgttatgtccgttgctacaatagttatcgtagatatatgcatcacgggtggactgcttctgctggtttattattggtccaagaatagaaaggccaaagctaaacccgtgaccagaggcgctggcgcaggcggaaggcaaaggggacaaaacaaagaacggccaccaccagtgccaaatccagattatgagcctattcggaaaggacagagggacctgtactctggcctgaatcagagaagaatc

SEQ ID NO: 7928 - DNA, 1254 bp, Artificial Sequence
  Synthetic Polynucloetide
atggccttaccagtgaccgccttgctcctgccgctggccttgctgctccacgccgccaggccgcaactccagctgcaagagtctggccctggcctggtcaagcctagcgaaacactgagcctgacctgtaccgtgtctggcggctctatcagctccggcagctatttctggggctggatcagacaacctcctggcaaaggactggaatggatcggctccatctactacagcggcatcacctactacaaccccagcctgaagtccagagtgaccatctccgtggacaccagcaagaaccagttctccctgaagctgagcagcgtgacagccgccgataccgccgtgtattattgtgccagacatgacggcgctgtggccggcctgtttgattattggggacagggcaccctggtcaccgtgtcatctgctggcggaggcggaagtggaggcggaggatctggcggcggaggctctagctacgtgctgacacagcctccatccgtgtctgtggctccaggacagaccgccagaatcacatgcggcggcaagaacatcggcagcaagagcgtgcactggtatcagcagccacctggacaggctccagtggtggtggtgtacgacgacagcgatagacctagcggcatccccgagagattcagcggcagcaattccggcaataccgccacactgaccatcagcagagtggaagctggcgacgaggccgtgtactactgccaagtgtgggacagcagcagcgatcacgtggtgtttggcggcggaacaaagctgacagtgcttacgcgtttcaagatccccatcgaggaactggaagatcgggtgttcgtgaactgcaacacctctatcacctgggtggaaggcaccgtgggaacactgctgagcgacatcaccagactggacctcggcaagcggattctggaccctcggggcatctacagatgcaacggcaccgacatctacaaggacaaagaaagcaccgtgcaggtccactacagaatgtgccagtcctgcgtggaactggaccctgctacagtggccggcatcatcgtgaccgatgtgatcgctactctgctgctggctctgggagtgttctgcttcgccggacacgaaacaggcagactgtctggcgctgccgatacacaggccctgctgagaaacgaccaagtgtatcagcccctgcgcgacagagatgatgcccagtattctcacctcggcggcaactgggctagaaacaag

SEQ ID NO: 7929 - DNA, 1284 bp, Artificial Sequence
  Synthetic Polynucloetide
atggccttaccagtgaccgccttgctcctgccgctggccttgctgctccacgccgccaggccgcaactccagctgcaagagtctggccctggcctggtcaagcctagcgaaacactgagcctgacctgtaccgtgtctggcggctctatcagctccggcagctatttctggggctggatcagacaacctcctggcaaaggactggaatggatcggctccatctactacagcggcatcacctactacaaccccagcctgaagtccagagtgaccatctccgtggacaccagcaagaaccagttctccctgaagctgagcagcgtgacagccgccgataccgccgtgtattattgtgccagacatgacggcgctgtggccggcctgtttgattattggggacagggcaccctggtcaccgtgtcatctgctggcggaggcggaagtggaggcggaggatctggcggcggaggctctagctacgtgctgacacagcctccatccgtgtctgtggctccaggacagaccgccagaatcacatgcggcggcaagaacatcggcagcaagagcgtgcactggtatcagcagccacctggacaggctccagtggtggtggtgtacgacgacagcgatagacctagcggcatccccgagagattcagcggcagcaattccggcaataccgccacactgaccatcagcagagtggaagctggcgacgaggccgtgtactactgccaagtgtgggacagcagcagcgatcacgtggtgtttggcggcggaacaaagctgacagtgcttacgcgtcagagcatcaagggcaaccacctggtcaaggtgtacgactaccaagaggacggcagcgtgctgctgacatgtgatgccgaggccaagaacatcacctggtttaaggacggcaagatgatcggcttcctgaccgaggacaagaagaagtggaacctgggcagcaacgctaaggaccccagaggcatgtatcagtgcaagggcagccagaacaagagcaagcccctccaggtgtactaccggatgtgccagaactgcatcgagctgaacgccgctaccatcagcggctttctgttcgccgagatcgtgtccatcttcgtgctggccgtgggcgtgtactttatcgctggacaggatggcgtgcggcagagcagagcttccgataagcaaaccctgctgcctaacgaccagctgtaccagcctctgaaggacagagaggacgaccagtacagccacctccagggcaatcagctgagaagaaac

SEQ ID NO: 7930 - DNA, 1233 bp, Artificial Sequence
  Synthetic Polynucloetide
atggccttaccagtgaccgccttgctcctgccgctggccttgctgctccacgccgccaggccgcaactccagctgcaagagtctggccctggcctggtcaagcctagcgaaacactgagcctgacctgtaccgtgtctggcggctctatcagctccggcagctatttctggggctggatcagacaacctcctggcaaaggactggaatggatcggctccatctactacagcggcatcacctactacaaccccagcctgaagtccagagtgaccatctccgtggacaccagcaagaaccagttctccctgaagctgagcagcgtgacagccgccgataccgccgtgtattattgtgccagacatgacggcgctgtggccggcctgtttgattattggggacagggcaccctggtcaccgtgtcatctgctggcggaggcggaagtggaggcggaggatctggcggcggaggctctagctacgtgctgacacagcctccatccgtgtctgtggctccaggacagaccgccagaatcacatgcggcggcaagaacatcggcagcaagagcgtgcactggtatcagcagccacctggacaggctccagtggtggtggtgtacgacgacagcgatagacctagcggcatccccgagagattcagcggcagcaattccggcaataccgccacactgaccatcagcagagtggaagctggcgacgaggccgtgtactactgccaagtgtgggacagcagcagcgatcacgtggtgtttggcggcggaacaaagctgacagtgcttacgcgtcagagttttgggttgttggaccctaaattgtgctatctgttggacggaatcctgttcatttacggagtgatcctgaccgcattgttcctgcgggttaagttttccagatccgcagacgcacccgcttaccaacaagggcagaaccaactctacaatgaacttaatttggggcggagggaagagtacgacgttctggacaaaaggaggggacgagatcccgagatgggcggaaagcctcagcgaaggaagaatccgcaagaggggctttataacgaactccagaaagataaaatggcagaagcctatagtgagattgggatgaagggagaaaggaggaggggtaaaggtcacgatgggttgtaccaaggattgagcacagccactaaagatacctatgatgcgctccacatgcaggccctgccgccaaga

SEQ ID NO: 7931 - DNA, 1935 bp, Artificial Sequence
  Synthetic Polynucloetide
atggccttaccagtgaccgccttgctcctgccgctggccttgctgctccacgccgccaggccgagctacgtgctgacacagcctccatccgtgtctgtggctccaggacagaccgccagaatcacatgcggcggcaagaacatcggcagcaagagcgtgcactggtatcagcagccacctggacaggctccagtggtggtggtgtacgacgacagcgatagacctagcggcatccccgagagattcagcggcagcaattccggcaataccgccacactgaccatcagcagagtggaagctggcgacgaggccgtgtactactgccaagtgtgggacagcagcagcgatcacgtggtgtttggcggcggaacaaagctgacagtgcttggcggaggcggaagtggaggcggaggatctggcggcggaggctctcaactccagctgcaagagtctggccctggcctggtcaagcctagcgaaacactgagcctgacctgtaccgtgtctggcggctctatcagctccggcagctatttctggggctggatcagacaacctcctggcaaaggactggaatggatcggctccatctactacagcggcatcacctactacaaccccagcctgaagtccagagtgaccatctccgtggacaccagcaagaaccagttctccctgaagctgagcagcgtgacagccgccgataccgccgtgtattattgtgccagacatgacggcgctgtggccggcctgtttgattattggggacagggcaccctggtcaccgtgtcatctgctacgcgtgggagcggcatccagaaccctgatcctgccgtgtaccagctgcgggatagcaagagcagcgacaagagcgtgtgtctgttcaccgacttcgacagccagaccaacgtgtcccagagcaaggactccgacgtgtacatcaccgataagaccgtgctggacatgcggagcatggacttcaagagcaactccgccgtggcctggtccaacaagtccgatttcgcctgcgccaacgccttcaacaacagcattatccccgaggacacattcttcccaagccccgagagcagctgcgacgtgaagctggtggaaaagagcttcgagacagacaccaacctgaacttccagaacctgagcgtgatcggcttcagaatcctgctgctgaaagtggccggctttaacctgctgatgaccctgcggctgtggtccagccgcgccaagagaagcggatctggcgtgaagcagaccctgaatttcgacctgctgaagctggctggcgacgtggaatccaacccaggcccttctagaggccatatgaccgagtacaagcccacggtgcgcctcgccacccgcgacgacgtccccagggccgtacgcaccctcgccgccgcgttcgccgactaccccgccacgcgccacaccgtcgatccggaccgccacatcgagcgggtcaccgagctgcaagaactcttcctcacgcgcgtcgggctcgacatcggcaaggtgtgggtcgcggacgacggcgccgcggtggcggtctggaccacgccggagagcgtcgaagcgggggcggtgttcgccgagatcggcccgcgcatggccgagttgagcggttcccggctggccgcgcagcaacagatggaaggcctcctggcgccgcaccggcccaaggagcccgcgtggttcctggccaccgtcggcgtctcgcccgaccaccagggcaagggtctgggcagcgccgtcgtgctccccggagtggaggcggccgagcgcgccggggtgcccgccttcctggagacctccgcgccccgcaacctccccttctacgagcggctcggcttcaccgtcaccgccgacgtcgaggtgcccgaaggaccgcgcacctggtgcatgacccgcaagcccggtgcctga

SEQ ID NO: 7932 - DNA, 2031 bp, Artificial Sequence
  Synthetic Polynucloetide
atggccttaccagtgaccgccttgctcctgccgctggccttgctgctccacgccgccaggccgagctacgtgctgacacagcctccatccgtgtctgtggctccaggacagaccgccagaatcacatgcggcggcaagaacatcggcagcaagagcgtgcactggtatcagcagccacctggacaggctccagtggtggtggtgtacgacgacagcgatagacctagcggcatccccgagagattcagcggcagcaattccggcaataccgccacactgaccatcagcagagtggaagctggcgacgaggccgtgtactactgccaagtgtgggacagcagcagcgatcacgtggtgtttggcggcggaacaaagctgacagtgcttggcggaggcggaagtggaggcggaggatctggcggcggaggctctcaactccagctgcaagagtctggccctggcctggtcaagcctagcgaaacactgagcctgacctgtaccgtgtctggcggctctatcagctccggcagctatttctggggctggatcagacaacctcctggcaaaggactggaatggatcggctccatctactacagcggcatcacctactacaaccccagcctgaagtccagagtgaccatctccgtggacaccagcaagaaccagttctccctgaagctgagcagcgtgacagccgccgataccgccgtgtattattgtgccagacatgacggcgctgtggccggcctgtttgattattggggacagggcaccctggtcaccgtgtcatctgctctcgaggacctgaagaacgtgttcccacctgaggtggccgtgttcgagcctagcgaggccgagatcagccacacccagaaagccaccctcgtgtgcctggctaccggcttctaccccgaccatgtggaactgtcttggtgggtcaacggcaaagaggtgcacagcggcgtgtctaccgacccccagccactgaaagaacagcccgccctgaacgacagccggtactgcctgagcagcagactgagagtgtccgccaccttctggcagaacccccggaaccacttcagatgccaggtgcagttctacggcctgagcgagaacgacgagtggacccaggacagagccaagcccgtgacccagatcgtgtctgccgaagcctggggcagagccgattgcggctttaccagcgagagctaccagcagggcgtgctgagcgccaccatcctgtacgagatcctgctgggcaaggccaccctgtacgccgtgctggtgtctgccctggtgctgatggctatggtcaagcggaaggacagccggggaagggccaagcgatctggatctggagcaacaaacttctcactactcaaacaagcaggtgacgtggaggagaatcccgggcctactagaggccatatgaccgagtacaagcccacggtgcgcctcgccacccgcgacgacgtccccagggccgtacgcaccctcgccgccgcgttcgccgactaccccgccacgcgccacaccgtcgatccggaccgccacatcgagcgggtcaccgagctgcaagaactcttcctcacgcgcgtcgggctcgacatcggcaaggtgtgggtcgcggacgacggcgccgcggtggcggtctggaccacgccggagagcgtcgaagcgggggcggtgttcgccgagatcggcccgcgcatggccgagttgagcggttcccggctggccgcgcagcaacagatggaaggcctcctggcgccgcaccggcccaaggagcccgcgtggttcctggccaccgtcggcgtctcgcccgaccaccagggcaagggtctgggcagcgccgtcgtgctccccggagtggaggcggccgagcgcgccggggtgcccgccttcctggagacctccgcgccccgcaacctccccttctacgagcggctcggcttcaccgtcaccgccgacgtcgaggtgcccgaaggaccgcgcacctggtgcatgacccgcaagcccggtgcctga

SEQ ID NO: 7933 - DNA, 2181 bp, Artificial Sequence
  Synthetic Polynucloetide
atggccttaccagtgaccgccttgctcctgccgctggccttgctgctccacgccgccaggccgagctacgtgctgacacagcctccatccgtgtctgtggctccaggacagaccgccagaatcacatgcggcggcaagaacatcggcagcaagagcgtgcactggtatcagcagccacctggacaggctccagtggtggtggtgtacgacgacagcgatagacctagcggcatccccgagagattcagcggcagcaattccggcaataccgccacactgaccatcagcagagtggaagctggcgacgaggccgtgtactactgccaagtgtgggacagcagcagcgatcacgtggtgtttggcggcggaacaaagctgacagtgcttggcggaggcggaagtggaggcggaggatctggcggcggaggctctcaactccagctgcaagagtctggccctggcctggtcaagcctagcgaaacactgagcctgacctgtaccgtgtctggcggctctatcagctccggcagctatttctggggctggatcagacaacctcctggcaaaggactggaatggatcggctccatctactacagcggcatcacctactacaaccccagcctgaagtccagagtgaccatctccgtggacaccagcaagaaccagttctccctgaagctgagcagcgtgacagccgccgataccgccgtgtattattgtgccagacatgacggcgctgtggccggcctgtttgattattggggacagggcaccctggtcaccgtgtcatctgctacgcgtgagcagaaactgatctcggaagaggatctggggagcggcaccccattcccttctctggcccctcccatcatgctgctggtggacggcaagcagcagatggtggtcgtgtgcctggtgctggatgtggccccacctggactggacagccccatctggtttagcgccggcaatggctctgccctggacgcctttacctacggcccaagccctgccaccgatggcacctggacaaatctggcccacctgagcctgcccagcgaggaactggcttcttgggagcctctcgtgtgccacacaggacctggcgctgagggacacagcagatccacccagcctatgcacctgtctggcgaggccagcaccgccagaacctgtcctcaggaacctctgagaggcacccctggcggagcactgtggctgggagtgctgagactgctgctgttcaagctgctgctgtttgacctgctgctgacctgctcctgtctgtgcgatcctgccggccctctgccttctcctgccaccaccacaagactgagagccctgggcagccacagactgcaccctgccacagagacaggcggcagagaggccacaagcagccctagaccccagcccagagacagaagatggggcgataccccccctggcagaaagcctggatctccagtccgcgccaagagaagcggatctggcgtgaagcagaccctgaatttcgacctgctgaagctggctggcgacgtggaatccaacccaggcccttctagatctagaggccatatgaccgagtacaagcccacggtgcgcctcgccacccgcgacgacgtccccagggccgtacgcaccctcgccgccgcgttcgccgactaccccgccacgcgccacaccgtcgatccggaccgccacatcgagcgggtcaccgagctgcaagaactcttcctcacgcgcgtcgggctcgacatcggcaaggtgtgggtcgcggacgacggcgccgcggtggcggtctggaccacgccggagagcgtcgaagcgggggcggtgttcgccgagatcggcccgcgcatggccgagttgagcggttcccggctggccgcgcagcaacagatggaaggcctcctggcgccgcaccggcccaaggagcccgcgtggttcctggccaccgtcggcgtctcgcccgaccaccagggcaagggtctgggcagcgccgtcgtgctccccggagtggaggcggccgagcgcgccggggtgcccgccttcctggagacctccgcgccccgcaacctccccttctacgagcggctcggcttcaccgtcaccgccgacgtcgaggtgcccgaaggaccgcgcacctggtgcatgacccgcaagcccggtgcctga

SEQ ID NO: 7934 - DNA, 1620 bp, Artificial Sequence
  Synthetic Polynucloetide
atggccttaccagtgaccgccttgctcctgccgctggccttgctgctccacgccgccaggccgagctacgtgctgacacagcctccatccgtgtctgtggctccaggacagaccgccagaatcacatgcggcggcaagaacatcggcagcaagagcgtgcactggtatcagcagccacctggacaggctccagtggtggtggtgtacgacgacagcgatagacctagcggcatccccgagagattcagcggcagcaattccggcaataccgccacactgaccatcagcagagtggaagctggcgacgaggccgtgtactactgccaagtgtgggacagcagcagcgatcacgtggtgtttggcggcggaacaaagctgacagtgcttctcgaggacctgaagaacgtgttcccacctgaggtggccgtgttcgagcctagcgaggccgagatcagccacacccagaaagccaccctcgtgtgcctggctaccggcttctaccccgaccatgtggaactgtcttggtgggtcaacggcaaagaggtgcacagcggcgtgtctaccgacccccagccactgaaagaacagcccgccctgaacgacagccggtactgcctgagcagcagactgagagtgtccgccaccttctggcagaacccccggaaccacttcagatgccaggtgcagttctacggcctgagcgagaacgacgagtggacccaggacagagccaagcccgtgacccagatcgtgtctgccgaagcctggggcagagccgattgcggctttaccagcgagagctaccagcagggcgtgctgagcgccaccatcctgtacgagatcctgctgggcaaggccaccctgtacgccgtgctggtgtctgccctggtgctgatggctatggtcaagcggaaggacagccggggaagggccaagcgatctggatctggagcaacaaacttctcactactcaaacaagcaggtgacgtggaggagaatcccgggcctactagaggccatatgaccgagtacaagcccacggtgcgcctcgccacccgcgacgacgtccccagggccgtacgcaccctcgccgccgcgttcgccgactaccccgccacgcgccacaccgtcgatccggaccgccacatcgagcgggtcaccgagctgcaagaactcttcctcacgcgcgtcgggctcgacatcggcaaggtgtgggtcgcggacgacggcgccgcggtggcggtctggaccacgccggagagcgtcgaagcgggggcggtgttcgccgagatcggcccgcgcatggccgagttgagcggttcccggctggccgcgcagcaacagatggaaggcctcctggcgccgcaccggcccaaggagcccgcgtggttcctggccaccgtcggcgtctcgcccgaccaccagggcaagggtctgggcagcgccgtcgtgctccccggagtggaggcggccgagcgcgccggggtgcccgccttcctggagacctccgcgccccgcaacctccccttctacgagcggctcggcttcaccgtcaccgccgacgtcgaggtgcccgaaggaccgcgcacctggtgcatgacccgcaagcccggtgcctga

SEQ ID NO: 7935 - DNA, 927 bp, Artificial Sequence
  Synthetic Polynucloetide
atggccttaccagtgaccgccttgctcctgccgctggccttgctgctccacgccgccaggccgagctacgtgctgacacagcctccatccgtgtctgtggctccaggacagaccgccagaatcacatgcggcggcaagaacatcggcagcaagagcgtgcactggtatcagcagccacctggacaggctccagtggtggtggtgtacgacgacagcgatagacctagcggcatccccgagagattcagcggcagcaattccggcaataccgccacactgaccatcagcagagtggaagctggcgacgaggccgtgtactactgccaagtgtgggacagcagcagcgatcacgtggtgtttggcggcggaacaaagctgacagtgcttctcgaggacctgaagaacgtgttcccacctgaggtggccgtgttcgagcctagcgaggccgagatcagccacacccagaaagccaccctcgtgtgcctggctaccggcttctaccccgaccatgtggaactgtcttggtgggtcaacggcaaagaggtgcacagcggcgtgtctaccgacccccagccactgaaagaacagcccgccctgaacgacagccggtactgcctgagcagcagactgagagtgtccgccaccttctggcagaacccccggaaccacttcagatgccaggtgcagttctacggcctgagcgagaacgacgagtggacccaggacagagccaagcccgtgacccagatcgtgtctgccgaagcctggggcagagccgattgcggctttaccagcgagagctaccagcagggcgtgctgagcgccaccatcctgtacgagatcctgctgggcaaggccaccctgtacgccgtgctggtgtctgccctggtgctgatggctatggtcaagcggaaggacagccgggga

SEQ ID NO: 7936 - DNA, 1356 bp, Artificial Sequence
  Synthetic Polynucloetide
atggactggatttggcgcatccttttccttgtcggcgctgctaccggcgcgcattccttcgaacaactccagctgcaagagtctggccctggcctggtcaagcctagcgaaacactgagcctgacctgtaccgtgtctggcggctctatcagctccggcagctatttctggggctggatcagacaacctcctggcaaaggactggaatggatcggctccatctactacagcggcatcacctactacaaccccagcctgaagtccagagtgaccatctccgtggacaccagcaagaaccagttctccctgaagctgagcagcgtgacagccgccgataccgccgtgtattattgtgccagacatgacggcgctgtggccggcctgtttgattattggggacagggcaccctggtcaccgtgtcatctgctacgcgtatccagaaccctgatcctgccgtgtaccagctgcgggatagcaagagcagcgacaagagcgtgtgtctgttcaccgacttcgacagccagaccaacgtgtcccagagcaaggactccgacgtgtacatcaccgataagaccgtgctggacatgcggagcatggacttcaagagcaactccgccgtggcctggtccaacaagtccgatttcgcctgcgccaacgccttcaacaacagcattatccccgaggacacattcttcccaagccccgagagcagctgcgacgtgaagctggtggaaaagagcttcgagacagacaccaacctgaacttccagaacctgagcgtgatcggcttcagaatcctgctgctgaaagtggccggctttaacctgctgatgaccctgcggctgtggtccagccgcgccaagagaagcggatctggcgtgaagcagaccctgaatttcgacctgctgaagctggctggcgacgtggaatccaacccaggcccttctagaggccatatggccaagcctttgtctcaagaagaatccaccctcattgaaagagcaacggctacaatcaacagcatccccatctctgaagactacagcgtcgccagcgcagctctctctagcgacggccgcatcttcactggtgtcaatgtatatcattttactgggggaccttgtgcagaactcgtggtgctgggcactgctgctgctgcggcagctggcaacctgacttgtatcgtcgcgatcggaaatgagaacaggggcatcttgagcccctgcggacggtgccgacaggtgcttctcgatctgcatcctgggatcaaagccatagtgaaggacagtgatggacagccgacggcagttgggattcgtgaattgctgccctctggttatgtgtgggagggctga

SEQ ID NO: 7937 - DNA, 855 bp, Artificial Sequence
  Synthetic Polynucloetide
atggactggatttggcgcatccttttccttgtcggcgctgctaccggcgcgcattccttcgaacaactccagctgcaagagtctggccctggcctggtcaagcctagcgaaacactgagcctgacctgtaccgtgtctggcggctctatcagctccggcagctatttctggggctggatcagacaacctcctggcaaaggactggaatggatcggctccatctactacagcggcatcacctactacaaccccagcctgaagtccagagtgaccatctccgtggacaccagcaagaaccagttctccctgaagctgagcagcgtgacagccgccgataccgccgtgtattattgtgccagacatgacggcgctgtggccggcctgtttgattattggggacagggcaccctggtcaccgtgtcatctgctacgcgtatccagaaccctgatcctgccgtgtaccagctgcgggatagcaagagcagcgacaagagcgtgtgtctgttcaccgacttcgacagccagaccaacgtgtcccagagcaaggactccgacgtgtacatcaccgataagaccgtgctggacatgcggagcatggacttcaagagcaactccgccgtggcctggtccaacaagtccgatttcgcctgcgccaacgccttcaacaacagcattatccccgaggacacattcttcccaagccccgagagcagctgcgacgtgaagctggtggaaaagagcttcgagacagacaccaacctgaacttccagaacctgagcgtgatcggcttcagaatcctgctgctgaaagtggccggctttaacctgctgatgaccctgcggctgtggtccagc

SEQ ID NO: 7938 - DNA, 1674 bp, Artificial Sequence
  Synthetic Polynucloetide
atggccttaccagtgaccgccttgctcctgccgctggccttgctgctccacgccgccaggccgagctacgtgctgacacagcctccatccgtgtctgtggctccaggacagaccgccagaatcacatgcggcggcaagaacatcggcagcaagagcgtgcactggtatcagcagccacctggacaggctccagtggtggtggtgtacgacgacagcgatagacctagcggcatccccgagagattcagcggcagcaattccggcaataccgccacactgaccatcagcagagtggaagctggcgacgaggccgtgtactactgccaagtgtgggacagcagcagcgatcacgtggtgtttggcggcggaacaaagctgacagtgcttctcgaggggaaaccaattcccaaccctcttctgggactggattcaaccggcagcggcgaggacctgaagaacgtgttcccacctgaggtggccgtgttcgagcctagcgaggccgagatcagccacacccagaaagccaccctcgtgtgcctggctaccggcttctaccccgaccatgtggaactgtcttggtgggtcaacggcaaagaggtgcacagcggcgtgtgtaccgacccccagccactgaaagaacagcccgccctgaacgacagccggtactgcctgagcagcagactgagagtgtccgccaccttctggcagaacccccggaaccacttcagatgccaggtgcagttctacggcctgagcgagaacgacgagtggacccaggacagagccaagcccgtgacccagatcgtgtctgccgaagcctggggcagagccgattgcggctttaccagcgagagctaccagcagggcgtgctgagcgccaccatcctgtacgagatcctgctgggcaaggccaccctgtacgccgtgctggtgtctgccctggtgctgatggctatggtcaagcggaaggacagccggggaagggccaagcgatctggatctggagcaacaaacttctcactactcaaacaagcaggtgacgtggaggagaatcccgggcctactagaggccatatgaccgagtacaagcccacggtgcgcctcgccacccgcgacgacgtccccagggccgtacgcaccctcgccgccgcgttcgccgactaccccgccacgcgccacaccgtcgatccggaccgccacatcgagcgggtcaccgagctgcaagaactcttcctcacgcgcgtcgggctcgacatcggcaaggtgtgggtcgcggacgacggcgccgcggtggcggtctggaccacgccggagagcgtcgaagcgggggcggtgttcgccgagatcggcccgcgcatggccgagttgagcggttcccggctggccgcgcagcaacagatggaaggcctcctggcgccgcaccggcccaaggagcccgcgtggttcctggccaccgtcggcgtctcgcccgaccaccagggcaagggtctgggcagcgccgtcgtgctccccggagtggaggcggccgagcgcgccggggtgcccgccttcctggagacctccgcgccccgcaacctccccttctacgagcggctcggcttcaccgtcaccgccgacgtcgaggtgcccgaaggaccgcgcacctggtgcatgacccgcaagcccggtgcctga

SEQ ID NO: 7939 - DNA, 984 bp, Artificial Sequence
  Synthetic Polynucloetide
atggccttaccagtgaccgccttgctcctgccgctggccttgctgctccacgccgccaggccgagctacgtgctgacacagcctccatccgtgtctgtggctccaggacagaccgccagaatcacatgcggcggcaagaacatcggcagcaagagcgtgcactggtatcagcagccacctggacaggctccagtggtggtggtgtacgacgacagcgatagacctagcggcatccccgagagattcagcggcagcaattccggcaataccgccacactgaccatcagcagagtggaagctggcgacgaggccgtgtactactgccaagtgtgggacagcagcagcgatcacgtggtgtttggcggcggaacaaagctgacagtgcttctcgaggggaaaccaattcccaaccctcttctgggactggattcaaccggcagcggcgaggacctgaagaacgtgttcccacctgaggtggccgtgttcgagcctagcgaggccgagatcagccacacccagaaagccaccctcgtgtgcctggctaccggcttctaccccgaccatgtggaactgtcttggtgggtcaacggcaaagaggtgcacagcggcgtgtgtaccgacccccagccactgaaagaacagcccgccctgaacgacagccggtactgcctgagcagcagactgagagtgtccgccaccttctggcagaacccccggaaccacttcagatgccaggtgcagttctacggcctgagcgagaacgacgagtggacccaggacagagccaagcccgtgacccagatcgtgtctgccgaagcctggggcagagccgattgcggctttaccagcgagagctaccagcagggcgtgctgagcgccaccatcctgtacgagatcctgctgggcaaggccaccctgtacgccgtgctggtgtctgccctggtgctgatggctatggtcaagcggaaggacagccggggatga

SEQ ID NO: 7940 - DNA, 1392 bp, Artificial Sequence
  Synthetic Polynucloetide
atggactggatttggcgcatccttttccttgtcggcgctgctaccggcgcgcattccttcgaacaactccagctgcaagagtctggccctggcctggtcaagcctagcgaaacactgagcctgacctgtaccgtgtctggcggctctatcagctccggcagctatttctggggctggatcagacaacctcctggcaaaggactggaatggatcggctccatctactacagcggcatcacctactacaaccccagcctgaagtccagagtgaccatctccgtggacaccagcaagaaccagttctccctgaagctgagcagcgtgacagccgccgataccgccgtgtattattgtgccagacatgacggcgctgtggccggcctgtttgattattggggacagggcaccctggtcaccgtgtcatctgctacgcgtgagcagaaactgatctcggaagaggatgggagcggcatccagaaccctgatcctgccgtgtaccagctgcgggatagcaagagcagcgacaagagcgtgtgtctgttcaccgacttcgacagccagaccaacgtgtcccagagcaaggactccgacgtgtacatcaccgataagtgcgtgctggacatgcggagcatggacttcaagagcaactccgccgtggcctggtccaacaagtccgatttcgcctgcgccaacgccttcaacaacagcattatccccgaggacacattcttcccaagccccgagagcagctgcgacgtgaagctggtggaaaagagcttcgagacagacaccaacctgaacttccagaacctgagcgtgatcggcttcagaatcctgctgctgaaagtggccggctttaacctgctgatgaccctgcggctgtggtccagccgcgccaagagaagcggatctggcgtgaagcagaccctgaatttcgacctgctgaagctggctggcgacgtggaatccaacccaggcccttctagaggccatatggccaagcctttgtctcaagaagaatccaccctcattgaaagagcaacggctacaatcaacagcatccccatctctgaagactacagcgtcgccagcgcagctctctctagcgacggccgcatcttcactggtgtcaatgtatatcattttactgggggaccttgtgcagaactcgtggtgctgggcactgctgctgctgcggcagctggcaacctgacttgtatcgtcgcgatcggaaatgagaacaggggcatcttgagcccctgcggacggtgccgacaggtgcttctcgatctgcatcctgggatcaaagccatagtgaaggacagtgatggacagccgacggcagttgggattcgtgaattgctgccctctggttatgtgtgggagggctga

SEQ ID NO: 7941 - DNA, 894 bp, Artificial Sequence
  Synthetic Polynucloetide
atggactggatttggcgcatccttttccttgtcggcgctgctaccggcgcgcattccttcgaacaactccagctgcaagagtctggccctggcctggtcaagcctagcgaaacactgagcctgacctgtaccgtgtctggcggctctatcagctccggcagctatttctggggctggatcagacaacctcctggcaaaggactggaatggatcggctccatctactacagcggcatcacctactacaaccccagcctgaagtccagagtgaccatctccgtggacaccagcaagaaccagttctccctgaagctgagcagcgtgacagccgccgataccgccgtgtattattgtgccagacatgacggcgctgtggccggcctgtttgattattggggacagggcaccctggtcaccgtgtcatctgctacgcgtgagcagaaactgatctcggaagaggatgggagcggcatccagaaccctgatcctgccgtgtaccagctgcgggatagcaagagcagcgacaagagcgtgtgtctgttcaccgacttcgacagccagaccaacgtgtcccagagcaaggactccgacgtgtacatcaccgataagtgcgtgctggacatgcggagcatggacttcaagagcaactccgccgtggcctggtccaacaagtccgatttcgcctgcgccaacgccttcaacaacagcattatccccgaggacacattcttcccaagccccgagagcagctgcgacgtgaagctggtggaaaagagcttcgagacagacaccaacctgaacttccagaacctgagcgtgatcggcttcagaatcctgctgctgaaagtggccggctttaacctgctgatgaccctgcggctgtggtccagctga

SEQ ID NO: 7942 - DNA, 1935 bp, Artificial Sequence
  Synthetic Polynucloetide
atggccttaccagtgaccgccttgctcctgccgctggccttgctgctccacgccgccaggccgagctacgtgctgacacagcctccatccgtgtctgtggctccaggacagaccgccagaatcacatgcggcggcaagaacatcggcagcaagagcgtgcactggtatcagcagccacctggacaggctccagtggtggtggtgtacgacgacagcgatagacctagcggcatccccgagagattcagcggcagcaattccggcaataccgccacactgaccatcagcagagtggaagctggcgacgaggccgtgtactactgccaagtgtgggacagcagcagcgatcacgtggtgtttggcggcggaacaaagctgacagtgcttggcggaggcggaagtggaggcggaggatctggcggcggaggctctcaactccagctgcaagagtctggccctggcctggtcaagcctagcgaaacactgagcctgacctgtaccgtgtctggcggctctatcagctccggcagctatttctggggctggatcagacaacctcctggcaaaggactggaatggatcggctccatctactacagcggcatcacctactacaaccccagcctgaagtccagagtgaccatctccgtggacaccagcaagaaccagttctccctgaagctgagcagcgtgacagccgccgataccgccgtgtattattgtgccagacatgacggcgctgtggccggcctgtttgattattggggacagggcaccctggtcaccgtgtcatctgctacgcgtgggagcggcatccagaaccctgatcctgccgtgtaccagctgcgggatagcaagagcagcgacaagagcgtgtgtctgttcaccgacttcgacagccagaccaacgtgtcccagagcaaggactccgacgtgtacatcaccgataagaccgtgctggacatgcggagcatggacttcaagagcaactccgccgtggcctggtccaacaagtccgatttcgcctgcgccaacgccttcaacaacagcattatccccgaggacacattcttcccaagcagcgacgtgccctgcgacgtgaagctggtggaaaagagcttcgagacagacaccaacctgaacttccagaacctgagcgtgatcggcttcagaatcctgctgctgaaagtggccggctttaacctgctgatgaccctgcggctgtggtccagccgcgccaagagaagcggatctggcgtgaagcagaccctgaatttcgacctgctgaagctggctggcgacgtggaatccaacccaggcccttctagaggccatatgaccgagtacaagcccacggtgcgcctcgccacccgcgacgacgtccccagggccgtacgcaccctcgccgccgcgttcgccgactaccccgccacgcgccacaccgtcgatccggaccgccacatcgagcgggtcaccgagctgcaagaactcttcctcacgcgcgtcgggctcgacatcggcaaggtgtgggtcgcggacgacggcgccgcggtggcggtctggaccacgccggagagcgtcgaagcgggggcggtgttcgccgagatcggcccgcgcatggccgagttgagcggttcccggctggccgcgcagcaacagatggaaggcctcctggcgccgcaccggcccaaggagcccgcgtggttcctggccaccgtcggcgtctcgcccgaccaccagggcaagggtctgggcagcgccgtcgtgctccccggagtggaggcggccgagcgcgccggggtgcccgccttcctggagacctccgcgccccgcaacctccccttctacgagcggctcggcttcaccgtcaccgccgacgtcgaggtgcccgaaggaccgcgcacctggtgcatgacccgcaagcccggtgcctga

SEQ ID NO: 7943 - DNA, 2031 bp, Artificial Sequence
  Synthetic Polynucloetide
atggccttaccagtgaccgccttgctcctgccgctggccttgctgctccacgccgccaggccgagctacgtgctgacacagcctccatccgtgtctgtggctccaggacagaccgccagaatcacatgcggcggcaagaacatcggcagcaagagcgtgcactggtatcagcagccacctggacaggctccagtggtggtggtgtacgacgacagcgatagacctagcggcatccccgagagattcagcggcagcaattccggcaataccgccacactgaccatcagcagagtggaagctggcgacgaggccgtgtactactgccaagtgtgggacagcagcagcgatcacgtggtgtttggcggcggaacaaagctgacagtgcttggcggaggcggaagtggaggcggaggatctggcggcggaggctctcaactccagctgcaagagtctggccctggcctggtcaagcctagcgaaacactgagcctgacctgtaccgtgtctggcggctctatcagctccggcagctatttctggggctggatcagacaacctcctggcaaaggactggaatggatcggctccatctactacagcggcatcacctactacaaccccagcctgaagtccagagtgaccatctccgtggacaccagcaagaaccagttctccctgaagctgagcagcgtgacagccgccgataccgccgtgtattattgtgccagacatgacggcgctgtggccggcctgtttgattattggggacagggcaccctggtcaccgtgtcatctgctctcgaggacctgaagaacgtgttcccacctgaggtggccgtgttcgagcctagcaaggccgagatcgcccacacccagaaagccaccctcgtgtgcctggctaccggcttctaccccgaccatgtggaactgtcttggtgggtcaacggcaaagaggtgcacagcggcgtgtctaccgacccccagccactgaaagaacagcccgccctgaacgacagccggtactgcctgagcagcagactgagagtgtccgccaccttctggcagaacccccggaaccacttcagatgccaggtgcagttctacggcctgagcgagaacgacgagtggacccaggacagagccaagcccgtgacccagatcgtgtctgccgaagcctggggcagagccgattgcggcatcaccagcgccagctaccaccagggcgtgctgagcgccaccatcctgtacgagatcctgctgggcaaggccaccctgtacgccgtgctggtgtctgccctggtgctgatggctatggtcaagcggaaggacagccggggaagggccaagcgatctggatctggagcaacaaacttctcactactcaaacaagcaggtgacgtggaggagaatcccgggcctactagaggccatatgaccgagtacaagcccacggtgcgcctcgccacccgcgacgacgtccccagggccgtacgcaccctcgccgccgcgttcgccgactaccccgccacgcgccacaccgtcgatccggaccgccacatcgagcgggtcaccgagctgcaagaactcttcctcacgcgcgtcgggctcgacatcggcaaggtgtgggtcgcggacgacggcgccgcggtggcggtctggaccacgccggagagcgtcgaagcgggggcggtgttcgccgagatcggcccgcgcatggccgagttgagcggttcccggctggccgcgcagcaacagatggaaggcctcctggcgccgcaccggcccaaggagcccgcgtggttcctggccaccgtcggcgtctcgcccgaccaccagggcaagggtctgggcagcgccgtcgtgctccccggagtggaggcggccgagcgcgccggggtgcccgccttcctggagacctccgcgccccgcaacctccccttctacgagcggctcggcttcaccgtcaccgccgacgtcgaggtgcccgaaggaccgcgcacctggtgcatgacccgcaagcccggtgcctga

SEQ ID NO: 7944 - DNA, 2100 bp, Artificial Sequence
  Synthetic Polynucloetide
atggccttaccagtgaccgccttgctcctgccgctggccttgctgctccacgccgccaggccgagctacgtgctgacacagcctccatccgtgtctgtggctccaggacagaccgccagaatcacatgcggcggcaagaacatcggcagcaagagcgtgcactggtatcagcagccacctggacaggctccagtggtggtggtgtacgacgacagcgatagacctagcggcatccccgagagattcagcggcagcaattccggcaataccgccacactgaccatcagcagagtggaagctggcgacgaggccgtgtactactgccaagtgtgggacagcagcagcgatcacgtggtgtttggcggcggaacaaagctgacagtgcttggcggaggcggaagtggaggcggaggatctggcggcggaggctctcaactccagctgcaagagtctggccctggcctggtcaagcctagcgaaacactgagcctgacctgtaccgtgtctggcggctctatcagctccggcagctatttctggggctggatcagacaacctcctggcaaaggactggaatggatcggctccatctactacagcggcatcacctactacaaccccagcctgaagtccagagtgaccatctccgtggacaccagcaagaaccagttctccctgaagctgagcagcgtgacagccgccgataccgccgtgtattattgtgccagacatgacggcgctgtggccggcctgtttgattattggggacagggcaccctggtcaccgtgtcatctgctacgcgtgggtctggaggcggaggcagcggcggaggcgggagcggcgacggtaacgaggagatgggaggaatcactcaaaccccttacaaagtctcaatttcaggaacaactgttatccttacatgtccccagtatcctggcagcgagatcctttggcagcataacgacaagaatatagggggagatgaagacgataagaatatcggatctgacgaggatcacttgagcctgaaagagttctccgagcttgaacaaagcggatattatgtgtgctatccgcgcgggtcaaagccggaagacgctaacttttacctttatctccgagccagagtgtgcgaaaattgcatggaaatggacgttatgtccgttgctacaatagttatcgtagatatatgcatcacgggtggactgcttctgctggtttattattggtccaagaatagaaaggccaaagctaaacccgtgaccagaggcgctggcgcaggcggaaggcaaaggggacaaaacaaagaacggccaccaccagtgccaaatccagattatgagcctattcggaaaggacagagggacctgtactctggcctgaatcagagaagaatccgcgccaagagaagcggatctggcgtgaagcagaccctgaatttcgacctgctgaagctggctggcgacgtggaatccaacccaggcccttctagaggccatatgaccgagtacaagcccacggtgcgcctcgccacccgcgacgacgtccccagggccgtacgcaccctcgccgccgcgttcgccgactaccccgccacgcgccacaccgtcgatccggaccgccacatcgagcgggtcaccgagctgcaagaactcttcctcacgcgcgtcgggctcgacatcggcaaggtgtgggtcgcggacgacggcgccgcggtggcggtctggaccacgccggagagcgtcgaagcgggggcggtgttcgccgagatcggcccgcgcatggccgagttgagcggttcccggctggccgcgcagcaacagatggaaggcctcctggcgccgcaccggcccaaggagcccgcgtggttcctggccaccgtcggcgtctcgcccgaccaccagggcaagggtctgggcagcgccgtcgtgctccccggagtggaggcggccgagcgcgccggggtgcccgccttcctggagacctccgcgccccgcaacctccccttctacgagcggctcggcttcaccgtcaccgccgacgtcgaggtgcccgaaggaccgcgcacctggtgcatgacccgcaagcccggtgcctga

SEQ ID NO: 7945 - DNA, 1995 bp, Artificial Sequence
  Synthetic Polynucloetide
atggccttaccagtgaccgccttgctcctgccgctggccttgctgctccacgccgccaggccgagctacgtgctgacacagcctccatccgtgtctgtggctccaggacagaccgccagaatcacatgcggcggcaagaacatcggcagcaagagcgtgcactggtatcagcagccacctggacaggctccagtggtggtggtgtacgacgacagcgatagacctagcggcatccccgagagattcagcggcagcaattccggcaataccgccacactgaccatcagcagagtggaagctggcgacgaggccgtgtactactgccaagtgtgggacagcagcagcgatcacgtggtgtttggcggcggaacaaagctgacagtgcttggcggaggcggaagtggaggcggaggatctggcggcggaggctctcaactccagctgcaagagtctggccctggcctggtcaagcctagcgaaacactgagcctgacctgtaccgtgtctggcggctctatcagctccggcagctatttctggggctggatcagacaacctcctggcaaaggactggaatggatcggctccatctactacagcggcatcacctactacaaccccagcctgaagtccagagtgaccatctccgtggacaccagcaagaaccagttctccctgaagctgagcagcgtgacagccgccgataccgccgtgtattattgtgccagacatgacggcgctgtggccggcctgtttgattattggggacagggcaccctggtcaccgtgtcatctgctacgcgtgggtctggaggcggaggcagcggcggaggcgggagcggcttcaagatccccatcgaggaactggaagatcgggtgttcgtgaactgcaacacctctatcacctgggtggaaggcaccgtgggaacactgctgagcgacatcaccagactggacctcggcaagcggattctggaccctcggggcatctacagatgcaacggcaccgacatctacaaggacaaagaaagcaccgtgcaggtccactacagaatgtgccagtcctgcgtggaactggaccctgctacagtggccggcatcatcgtgaccgatgtgatcgctactctgctgctggctctgggagtgttctgcttcgccggacacgaaacaggcagactgtctggcgctgccgatacacaggccctgctgagaaacgaccaagtgtatcagcccctgcgcgacagagatgatgcccagtattctcacctcggcggcaactgggctagaaacaagcgcgccaagagaagcggatctggcgtgaagcagaccctgaatttcgacctgctgaagctggctggcgacgtggaatccaacccaggcccttctagaggccatatgaccgagtacaagcccacggtgcgcctcgccacccgcgacgacgtccccagggccgtacgcaccctcgccgccgcgttcgccgactaccccgccacgcgccacaccgtcgatccggaccgccacatcgagcgggtcaccgagctgcaagaactcttcctcacgcgcgtcgggctcgacatcggcaaggtgtgggtcgcggacgacggcgccgcggtggcggtctggaccacgccggagagcgtcgaagcgggggcggtgttcgccgagatcggcccgcgcatggccgagttgagcggttcccggctggccgcgcagcaacagatggaaggcctcctggcgccgcaccggcccaaggagcccgcgtggttcctggccaccgtcggcgtctcgcccgaccaccagggcaagggtctgggcagcgccgtcgtgctccccggagtggaggcggccgagcgcgccggggtgcccgccttcctggagacctccgcgccccgcaacctccccttctacgagcggctcggcttcaccgtcaccgccgacgtcgaggtgcccgaaggaccgcgcacctggtgcatgacccgcaagcccggtgcctga

SEQ ID NO: 7946 - DNA, 2025 bp, Artificial Sequence
  Synthetic Polynucloetide
atggccttaccagtgaccgccttgctcctgccgctggccttgctgctccacgccgccaggccgagctacgtgctgacacagcctccatccgtgtctgtggctccaggacagaccgccagaatcacatgcggcggcaagaacatcggcagcaagagcgtgcactggtatcagcagccacctggacaggctccagtggtggtggtgtacgacgacagcgatagacctagcggcatccccgagagattcagcggcagcaattccggcaataccgccacactgaccatcagcagagtggaagctggcgacgaggccgtgtactactgccaagtgtgggacagcagcagcgatcacgtggtgtttggcggcggaacaaagctgacagtgcttggcggaggcggaagtggaggcggaggatctggcggcggaggctctcaactccagctgcaagagtctggccctggcctggtcaagcctagcgaaacactgagcctgacctgtaccgtgtctggcggctctatcagctccggcagctatttctggggctggatcagacaacctcctggcaaaggactggaatggatcggctccatctactacagcggcatcacctactacaaccccagcctgaagtccagagtgaccatctccgtggacaccagcaagaaccagttctccctgaagctgagcagcgtgacagccgccgataccgccgtgtattattgtgccagacatgacggcgctgtggccggcctgtttgattattggggacagggcaccctggtcaccgtgtcatctgctacgcgtgggtctggaggcggaggcagcggcggaggcgggagcggccagagcatcaagggcaaccacctggtcaaggtgtacgactaccaagaggacggcagcgtgctgctgacatgtgatgccgaggccaagaacatcacctggtttaaggacggcaagatgatcggcttcctgaccgaggacaagaagaagtggaacctgggcagcaacgctaaggaccccagaggcatgtatcagtgcaagggcagccagaacaagagcaagcccctccaggtgtactaccggatgtgccagaactgcatcgagctgaacgccgctaccatcagcggctttctgttcgccgagatcgtgtccatcttcgtgctggccgtgggcgtgtactttatcgctggacaggatggcgtgcggcagagcagagcttccgataagcaaaccctgctgcctaacgaccagctgtaccagcctctgaaggacagagaggacgaccagtacagccacctccagggcaatcagctgagaagaaaccgcgccaagagaagcggatctggcgtgaagcagaccctgaatttcgacctgctgaagctggctggcgacgtggaatccaacccaggcccttctagaggccatatgaccgagtacaagcccacggtgcgcctcgccacccgcgacgacgtccccagggccgtacgcaccctcgccgccgcgttcgccgactaccccgccacgcgccacaccgtcgatccggaccgccacatcgagcgggtcaccgagctgcaagaactcttcctcacgcgcgtcgggctcgacatcggcaaggtgtgggtcgcggacgacggcgccgcggtggcggtctggaccacgccggagagcgtcgaagcgggggcggtgttcgccgagatcggcccgcgcatggccgagttgagcggttcccggctggccgcgcagcaacagatggaaggcctcctggcgccgcaccggcccaaggagcccgcgtggttcctggccaccgtcggcgtctcgcccgaccaccagggcaagggtctgggcagcgccgtcgtgctccccggagtggaggcggccgagcgcgccggggtgcccgccttcctggagacctccgcgccccgcaacctccccttctacgagcggctcggcttcaccgtcaccgccgacgtcgaggtgcccgaaggaccgcgcacctggtgcatgacccgcaagcccggtgcctga

SEQ ID NO: 7947 - DNA, 1974 bp, Artificial Sequence
  Synthetic Polynucloetide
atggccttaccagtgaccgccttgctcctgccgctggccttgctgctccacgccgccaggccgagctacgtgctgacacagcctccatccgtgtctgtggctccaggacagaccgccagaatcacatgcggcggcaagaacatcggcagcaagagcgtgcactggtatcagcagccacctggacaggctccagtggtggtggtgtacgacgacagcgatagacctagcggcatccccgagagattcagcggcagcaattccggcaataccgccacactgaccatcagcagagtggaagctggcgacgaggccgtgtactactgccaagtgtgggacagcagcagcgatcacgtggtgtttggcggcggaacaaagctgacagtgcttggcggaggcggaagtggaggcggaggatctggcggcggaggctctcaactccagctgcaagagtctggccctggcctggtcaagcctagcgaaacactgagcctgacctgtaccgtgtctggcggctctatcagctccggcagctatttctggggctggatcagacaacctcctggcaaaggactggaatggatcggctccatctactacagcggcatcacctactacaaccccagcctgaagtccagagtgaccatctccgtggacaccagcaagaaccagttctccctgaagctgagcagcgtgacagccgccgataccgccgtgtattattgtgccagacatgacggcgctgtggccggcctgtttgattattggggacagggcaccctggtcaccgtgtcatctgctacgcgtgggtctggaggcggaggcagcggcggaggcgggagcggccagagttttgggttgttggaccctaaattgtgctatctgttggacggaatcctgttcatttacggagtgatcctgaccgcattgttcctgcgggttaagttttccagatccgcagacgcacccgcttaccaacaagggcagaaccaactctacaatgaacttaatttggggcggagggaagagtacgacgttctggacaaaaggaggggacgagatcccgagatgggcggaaagcctcagcgaaggaagaatccgcaagaggggctttataacgaactccagaaagataaaatggcagaagcctatagtgagattgggatgaagggagaaaggaggaggggtaaaggtcacgatgggttgtaccaaggattgagcacagccactaaagatacctatgatgcgctccacatgcaggccctgccgccaagacgcgccaagagaagcggatctggcgtgaagcagaccctgaatttcgacctgctgaagctggctggcgacgtggaatccaacccaggcccttctagaggccatatgaccgagtacaagcccacggtgcgcctcgccacccgcgacgacgtccccagggccgtacgcaccctcgccgccgcgttcgccgactaccccgccacgcgccacaccgtcgatccggaccgccacatcgagcgggtcaccgagctgcaagaactcttcctcacgcgcgtcgggctcgacatcggcaaggtgtgggtcgcggacgacggcgccgcggtggcggtctggaccacgccggagagcgtcgaagcgggggcggtgttcgccgagatcggcccgcgcatggccgagttgagcggttcccggctggccgcgcagcaacagatggaaggcctcctggcgccgcaccggcccaaggagcccgcgtggttcctggccaccgtcggcgtctcgcccgaccaccagggcaagggtctgggcagcgccgtcgtgctccccggagtggaggcggccgagcgcgccggggtgcccgccttcctggagacctccgcgccccgcaacctccccttctacgagcggctcggcttcaccgtcaccgccgacgtcgaggtgcccgaaggaccgcgcacctggtgcatgacccgcaagcccggtgcctga

SEQ ID NO: 7948 - DNA, 2274 bp, Artificial Sequence
  Synthetic Polynucloetide
atggccttaccagtgaccgccttgctcctgccgctggccttgctgctccacgccgccaggccggaagtgcagctggttgaatctggcggaggactggttcagcctggcggatctctgagactgtcttgtgccgccagcggcttcagcttcagcgacttttggatgagctgggtccgacaggcccctggcaaaggacttgaatgggtcgccacaatcagccaggccggcagcgagaaggactacgtggactctgtgaagggcagattcaccatcagccgggacaacgccaagaagtccctgtacctccagatgaacagcctgagagccgaggacaccgccgtgtactattgtgcctctggcgtgtacagcttcgactacagaggccagggcaccctggtcacagtctcttctggtaccggcggaggcggatctggcggcggaggtagcggtggcggaggatctgaattcagctacgtgctgacacagcctccatccgtgtctgtggctccaggacagaccgccagaatcacatgcggcggcaagaacatcggcagcaagagcgtgcactggtatcagcagccacctggacaggctccagtggtggtggtgtacgacgacagcgatagacctagcggcatccccgagagattcagcggcagcaattccggcaataccgccacactgaccatcagcagagtggaagctggcgacgaggccgtgtactactgccaagtgtgggacagcagcagcgatcacgtggtgtttggcggcggaacaaagctgacagtgcttctcgaggacctgaagaacgtgttcccacctgaggtggccgtgttcgagcctagcgaggccgagatcagccacacccagaaagccaccctcgtgtgcctggctaccggcttctaccccgaccatgtggaactgtcttggtgggtcaacggcaaagaggtgcacagcggcgtgtgtaccgacccccagccactgaaagaacagcccgccctgaacgacagccggtactgcctgagcagcagactgagagtgtccgccaccttctggcagaacccccggaaccacttcagatgccaggtgcagttctacggcctgagcgagaacgacgagtggacccaggacagagccaagcccgtgacccagatcgtgtctgccgaagcctggggcagagccgattgcggctttaccagcgagagctaccagcagggcgtgctgagcgccaccatcctgtacgagatcctgctgggcaaggccaccctgtacgccgtgctggtgtctgccctggtgctgatggctatggtcaagcggaaggacagccggggaagggccaagcgatctggatctggagcaacaaacttctcactactcaaacaagcaggtgacgtggaggagaatcccgggcctactagtatggactggatttggcgcatccttttccttgtcggcgctgctaccggcgcgcattccttcgaacaactccagctgcaagagtctggccctggcctggtcaagcctagcgaaacactgagcctgacctgtaccgtgtctggcggctctatcagctccggcagctatttctggggctggatcagacaacctcctggcaaaggactggaatggatcggctccatctactacagcggcatcacctactacaaccccagcctgaagtccagagtgaccatctccgtggacaccagcaagaaccagttctccctgaagctgagcagcgtgacagccgccgataccgccgtgtattattgtgccagacatgacggcgctgtggccggcctgtttgattattggggacagggcaccctggtcaccgtgtcatctgctacgcgtatccagaaccctgatcctgccgtgtaccagctgcgggatagcaagagcagcgacaagagcgtgtgtctgttcaccgacttcgacagccagaccaacgtgtcccagagcaaggactccgacgtgtacatcaccgataagtgcgtgctggacatgcggagcatggacttcaagagcaactccgccgtggcctggtccaacaagtccgatttcgcctgcgccaacgccttcaacaacagcattatccccgaggacacattcttcccaagccccgagagcagctgcgacgtgaagctggtggaaaagagcttcgagacagacaccaacctgaacttccagaacctgagcgtgatcggcttcagaatcctgctgctgaaagtggccggctttaacctgctgatgaccctgcggctgtggtccagc

SEQ ID NO: 7949 - DNA, 2286 bp, Artificial Sequence
  Synthetic Polynucloetide
atggccttaccagtgaccgccttgctcctgccgctggccttgctgctccacgccgccaggccggaagtgcagctggttgaatctggcggaggactggttcagcctggcggatctctgagactgtcttgtgccgccagcggcttcagcttcagcgacttttggatgagctgggtccgacaggcccctggcaaaggacttgaatgggtcgccacaatcagccaggccggcagcgagaaggactacgtggactctgtgaagggcagattcaccatcagccgggacaacgccaagaagtccctgtacctccagatgaacagcctgagagccgaggacaccgccgtgtactattgtgcctctggcgtgtacagcttcgactacagaggccagggcaccctggtcacagtctcttctggtaccggcggaggcggatctggcggcggaggtagcggtggcggaggatctgaattcagctacgtgctgacacagcctccatccgtgtctgtggctccaggacagaccgccagaatcacatgcggcggcaagaacatcggcagcaagagcgtgcactggtatcagcagccacctggacaggctccagtggtggtggtgtacgacgacagcgatagacctagcggcatccccgagagattcagcggcagcaattccggcaataccgccacactgaccatcagcagagtggaagctggcgacgaggccgtgtactactgccaagtgtgggacagcagcagcgatcacgtggtgtttggcggcggaacaaagctgacagtgcttctcgagatccagaaccctgatcctgccgtgtaccagctgcgggatagcaagagcagcgacaagagcgtgtgtctgttcaccgacttcgacagccagaccaacgtgtcccagagcaaggactccgacgtgtacatcaccgataagtgcgtgctggacatgcggagcatggacttcaagagcaactccgccgtggcctggtccaacaagtccgatttcgcctgcgccaacgccttcaacaacagcattatccccgaggacacattcttcccaagccccgagagcagctgcgacgtgaagctggtggaaaagagcttcgagacagacaccaacctgaacttccagaacctgagcgtgatcggcttcagaatcctgctgctgaaagtggccggctttaacctgctgatgaccctgcggctgtggtccagccgcgccaagagaagcggatctggcgtgaagcagaccctgaatttcgacctgctgaagctggctggcgacgtggaatccaacccaggccctactagtatggactggatttggcgcatccttttccttgtcggcgctgctaccggcgcgcattccttcgaacaactccagctgcaagagtctggccctggcctggtcaagcctagcgaaacactgagcctgacctgtaccgtgtctggcggctctatcagctccggcagctatttctggggctggatcagacaacctcctggcaaaggactggaatggatcggctccatctactacagcggcatcacctactacaaccccagcctgaagtccagagtgaccatctccgtggacaccagcaagaaccagttctccctgaagctgagcagcgtgacagccgccgataccgccgtgtattattgtgccagacatgacggcgctgtggccggcctgtttgattattggggacagggcaccctggtcaccgtgtcatctgctacgcgtgaggacctgaagaacgtgttcccacctgaggtggccgtgttcgagcctagcgaggccgagatcagccacacccagaaagccaccctcgtgtgcctggctaccggcttctaccccgaccatgtggaactgtcttggtgggtcaacggcaaagaggtgcacagcggcgtgtgtaccgacccccagccactgaaagaacagcccgccctgaacgacagccggtactgcctgagcagcagactgagagtgtccgccaccttctggcagaacccccggaaccacttcagatgccaggtgcagttctacggcctgagcgagaacgacgagtggacccaggacagagccaagcccgtgacccagatcgtgtctgccgaagcctggggcagagccgattgcggctttaccagcgagagctaccagcagggcgtgctgagcgccaccatcctgtacgagatcctgctgggcaaggccaccctgtacgccgtgctggtgtctgccctggtgctgatggctatggtcaagcggaaggacagccgggga

SEQ ID NO: 7950 - DNA, 2862 bp, Artificial Sequence
  Synthetic Polynucloetide
atggccttaccagtgaccgccttgctcctgccgctggccttgctgctccacgccgccaggccggaagtgcagctggttgaatctggcggaggactggttcagcctggcggatctctgagactgtcttgtgccgccagcggcttcagcttcagcgacttttggatgagctgggtccgacaggcccctggcaaaggacttgaatgggtcgccacaatcagccaggccggcagcgagaaggactacgtggactctgtgaagggcagattcaccatcagccgggacaacgccaagaagtccctgtacctccagatgaacagcctgagagccgaggacaccgccgtgtactattgtgcctctggcgtgtacagcttcgactacagaggccagggcaccctggtcacagtctcttctggtaccggcggaggcggatctggcggcggaggtagcggtggcggaggatctgaattcagctacgtgctgacacagcctccatccgtgtctgtggctccaggacagaccgccagaatcacatgcggcggcaagaacatcggcagcaagagcgtgcactggtatcagcagccacctggacaggctccagtggtggtggtgtacgacgacagcgatagacctagcggcatccccgagagattcagcggcagcaattccggcaataccgccacactgaccatcagcagagtggaagctggcgacgaggccgtgtactactgccaagtgtgggacagcagcagcgatcacgtggtgtttggcggcggaacaaagctgacagtgcttctcgaggacctgaagaacgtgttcccacctgaggtggccgtgttcgagcctagcgaggccgagatcagccacacccagaaagccaccctcgtgtgcctggctaccggcttctaccccgaccatgtggaactgtcttggtgggtcaacggcaaagaggtgcacagcggcgtgtctaccgacccccagccactgaaagaacagcccgccctgaacgacagccggtactgcctgagcagcagactgagagtgtccgccaccttctggcagaacccccggaaccacttcagatgccaggtgcagttctacggcctgagcgagaacgacgagtggacccaggacagagccaagcccgtgacccagatcgtgtctgccgaagcctggggcagagccgattgcggatcccagagcttcggcctgctggaccccaagctgtgctacctgctggatggcatcctgttcatctacggcgtgatcctgaccgccctgttcctgagagtgaagttcagcagaagcgccgacgcccctgcctaccagcagggacagaaccaactgtacaacgagctgaacctgggcagacgggaagagtacgacgtgctggacaagcggagaggcagggaccctgagatgggcggaaagccccagcggagaaagaacccccaggaaggactgtataacgaactccagaaagacaagatggccgaagcctacagcgagatcggcatgaagggcgagcggagaagaggcaagggccacgatggcctgtaccagggcctgagcaccgccaccaaggacacctatgacgccctgcacatgcaggccctgcctccaagaagggccaagcgatctggatctggagcaacaaacttctcactactcaaacaagcaggtgacgtggaggagaatcccgggcctactagtatggactggatttggcgcatccttttccttgtcggcgctgctaccggcgcgcattccttcgaacaactccagctgcaagagtctggccctggcctggtcaagcctagcgaaacactgagcctgacctgtaccgtgtctggcggctctatcagctccggcagctatttctggggctggatcagacaacctcctggcaaaggactggaatggatcggctccatctactacagcggcatcacctactacaaccccagcctgaagtccagagtgaccatctccgtggacaccagcaagaaccagttctccctgaagctgagcagcgtgacagccgccgataccgccgtgtattattgtgccagacatgacggcgctgtggccggcctgtttgattattggggacagggcaccctggtcaccgtgtcatctgctacgcgtatccagaaccctgatcctgccgtgtaccagctgcgggatagcaagagcagcgacaagagcgtgtgtctgttcaccgacttcgacagccagaccaacgtgtcccagagcaaggactccgacgtgtacatcaccgataagaccgtgctggacatgcggagcatggacttcaagagcaactccgccgtggcctggtccaacaagtccgatttcgcctgcgccaacgccttcaacaacagcattatccccgaggacacattcttcccaagccccgagagcagctgcggtacccagagttttgggttgttggaccctaaattgtgctatctgttggacggaatcctgttcatttacggagtgatcctgaccgcattgttcctgcgggttaagttttccagatccgcagacgcacccgcttaccaacaagggcagaaccaactctacaatgaacttaatttggggcggagggaagagtacgacgttctggacaaaaggaggggacgagatcccgagatgggcggaaagcctcagcgaaggaagaatccgcaagaggggctttataacgaactccagaaagataaaatggcagaagcctatagtgagattgggatgaagggagaaaggaggaggggtaaaggtcacgatgggttgtaccaaggattgagcacagccactaaagatacctatgatgcgctccacatgcaggccctgccgccaaga

SEQ ID NO: 7951 - DNA, 2352 bp, Artificial Sequence
  Synthetic Polynucloetide
atggccttaccagtgaccgccttgctcctgccgctggccttgctgctccacgccgccaggccggaagtgcagctggttgaatctggcggaggactggttcagcctggcggatctctgagactgtcttgtgccgccagcggcttcagcttcagcgacttttggatgagctgggtccgacaggcccctggcaaaggacttgaatgggtcgccacaatcagccaggccggcagcgagaaggactacgtggactctgtgaagggcagattcaccatcagccgggacaacgccaagaagtccctgtacctccagatgaacagcctgagagccgaggacaccgccgtgtactattgtgcctctggcgtgtacagcttcgactacagaggccagggcaccctggtcacagtctcttctggtaccggcggaggcggatctggcggcggaggtagcggtggcggaggatctgaattcagctacgtgctgacacagcctccatccgtgtctgtggctccaggacagaccgccagaatcacatgcggcggcaagaacatcggcagcaagagcgtgcactggtatcagcagccacctggacaggctccagtggtggtggtgtacgacgacagcgatagacctagcggcatccccgagagattcagcggcagcaattccggcaataccgccacactgaccatcagcagagtggaagctggcgacgaggccgtgtactactgccaagtgtgggacagcagcagcgatcacgtggtgtttggcggcggaacaaagctgacagtgcttctcgagggacagcctaaggccaatcctaccgtgacactgttccctccaagcagcgaagaactccaggccaacaaggccacacttgtgtgcctgatctccgacttctaccctggggctgtgacagtggcttggaaggccgatggatctcctgtgaaagccggcgtggaaaccaccaagccatccaagcagagcaacaacaaatacgccgccagctcctacctgagcctgacacctgagcagtggaagtcccacagatcctacagctgccaagtgacccacgaaggcagcaccgtggaaaagacagtggcccctacagagtgcagccccatcaagaccgatgtgattacaatggaccccaaggacaactgctccaaggacgccaacgataccctgctgctccagctgaccaacaccagcgcctactacatgtacttgttgctgctgctgaagtccgtggtgtacttcgccatcatcacatgctgcctgctgcggagaaccgccttctgctgcaacggcgagaagtctagggccaagcgatctggatctggagcaacaaacttctcactactcaaacaagcaggtgacgtggaggagaatcccgggcctactagtatggactggatttggcgcatccttttccttgtcggcgctgctaccggcgcgcattccttcgaacaactccagctgcaagagtctggccctggcctggtcaagcctagcgaaacactgagcctgacctgtaccgtgtctggcggctctatcagctccggcagctatttctggggctggatcagacaacctcctggcaaaggactggaatggatcggctccatctactacagcggcatcacctactacaaccccagcctgaagtccagagtgaccatctccgtggacaccagcaagaaccagttctccctgaagctgagcagcgtgacagccgccgataccgccgtgtattattgtgccagacatgacggcgctgtggccggcctgtttgattattggggacagggcaccctggtcaccgtgtcatctgctacgcgtgcctctacaaagggaccctccgtgtttcctctggctcccagcagcaagtctacaagcggaggaacagccgctctgggctgcctggtcaaggattactttcccgagcctgtgaccgtgtcctggaatagcggagcactgacaagcggcgtgcacacctttccagccgtgctgcaaagcagcggcctgtactctctgagcagcgtggtcacagtgcctagctctagcctgggcacccagacctacatctgcaatgtgaaccacaagcctagcaacaccaaggtggacaagagagtggaacccaagagctgtgaagtgaaaaccgactccaccgaccacgtgaagcccaaagagacagagaacaccaagcagcccagcaagagctgccacaagcccaaggccatcgtgcacaccgagaaagtgaacatgatgagcctgaccgtgctgggcctgcggatgctgttcgccaaaaccgtggccgtgaacttcctgctgaccgccaagctgttcttcctc

SEQ ID NO: 7952 - DNA, 2295 bp, Artificial Sequence
  Synthetic Polynucloetide
atggccttaccagtgaccgccttgctcctgccgctggccttgctgctccacgccgccaggccggaagtgcagctggttgaatctggcggaggactggttcagcctggcggatctctgagactgtcttgtgccgccagcggcttcagcttcagcgacttttggatgagctgggtccgacaggcccctggcaaaggacttgaatgggtcgccacaatcagccaggccggcagcgagaaggactacgtggactctgtgaagggcagattcaccatcagccgggacaacgccaagaagtccctgtacctccagatgaacagcctgagagccgaggacaccgccgtgtactattgtgcctctggcgtgtacagcttcgactacagaggccagggcaccctggtcacagtctcttctggtaccggcggaggcggatctggcggcggaggtagcggtggcggaggatctgaattcagctacgtgctgacacagcctccatccgtgtctgtggctccaggacagaccgccagaatcacatgcggcggcaagaacatcggcagcaagagcgtgcactggtatcagcagccacctggacaggctccagtggtggtggtgtacgacgacagcgatagacctagcggcatccccgagagattcagcggcagcaattccggcaataccgccacactgaccatcagcagagtggaagctggcgacgaggccgtgtactactgccaagtgtgggacagcagcagcgatcacgtggtgtttggcggcggaacaaagctgacagtgcttctcgagggacagcctaaggccaatcctaccgtgacactgttccctccaagcagcgaagaactccaggccaacaaggccacacttgtgtgcctgatctccgacttctaccctggggctgtgacagtggcttggaaggccgatggatctcctgtgaaagccggcgtggaaaccaccaagccatccaagcagagcaacaacaaatacgccgccagctcctacctgagcctgacacctgagcagtggaagtcccacagatcctacagctgccaagtgacccacgaaggcagcaccgtggaaaagacagtggcccctacagagtgcagcggcagagccgattgcggctttaccagcgagagctaccagcagggcgtgctgagcgccaccatcctgtacgagatcctgctgggcaaggccaccctgtacgccgtgctggtgtctgccctggtgctgatggctatggtcaagcggaaggacagccggggacgcgccaagagaagcggatctggcgtgaagcagaccctgaatttcgacctgctgaagctggctggcgacgtggaatccaacccaggccctactagtatggactggatttggcgcatccttttccttgtcggcgctgctaccggcgcgcattccttcgaacaactccagctgcaagagtctggccctggcctggtcaagcctagcgaaacactgagcctgacctgtaccgtgtctggcggctctatcagctccggcagctatttctggggctggatcagacaacctcctggcaaaggactggaatggatcggctccatctactacagcggcatcacctactacaaccccagcctgaagtccagagtgaccatctccgtggacaccagcaagaaccagttctccctgaagctgagcagcgtgacagccgccgataccgccgtgtattattgtgccagacatgacggcgctgtggccggcctgtttgattattggggacagggcaccctggtcaccgtgtcatctgctacgcgtgcctctacaaagggaccctccgtgtttcctctggctcccagcagcaagtctacaagcggaggaacagccgctctgggctgcctggtcaaggattactttcccgagcctgtgaccgtgtcctggaatagcggagcactgacaagcggcgtgcacacctttccagccgtgctgcaaagcagcggcctgtactctctgagcagcgtggtcacagtgcctagctctagcctgggcacccagacctacatctgcaatgtgaaccacaagcctagcaacaccaaggtggacaagagagtggaacccaagagctgtatccccgaggacacattcttcccaagccccgagagcagctgcgacgtgaagctggtggaaaagagcttcgagacagacaccaacctgaacttccagaacctgagcgtgatcggcttcagaatcctgctgctgaaagtggccggctttaacctgctgatgaccctgcggctgtggtccagc

SEQ ID NO: 7953 - DNA, 2697 bp, Artificial Sequence
  Synthetic Polynucloetide
atggccttaccagtgaccgccttgctcctgccgctggccttgctgctccacgccgccaggccggaagtgcagctggttgaatctggcggaggactggttcagcctggcggatctctgagactgtcttgtgccgccagcggcttcagcttcagcgacttttggatgagctgggtccgacaggcccctggcaaaggacttgaatgggtcgccacaatcagccaggccggcagcgagaaggactacgtggactctgtgaagggcagattcaccatcagccgggacaacgccaagaagtccctgtacctccagatgaacagcctgagagccgaggacaccgccgtgtactattgtgcctctggcgtgtacagcttcgactacagaggccagggcaccctggtcacagtctcttctggtaccggcggaggcggatctggcggcggaggtagcggtggcggaggatctgaattcagctacgtgctgacacagcctccatccgtgtctgtggctccaggacagaccgccagaatcacatgcggcggcaagaacatcggcagcaagagcgtgcactggtatcagcagccacctggacaggctccagtggtggtggtgtacgacgacagcgatagacctagcggcatccccgagagattcagcggcagcaattccggcaataccgccacactgaccatcagcagagtggaagctggcgacgaggccgtgtactactgccaagtgtgggacagcagcagcgatcacgtggtgtttggcggcggaacaaagctgacagtgcttctcgagatccagaaccctgatcctgccgtgtaccagctgcgggatagcaagagcagcgacaagagcgtgtgtctgttcaccgacttcgacagccagaccaacgtgtcccagagcaaggactccgacgtgtacatcaccgataagtgcgtgctggacatgcggagcatggacttcaagagcaactccgccgtggcctggtccaacaagtccgatttcgcctgcgccaacgccttcaacaacagcattatccccgaggacacattcttcccaagccccgagagcagctgcgacgtgaagctggtggaaaagagcttcgagacagacaccaacctgaacttccagaacctgagcgtgatcggcttcagaatcctgctgctgaaagtggccggctttaacctgctgatgaccctgcggctgtggtccagccgcgccaagagaagcggatctggcgtgaagcagaccctgaatttcgacctgctgaagctggctggcgacgtggaatccaacccaggccctactagtatggactggatttggcgcatccttttccttgtcggcgctgctaccggcgcgcattccgggccccagctccagctgcaagagtctggacctggcctggtcaagcctagcgagacactgagcctgacctgtaccgtgtccggcgatagcatcagcagcggcgattactactggggctggatcagacagcctcctggcaaaggactggaatggatcggccacatctactacagcggcgtgacctactacaaccccagcctgaagtccagagtgaccatcagcgtggacaccagccggaaccagttctccctgaagctgtctagcgtgacagccgccgataccgccgtgtactactgcaccagagaggacagcagcaactggcggagtagaggccagggaacactggtcacagttagctctggatccggcggaggcggaagtggaggcggaggatctggcggcggaggctctttcgaacaactccagctgcaagagtctggccctggcctggtcaagcctagcgaaacactgagcctgacctgtaccgtgtctggcggctctatcagctccggcagctatttctggggctggatcagacaacctcctggcaaaggactggaatggatcggctccatctactacagcggcatcacctactacaaccccagcctgaagtccagagtgaccatctccgtggacaccagcaagaaccagttctccctgaagctgagcagcgtgacagccgccgataccgccgtgtattattgtgccagacatgacggcgctgtggccggcctgtttgattattggggacagggcaccctggtcaccgtgtcatctgctacgcgtgaggacctgaagaacgtgttcccacctgaggtggccgtgttcgagcctagcgaggccgagatcagccacacccagaaagccaccctcgtgtgcctggctaccggcttctaccccgaccatgtggaactgtcttggtgggtcaacggcaaagaggtgcacagcggcgtgtgtaccgacccccagccactgaaagaacagcccgccctgaacgacagccggtactgcctgagcagcagactgagagtgtccgccaccttctggcagaacccccggaaccacttcagatgccaggtgcagttctacggcctgagcgagaacgacgagtggacccaggacagagccaagcccgtgacccagatcgtgtctgccgaagcctggggcagagccgattgcggctttaccagcgagagctaccagcagggcgtgctgagcgccaccatcctgtacgagatcctgctgggcaaggccaccctgtacgccgtgctggtgtctgccctggtgctgatggctatggtcaagcggaaggacagccgggga

SEQ ID NO: 7954 - DNA, 3273 bp, Artificial Sequence
  Synthetic Polynucloetide
atggccttaccagtgaccgccttgctcctgccgctggccttgctgctccacgccgccaggccggaagtgcagctggttgaatctggcggaggactggttcagcctggcggatctctgagactgtcttgtgccgccagcggcttcagcttcagcgacttttggatgagctgggtccgacaggcccctggcaaaggacttgaatgggtcgccacaatcagccaggccggcagcgagaaggactacgtggactctgtgaagggcagattcaccatcagccgggacaacgccaagaagtccctgtacctccagatgaacagcctgagagccgaggacaccgccgtgtactattgtgcctctggcgtgtacagcttcgactacagaggccagggcaccctggtcacagtctcttctggtaccggcggaggcggatctggcggcggaggtagcggtggcggaggatctgaattcagctacgtgctgacacagcctccatccgtgtctgtggctccaggacagaccgccagaatcacatgcggcggcaagaacatcggcagcaagagcgtgcactggtatcagcagccacctggacaggctccagtggtggtggtgtacgacgacagcgatagacctagcggcatccccgagagattcagcggcagcaattccggcaataccgccacactgaccatcagcagagtggaagctggcgacgaggccgtgtactactgccaagtgtgggacagcagcagcgatcacgtggtgtttggcggcggaacaaagctgacagtgcttctcgaggacctgaagaacgtgttcccacctgaggtggccgtgttcgagcctagcgaggccgagatcagccacacccagaaagccaccctcgtgtgcctggctaccggcttctaccccgaccatgtggaactgtcttggtgggtcaacggcaaagaggtgcacagcggcgtgtctaccgacccccagccactgaaagaacagcccgccctgaacgacagccggtactgcctgagcagcagactgagagtgtccgccaccttctggcagaacccccggaaccacttcagatgccaggtgcagttctacggcctgagcgagaacgacgagtggacccaggacagagccaagcccgtgacccagatcgtgtctgccgaagcctggggcagagccgattgcggatcccagagcttcggcctgctggaccccaagctgtgctacctgctggatggcatcctgttcatctacggcgtgatcctgaccgccctgttcctgagagtgaagttcagcagaagcgccgacgcccctgcctaccagcagggacagaaccaactgtacaacgagctgaacctgggcagacgggaagagtacgacgtgctggacaagcggagaggcagggaccctgagatgggcggaaagccccagcggagaaagaacccccaggaaggactgtataacgaactccagaaagacaagatggccgaagcctacagcgagatcggcatgaagggcgagcggagaagaggcaagggccacgatggcctgtaccagggcctgagcaccgccaccaaggacacctatgacgccctgcacatgcaggccctgcctccaagaagggccaagcgatctggatctggagcaacaaacttctcactactcaaacaagcaggtgacgtggaggagaatcccgggcctactagtatggactggatttggcgcatccttttccttgtcggcgctgctaccggcgcgcattccgggccccagctccagctgcaagagtctggacctggcctggtcaagcctagcgagacactgagcctgacctgtaccgtgtccggcgatagcatcagcagcggcgattactactggggctggatcagacagcctcctggcaaaggactggaatggatcggccacatctactacagcggcgtgacctactacaaccccagcctgaagtccagagtgaccatcagcgtggacaccagccggaaccagttctccctgaagctgtctagcgtgacagccgccgataccgccgtgtactactgcaccagagaggacagcagcaactggcggagtagaggccagggaacactggtcacagttagctctggatccggcggaggcggaagtggaggcggaggatctggcggcggaggctctttcgaacaactccagctgcaagagtctggccctggcctggtcaagcctagcgaaacactgagcctgacctgtaccgtgtctggcggctctatcagctccggcagctatttctggggctggatcagacaacctcctggcaaaggactggaatggatcggctccatctactacagcggcatcacctactacaaccccagcctgaagtccagagtgaccatctccgtggacaccagcaagaaccagttctccctgaagctgagcagcgtgacagccgccgataccgccgtgtattattgtgccagacatgacggcgctgtggccggcctgtttgattattggggacagggcaccctggtcaccgtgtcatctgctacgcgtatccagaaccctgatcctgccgtgtaccagctgcgggatagcaagagcagcgacaagagcgtgtgtctgttcaccgacttcgacagccagaccaacgtgtcccagagcaaggactccgacgtgtacatcaccgataagaccgtgctggacatgcggagcatggacttcaagagcaactccgccgtggcctggtccaacaagtccgatttcgcctgcgccaacgccttcaacaacagcattatccccgaggacacattcttcccaagccccgagagcagctgcggtacccagagttttgggttgttggaccctaaattgtgctatctgttggacggaatcctgttcatttacggagtgatcctgaccgcattgttcctgcgggttaagttttccagatccgcagacgcacccgcttaccaacaagggcagaaccaactctacaatgaacttaatttggggcggagggaagagtacgacgttctggacaaaaggaggggacgagatcccgagatgggcggaaagcctcagcgaaggaagaatccgcaagaggggctttataacgaactccagaaagataaaatggcagaagcctatagtgagattgggatgaagggagaaaggaggaggggtaaaggtcacgatgggttgtaccaaggattgagcacagccactaaagatacctatgatgcgctccacatgcaggccctgccgccaaga

SEQ ID NO: 7955 - DNA, 2763 bp, Artificial Sequence
  Synthetic Polynucloetide
atggccttaccagtgaccgccttgctcctgccgctggccttgctgctccacgccgccaggccggaagtgcagctggttgaatctggcggaggactggttcagcctggcggatctctgagactgtcttgtgccgccagcggcttcagcttcagcgacttttggatgagctgggtccgacaggcccctggcaaaggacttgaatgggtcgccacaatcagccaggccggcagcgagaaggactacgtggactctgtgaagggcagattcaccatcagccgggacaacgccaagaagtccctgtacctccagatgaacagcctgagagccgaggacaccgccgtgtactattgtgcctctggcgtgtacagcttcgactacagaggccagggcaccctggtcacagtctcttctggtaccggcggaggcggatctggcggcggaggtagcggtggcggaggatctgaattcagctacgtgctgacacagcctccatccgtgtctgtggctccaggacagaccgccagaatcacatgcggcggcaagaacatcggcagcaagagcgtgcactggtatcagcagccacctggacaggctccagtggtggtggtgtacgacgacagcgatagacctagcggcatccccgagagattcagcggcagcaattccggcaataccgccacactgaccatcagcagagtggaagctggcgacgaggccgtgtactactgccaagtgtgggacagcagcagcgatcacgtggtgtttggcggcggaacaaagctgacagtgcttctcgagggacagcctaaggccaatcctaccgtgacactgttccctccaagcagcgaagaactccaggccaacaaggccacacttgtgtgcctgatctccgacttctaccctggggctgtgacagtggcttggaaggccgatggatctcctgtgaaagccggcgtggaaaccaccaagccatccaagcagagcaacaacaaatacgccgccagctcctacctgagcctgacacctgagcagtggaagtcccacagatcctacagctgccaagtgacccacgaaggcagcaccgtggaaaagacagtggcccctacagagtgcagccccatcaagaccgatgtgattacaatggaccccaaggacaactgctccaaggacgccaacgataccctgctgctccagctgaccaacaccagcgcctactacatgtacttgttgctgctgctgaagtccgtggtgtacttcgccatcatcacatgctgcctgctgcggagaaccgccttctgctgcaacggcgagaagtctagggccaagcgatctggatctggagcaacaaacttctcactactcaaacaagcaggtgacgtggaggagaatcccgggcctactagtatggactggatttggcgcatccttttccttgtcggcgctgctaccggcgcgcattccgggccccagctccagctgcaagagtctggacctggcctggtcaagcctagcgagacactgagcctgacctgtaccgtgtccggcgatagcatcagcagcggcgattactactggggctggatcagacagcctcctggcaaaggactggaatggatcggccacatctactacagcggcgtgacctactacaaccccagcctgaagtccagagtgaccatcagcgtggacaccagccggaaccagttctccctgaagctgtctagcgtgacagccgccgataccgccgtgtactactgcaccagagaggacagcagcaactggcggagtagaggccagggaacactggtcacagttagctctggatccggcggaggcggaagtggaggcggaggatctggcggcggaggctctttcgaacaactccagctgcaagagtctggccctggcctggtcaagcctagcgaaacactgagcctgacctgtaccgtgtctggcggctctatcagctccggcagctatttctggggctggatcagacaacctcctggcaaaggactggaatggatcggctccatctactacagcggcatcacctactacaaccccagcctgaagtccagagtgaccatctccgtggacaccagcaagaaccagttctccctgaagctgagcagcgtgacagccgccgataccgccgtgtattattgtgccagacatgacggcgctgtggccggcctgtttgattattggggacagggcaccctggtcaccgtgtcatctgctacgcgtgcctctacaaagggaccctccgtgtttcctctggctcccagcagcaagtctacaagcggaggaacagccgctctgggctgcctggtcaaggattactttcccgagcctgtgaccgtgtcctggaatagcggagcactgacaagcggcgtgcacacctttccagccgtgctgcaaagcagcggcctgtactctctgagcagcgtggtcacagtgcctagctctagcctgggcacccagacctacatctgcaatgtgaaccacaagcctagcaacaccaaggtggacaagagagtggaacccaagagctgtgaagtgaaaaccgactccaccgaccacgtgaagcccaaagagacagagaacaccaagcagcccagcaagagctgccacaagcccaaggccatcgtgcacaccgagaaagtgaacatgatgagcctgaccgtgctgggcctgcggatgctgttcgccaaaaccgtggccgtgaacttcctgctgaccgccaagctgttcttcctc

SEQ ID NO: 7956 - DNA, 2706 bp, Artificial Sequence
  Synthetic Polynucloetide
atggccttaccagtgaccgccttgctcctgccgctggccttgctgctccacgccgccaggccggaagtgcagctggttgaatctggcggaggactggttcagcctggcggatctctgagactgtcttgtgccgccagcggcttcagcttcagcgacttttggatgagctgggtccgacaggcccctggcaaaggacttgaatgggtcgccacaatcagccaggccggcagcgagaaggactacgtggactctgtgaagggcagattcaccatcagccgggacaacgccaagaagtccctgtacctccagatgaacagcctgagagccgaggacaccgccgtgtactattgtgcctctggcgtgtacagcttcgactacagaggccagggcaccctggtcacagtctcttctggtaccggcggaggcggatctggcggcggaggtagcggtggcggaggatctgaattcagctacgtgctgacacagcctccatccgtgtctgtggctccaggacagaccgccagaatcacatgcggcggcaagaacatcggcagcaagagcgtgcactggtatcagcagccacctggacaggctccagtggtggtggtgtacgacgacagcgatagacctagcggcatccccgagagattcagcggcagcaattccggcaataccgccacactgaccatcagcagagtggaagctggcgacgaggccgtgtactactgccaagtgtgggacagcagcagcgatcacgtggtgtttggcggcggaacaaagctgacagtgcttctcgagggacagcctaaggccaatcctaccgtgacactgttccctccaagcagcgaagaactccaggccaacaaggccacacttgtgtgcctgatctccgacttctaccctggggctgtgacagtggcttggaaggccgatggatctcctgtgaaagccggcgtggaaaccaccaagccatccaagcagagcaacaacaaatacgccgccagctcctacctgagcctgacacctgagcagtggaagtcccacagatcctacagctgccaagtgacccacgaaggcagcaccgtggaaaagacagtggcccctacagagtgcagcggcagagccgattgcggctttaccagcgagagctaccagcagggcgtgctgagcgccaccatcctgtacgagatcctgctgggcaaggccaccctgtacgccgtgctggtgtctgccctggtgctgatggctatggtcaagcggaaggacagccggggacgcgccaagagaagcggatctggcgtgaagcagaccctgaatttcgacctgctgaagctggctggcgacgtggaatccaacccaggccctactagtatggactggatttggcgcatccttttccttgtcggcgctgctaccggcgcgcattccgggccccagctccagctgcaagagtctggacctggcctggtcaagcctagcgagacactgagcctgacctgtaccgtgtccggcgatagcatcagcagcggcgattactactggggctggatcagacagcctcctggcaaaggactggaatggatcggccacatctactacagcggcgtgacctactacaaccccagcctgaagtccagagtgaccatcagcgtggacaccagccggaaccagttctccctgaagctgtctagcgtgacagccgccgataccgccgtgtactactgcaccagagaggacagcagcaactggcggagtagaggccagggaacactggtcacagttagctctggatccggcggaggcggaagtggaggcggaggatctggcggcggaggctctttcgaacaactccagctgcaagagtctggccctggcctggtcaagcctagcgaaacactgagcctgacctgtaccgtgtctggcggctctatcagctccggcagctatttctggggctggatcagacaacctcctggcaaaggactggaatggatcggctccatctactacagcggcatcacctactacaaccccagcctgaagtccagagtgaccatctccgtggacaccagcaagaaccagttctccctgaagctgagcagcgtgacagccgccgataccgccgtgtattattgtgccagacatgacggcgctgtggccggcctgtttgattattggggacagggcaccctggtcaccgtgtcatctgctacgcgtgcctctacaaagggaccctccgtgtttcctctggctcccagcagcaagtctacaagcggaggaacagccgctctgggctgcctggtcaaggattactttcccgagcctgtgaccgtgtcctggaatagcggagcactgacaagcggcgtgcacacctttccagccgtgctgcaaagcagcggcctgtactctctgagcagcgtggtcacagtgcctagctctagcctgggcacccagacctacatctgcaatgtgaaccacaagcctagcaacaccaaggtggacaagagagtggaacccaagagctgtatccccgaggacacattcttcccaagccccgagagcagctgcgacgtgaagctggtggaaaagagcttcgagacagacaccaacctgaacttccagaacctgagcgtgatcggcttcagaatcctgctgctgaaagtggccggctttaacctgctgatgaccctgcggctgtggtccagc

SEQ ID NO: 7957 - DNA, 2277 bp, Artificial Sequence
  Synthetic Polynucloetide
atggccttaccagtgaccgccttgctcctgccgctggccttgctgctccacgccgccaggccggaagtgcaggttttggagtctggcggaggactggttcagcctggcggatctctgagactgtcttgtgccgccagcggcttcaccttcagcaactttgccatgagctgggtccgacaggcccctggcaaaggacttgaatgggtgtccacaatcagcggcagcgccggcacaacagattacgccgattctgtgaagggcagattcaccatcagccgggacaacagcaagaaaaccctgtacctccagatgaacagcctgcgcgtggaagataccgccgtgtactactgtgccgatggcagaggccccttcttcgattatcgcggccagggcacactggtcaccgtttcttctggtaccggcggaggcggatctggcggcggaggtagcggtggcggaggatctgaattcagctacgtgctgacacagcctccatccgtgtctgtggctccaggacagaccgccagaatcacatgcggcggcaagaacatcggcagcaagagcgtgcactggtatcagcagccacctggacaggctccagtggtggtggtgtacgacgacagcgatagacctagcggcatccccgagagattcagcggcagcaattccggcaataccgccacactgaccatcagcagagtggaagctggcgacgaggccgtgtactactgccaagtgtgggacagcagcagcgatcacgtggtgtttggcggcggaacaaagctgacagtgcttctcgaggacctgaagaacgtgttcccacctgaggtggccgtgttcgagcctagcgaggccgagatcagccacacccagaaagccaccctcgtgtgcctggctaccggcttctaccccgaccatgtggaactgtcttggtgggtcaacggcaaagaggtgcacagcggcgtgtgtaccgacccccagccactgaaagaacagcccgccctgaacgacagccggtactgcctgagcagcagactgagagtgtccgccaccttctggcagaacccccggaaccacttcagatgccaggtgcagttctacggcctgagcgagaacgacgagtggacccaggacagagccaagcccgtgacccagatcgtgtctgccgaagcctggggcagagccgattgcggctttaccagcgagagctaccagcagggcgtgctgagcgccaccatcctgtacgagatcctgctgggcaaggccaccctgtacgccgtgctggtgtctgccctggtgctgatggctatggtcaagcggaaggacagccggggaagggccaagcgatctggatctggagcaacaaacttctcactactcaaacaagcaggtgacgtggaggagaatcccgggcctactagtatggactggatttggcgcatccttttccttgtcggcgctgctaccggcgcgcattccttcgaacaactccagctgcaagagtctggccctggcctggtcaagcctagcgaaacactgagcctgacctgtaccgtgtctggcggctctatcagctccggcagctatttctggggctggatcagacaacctcctggcaaaggactggaatggatcggctccatctactacagcggcatcacctactacaaccccagcctgaagtccagagtgaccatctccgtggacaccagcaagaaccagttctccctgaagctgagcagcgtgacagccgccgataccgccgtgtattattgtgccagacatgacggcgctgtggccggcctgtttgattattggggacagggcaccctggtcaccgtgtcatctgctacgcgtatccagaaccctgatcctgccgtgtaccagctgcgggatagcaagagcagcgacaagagcgtgtgtctgttcaccgacttcgacagccagaccaacgtgtcccagagcaaggactccgacgtgtacatcaccgataagtgcgtgctggacatgcggagcatggacttcaagagcaactccgccgtggcctggtccaacaagtccgatttcgcctgcgccaacgccttcaacaacagcattatccccgaggacacattcttcccaagccccgagagcagctgcgacgtgaagctggtggaaaagagcttcgagacagacaccaacctgaacttccagaacctgagcgtgatcggcttcagaatcctgctgctgaaagtggccggctttaacctgctgatgaccctgcggctgtggtccagc

SEQ ID NO: 7958 - DNA, 2280 bp, Artificial Sequence
  Synthetic Polynucloetide
atggccttaccagtgaccgccttgctcctgccgctggccttgctgctccacgccgccaggccgagctacgtgctgacacagcctccatccgtgtctgtggctccaggacagaccgccagaatcacatgcggcggcaagaacatcggcagcaagagcgtgcactggtatcagcagccacctggacaggctccagtggtggtggtgtacgacgacagcgatagacctagcggcatccccgagagattcagcggcagcaattccggcaataccgccacactgaccatcagcagagtggaagctggcgacgaggccgtgtactactgccaagtgtgggacagcagcagcgatcacgtggtgtttggcggcggaacaaagctgacagtgcttctcgaggacctgaagaacgtgttcccacctgaggtggccgtgttcgagcctagcgaggccgagatcagccacacccagaaagccaccctcgtgtgcctggctaccggcttctaccccgaccatgtggaactgtcttggtgggtcaacggcaaagaggtgcacagcggcgtgtgtaccgacccccagccactgaaagaacagcccgccctgaacgacagccggtactgcctgagcagcagactgagagtgtccgccaccttctggcagaacccccggaaccacttcagatgccaggtgcagttctacggcctgagcgagaacgacgagtggacccaggacagagccaagcccgtgacccagatcgtgtctgccgaagcctggggcagagccgattgcggctttaccagcgagagctaccagcagggcgtgctgagcgccaccatcctgtacgagatcctgctgggcaaggccaccctgtacgccgtgctggtgtctgccctggtgctgatggctatggtcaagcggaaggacagccggggaagggccaagcgatctggatctggagcaacaaacttctcactactcaaacaagcaggtgacgtggaggagaatcccgggcctactagtatggactggatttggcgcatccttttccttgtcggcgctgctaccggcgcccattccgggcccgaagtgcagctggttgaatctggcggaggactggttcaggctggcggatctctgagactgtcttgtgccgccagcggcagaacctttagcatgggctggtttagacaggcccctggcaaagagagagagttcgtcgccgccatcacatactctggcggcagcccttactacgccgactctgtgaagggcagattcaccatcagccgggacaacgccaagaacaccgtgtacctccagatgaacagcctgaagcctgaggacaccgccgtgtactactgcgccgccaatccaacatacggcagcgactggaacgccgagaattggggccagggaacccaagtgacagtgtctagcggatccggcggcggaggatctggcggaggcggatctgggggcggaggctctttcgaacaactccagctgcaagagtctggccctggcctggtcaagcctagcgaaacactgagcctgacctgtaccgtgtctggcggctctatcagctccggcagctatttctggggctggatcagacaacctcctggcaaaggactggaatggatcggctccatctactacagcggcatcacctactacaaccccagcctgaagtccagagtgaccatctccgtggacaccagcaagaaccagttctccctgaagctgagcagcgtgacagccgccgataccgccgtgtattattgtgccagacatgacggcgctgtggccggcctgtttgattattggggacagggcaccctggtcaccgtgtcatctgctacgcgtatccagaaccctgatcctgccgtgtaccagctgcgggatagcaagagcagcgacaagagcgtgtgtctgttcaccgacttcgacagccagaccaacgtgtcccagagcaaggactccgacgtgtacatcaccgataagtgcgtgctggacatgcggagcatggacttcaagagcaactccgccgtggcctggtccaacaagtccgatttcgcctgcgccaacgccttcaacaacagcattatccccgaggacacattcttcccaagccccgagagcagctgcgacgtgaagctggtggaaaagagcttcgagacagacaccaacctgaacttccagaacctgagcgtgatcggcttcagaatcctgctgctgaaagtggccggctttaacctgctgatgaccctgcggctgtggtccagc

SEQ ID NO: 7959 - DNA, 2661 bp, Artificial Sequence
  Synthetic Polynucloetide
atggccttaccagtgaccgccttgctcctgccgctggccttgctgctccacgccgccaggccgagctacgtgctgacacagcctccatccgtgtctgtggctccaggacagaccgccagaatcacatgcggcggcaagaacatcggcagcaagagcgtgcactggtatcagcagccacctggacaggctccagtggtggtggtgtacgacgacagcgatagacctagcggcatccccgagagattcagcggcagcaattccggcaataccgccacactgaccatcagcagagtggaagctggcgacgaggccgtgtactactgccaagtgtgggacagcagcagcgatcacgtggtgtttggcggcggaacaaagctgacagtgcttctcgaggacctgaagaacgtgttcccacctgaggtggccgtgttcgagcctagcgaggccgagatcagccacacccagaaagccaccctcgtgtgcctggctaccggcttctaccccgaccatgtggaactgtcttggtgggtcaacggcaaagaggtgcacagcggcgtgtgtaccgacccccagccactgaaagaacagcccgccctgaacgacagccggtactgcctgagcagcagactgagagtgtccgccaccttctggcagaacccccggaaccacttcagatgccaggtgcagttctacggcctgagcgagaacgacgagtggacccaggacagagccaagcccgtgacccagatcgtgtctgccgaagcctggggcagagccgattgcggctttaccagcgagagctaccagcagggcgtgctgagcgccaccatcctgtacgagatcctgctgggcaaggccaccctgtacgccgtgctggtgtctgccctggtgctgatggctatggtcaagcggaaggacagccggggaagggccaagcgatctggatctggagcaacaaacttctcactactcaaacaagcaggtgacgtggaggagaatcccgggcctactagtatggactggatttggcgcatccttttccttgtcggcgctgctaccggcgcccattcccaactgcaactgcaagagtctggccctggcctggtcaagccttctgaaaccctgagcctgacctgtaccgtgtccggcggctctatcagcagcggcgattactactggggctggatcagacagcctccaggcaagggactcgaatggatcggcagcatcagctacagcggctccacctactacaacccaagcctgaagtccagagtgaccatcagcgtggacaccagcagaaaccagttctccctgaagctgagcagcgtgacagccgccgatacagccgtgtattattgcaccagagaggacagcagcaactggcggagtagaggacagggcacactggtcacagtgtcctcttctggaggcggtggaagcggtggaggaggatctgaagtgcagctggttgaatctggcggaggactggttcaggctggcggatctctgagactgtcttgtgccgccagcggcagaacctttagcatgggctggtttagacaggcccctggcaaagagagagagttcgtcgccgccatcacatactctggcggcagcccttactacgccgactctgtgaagggcagattcaccatcagccgggacaacgccaagaacaccgtgtacctccagatgaacagcctgaagcctgaggacaccgccgtgtactactgcgccgccaatccaacatacggcagcgactggaacgccgagaattggggccagggaacccaagtgacagtgtctagcggatccggcggcggaggatctggcggaggcggatctgggggcggaggctctttcgaacaactccagctgcaagagtctggccctggcctggtcaagcctagcgaaacactgagcctgacctgtaccgtgtctggcggctctatcagctccggcagctatttctggggctggatcagacaacctcctggcaaaggactggaatggatcggctccatctactacagcggcatcacctactacaaccccagcctgaagtccagagtgaccatctccgtggacaccagcaagaaccagttctccctgaagctgagcagcgtgacagccgccgataccgccgtgtattattgtgccagacatgacggcgctgtggccggcctgtttgattattggggacagggcaccctggtcaccgtgtcatctgctacgcgtatccagaaccctgatcctgccgtgtaccagctgcgggatagcaagagcagcgacaagagcgtgtgtctgttcaccgacttcgacagccagaccaacgtgtcccagagcaaggactccgacgtgtacatcaccgataagtgcgtgctggacatgcggagcatggacttcaagagcaactccgccgtggcctggtccaacaagtccgatttcgcctgcgccaacgccttcaacaacagcattatccccgaggacacattcttcccaagccccgagagcagctgcgacgtgaagctggtggaaaagagcttcgagacagacaccaacctgaacttccagaacctgagcgtgatcggcttcagaatcctgctgctgaaagtggccggctttaacctgctgatgaccctgcggctgtggtccagc

SEQ ID NO: 7960 - DNA, 2688 bp, Artificial Sequence
  Synthetic Polynucloetide
atggccttaccagtgaccgccttgctcctgccgctggccttgctgctccacgccgccaggccggaagtgcaggttttggagtctggcggaggactggttcagcctggcggatctctgagactgtcttgtgccgccagcggcttcaccttcagcaactttgccatgagctgggtccgacaggcccctggcaaaggacttgaatgggtgtccacaatcagcggcagcgccggcacaacagattacgccgattctgtgaagggcagattcaccatcagccgggacaacagcaagaaaaccctgtacctccagatgaacagcctgcgcgtggaagataccgccgtgtactactgtgccgatggcagaggccccttcttcgattatcgcggccagggcacactggtcaccgtttcttctggtaccggcggaggcggatctggcggcggaggtagcggtggcggaggatctgaattcagctacgtgctgacacagcctccatccgtgtctgtggctccaggacagaccgccagaatcacatgcggcggcaagaacatcggcagcaagagcgtgcactggtatcagcagccacctggacaggctccagtggtggtggtgtacgacgacagcgatagacctagcggcatccccgagagattcagcggcagcaattccggcaataccgccacactgaccatcagcagagtggaagctggcgacgaggccgtgtactactgccaagtgtgggacagcagcagcgatcacgtggtgtttggcggcggaacaaagctgacagtgcttctcgaggacctgaagaacgtgttcccacctgaggtggccgtgttcgagcctagcgaggccgagatcagccacacccagaaagccaccctcgtgtgcctggctaccggcttctaccccgaccatgtggaactgtcttggtgggtcaacggcaaagaggtgcacagcggcgtgtgtaccgacccccagccactgaaagaacagcccgccctgaacgacagccggtactgcctgagcagcagactgagagtgtccgccaccttctggcagaacccccggaaccacttcagatgccaggtgcagttctacggcctgagcgagaacgacgagtggacccaggacagagccaagcccgtgacccagatcgtgtctgccgaagcctggggcagagccgattgcggctttaccagcgagagctaccagcagggcgtgctgagcgccaccatcctgtacgagatcctgctgggcaaggccaccctgtacgccgtgctggtgtctgccctggtgctgatggctatggtcaagcggaaggacagccggggaagggccaagcgatctggatctggagcaacaaacttctcactactcaaacaagcaggtgacgtggaggagaatcccgggcctactagtatggactggatttggcgcatccttttccttgtcggcgctgctaccggcgcccattccgggcccgaagtgcagctggttgaatctggcggaggactggttcaggctggcggatctctgagactgtcttgtgccgccagcggcagaacctttagcatgggctggtttagacaggcccctggcaaagagagagagttcgtcgccgccatcacatacagcggcggcagcccttactacgcctcttctgtcagaggccggttcaccatcagccgggacaacgccaagaacaccgtgtacctccagatgaacagcctgaagccagaggacaccgccgtgtactactgtgccgccaatccaacctacggcagcgactggaatgccgagaattggggccagggcacccaagtgacagtgtctagtggatccggcggcggaggatctggcggaggcggatctgggggcggaggctctttcgaacaactccagctgcaagagtctggccctggcctggtcaagcctagcgaaacactgagcctgacctgtaccgtgtctggcggctctatcagctccggcagctatttctggggctggatcagacaacctcctggcaaaggactggaatggatcggctccatctactacagcggcatcacctactacaaccccagcctgaagtccagagtgaccatctccgtggacaccagcaagaaccagttctccctgaagctgagcagcgtgacagccgccgataccgccgtgtattattgtgccagacatgacggcgctgtggccggcctgtttgattattggggacagggcaccctggtcaccgtgtcatctgctacgcgtatccagaaccctgatcctgccgtgtaccagctgcgggatagcaagagcagcgacaagagcgtgtgtctgttcaccgacttcgacagccagaccaacgtgtcccagagcaaggactccgacgtgtacatcaccgataagtgcgtgctggacatgcggagcatggacttcaagagcaactccgccgtggcctggtccaacaagtccgatttcgcctgcgccaacgccttcaacaacagcattatccccgaggacacattcttcccaagccccgagagcagctgcgacgtgaagctggtggaaaagagcttcgagacagacaccaacctgaacttccagaacctgagcgtgatcggcttcagaatcctgctgctgaaagtggccggctttaacctgctgatgaccctgcggctgtggtccagc

SEQ ID NO: 7961 - DNA, 2184 bp, Artificial Sequence
  Synthetic Polynucloetide
atggccttaccagtgaccgccttgctcctgccgctggccttgctgctccacgccgccaggccgagctacgtgctgacacagcctccatccgtgtctgtggctccaggacagaccgccagaatcacatgcggcggcaacaacctcggcagcaagagcgtgcactggtatcagcagccacctggacaggctccagtggtggtggtgtacgacgacagcgatagacctagcggcatccccgagagattcagcggcagcaattccggcaataccgccacactgaccatcagcagagtggaagctggcgacgaggccgtgtactactgccaagtgtgggacagcagcagcgatcacgtggtgtttggcggcggaacaaagctgacagtgcttggcggaggcggaagtggaggcggaggatctggcggcggaggctctcaactccagctgcaagagtctggccctggcctggtcaagcctagcgaaacactgagcctgacctgtaccgtgtctggcggctctatcagctccggcagctatttctggggctggatcagacaacctcctggcaaaggactggaatggatcggctccatctactacagcggcatcacctactacaaccccagcctgaagtccagagtgaccatctccgtggacaccagcaagaaccagttctccctgaagctgagcagcgtgacagccgccgataccgccgtgtattattgtgccagacatgacggcgctgtggccggcctgtttgattattggggacagggcaccctggtcaccgtgtcatctgctacgcgtgagcagaaactgatctcggaagaggatctggcgaagcccaccacgacgccagcgccgcgaccaccaacaccggcgcccaccatcgcgtcgcagcccctgtccctgcgcccagaggcgtgccggccagcggcggggggcgcagtgcacacgagggggctggacttcgcctgtgacatctacatctgggcgcccttggccgggacttgtggggtccttctcctgtcactggttatcaccctttactgcaaacggggcagaaagaaactcctgtatatattcaaacaaccatttatgagaccagtacaaactactcaagaggaagatggctgtagctgccgatttccagaagaagaagaaggaggatgtgaactgagagtgaagttcagcaggagcgcagacgcccccgcgtaccagcagggccagaaccagctctataacgagctgaatctaggacgaagagaggagtacgatgttttggacaagagacgtggccgggaccctgagatggggggaaagccgagaaggaagaaccctcaggaaggcctgtacaatgaactgcagaaagataagatggcggaggcctacagtgagattgggatgaaaggcgagcgccggaggggcaaggggcacgatggcctttaccagggtctcagtacagccaccaaggacacctacgacgcccttcacatgcaggccctgccccctcgctctagtggctccggcgagggcagaggaagtctactaacctgcggagatgtggaagaaaatcctggcccacatatgaccgagtacaagcccacggtgcgcctcgccacccgcgacgacgtccccagggccgtacgcaccctcgccgccgcgttcgccgactaccccgccacgcgccacaccgtcgatccggaccgccacatcgagcgggtcaccgagctgcaagaactcttcctcacgcgcgtcgggctcgacatcggcaaggtgtgggtcgcggacgacggcgccgcggtggcggtctggaccacgccggagagcgtcgaagcgggggcggtgttcgccgagatcggcccgcgcatggccgagttgagcggttcccggctggccgcgcagcaacagatggaaggcctcctggcgccgcaccggcccaaggagcccgcgtggttcctggccaccgtcggcgtctcgcccgaccaccagggcaagggtctgggcagcgccgtcgtgctccccggagtggaggcggccgagcgcgccggggtgcccgccttcctggagacctccgcgccccgcaacctccccttctacgagcggctcggcttcaccgtcaccgccgacgtcgaggtgcccgaaggaccgcgcacctggtgcatgacccgcaagcccggtgcctga

SEQ ID NO: 7962 - DNA, 2166 bp, Artificial Sequence
  Synthetic Polynucloetide
atggccttaccagtgaccgccttgctcctgccgctggccttgctgctccacgccgccaggccgagctacgtgctgacacagcctccatccgtgtctgtggctccaggacagaccgccagaatcacatgcggcggcaacaacctcggcagcaagagcgtgcactggtatcagcagccacctggacaggctccagtggtggtggtgtacgacgacagcgatagacctagcggcatccccgagagattcagcggcagcaattccggcaataccgccacactgaccatcagcagagtggaagctggcgacgaggccgtgtactactgccaagtgtgggacagcagcagcgatcacgtggtgtttggcggcggaacaaagctgacagtgcttggcggaggcggaagtggaggcggaggatctggcggcggaggctctcaactccagctgcaagagtctggccctggcctggtcaagcctagcgaaacactgagcctgacctgtaccgtgtctggcggctctatcagctccggcagctatttctggggctggatcagacaacctcctggcaaaggactggaatggatcggctccatctactacagcggcatcacctactacaaccccagcctgaagtccagagtgaccatctccgtggacaccagcaagaaccagttctccctgaagctgagcagcgtgacagccgccgataccgccgtgtattattgtgccagacatgacggcgctgtggccggcctgtttgattattggggacagggcaccctggtcaccgtgtcatctgctacgcgtgagcagaaactgatctcggaagaggatctgaaaattgaagttatgtatcctcctccttacctagacaatgagaagagcaatggaaccattatccatgtgaaagggaaacacctttgtccaagtcccctatttcccggaccttctaagcccttttgggtgctggtggtggttgggggagtcctggcttgctatagcttgctagtaacagtggcctttattattttctgggtgaggagtaagaggagcaggctcctgcacagtgactacatgaacatgactccacgccgccccggacccacccgcaagcattaccagccctatgccccaccacgcgacttcgcagcctatcgctccagagtgaagttcagcaggagcgcagacgcccccgcgtaccagcagggccagaaccagctctataacgagctcaatctaggacgaagagaggagtacgatgttttggacaagagacgtggccgggaccctgagatggggggaaagccgagaaggaagaaccctcaggaaggcctgtacaatgaactgcagaaagataagatggcggaggcctacagtgagattgggatgaaaggcgagcgccggaggggcaaggggcacgatggcctttaccagggtctcagtacagccaccaaggacacctacgacgcccttcacatgcaggccctgccccctcgctctagtggctccggcgagggcagaggaagtctactaacctgcggagatgtggaagaaaatcctggcccacatatgaccgagtacaagcccacggtgcgcctcgccacccgcgacgacgtccccagggccgtacgcaccctcgccgccgcgttcgccgactaccccgccacgcgccacaccgtcgatccggaccgccacatcgagcgggtcaccgagctgcaagaactcttcctcacgcgcgtcgggctcgacatcggcaaggtgtgggtcgcggacgacggcgccgcggtggcggtctggaccacgccggagagcgtcgaagcgggggcggtgttcgccgagatcggcccgcgcatggccgagttgagcggttcccggctggccgcgcagcaacagatggaaggcctcctggcgccgcaccggcccaaggagcccgcgtggttcctggccaccgtcggcgtctcgcccgaccaccagggcaagggtctgggcagcgccgtcgtgctccccggagtggaggcggccgagcgcgccggggtgcccgccttcctggagacctccgcgccccgcaacctccccttctacgagcggctcggcttcaccgtcaccgccgacgtcgaggtgcccgaaggaccgcgcacctggtgcatgacccgcaagcccggtgcctga

SEQ ID NO: 7963 - DNA, 1494 bp, Artificial Sequence
  Synthetic Polynucloetide
atggccttaccagtgaccgccttgctcctgccgctggccttgctgctccacgccgccaggccgagctacgtgctgacacagcctccatccgtgtctgtggctccaggacagaccgccagaatcacatgcggcggcaacaacctcggcagcaagagcgtgcactggtatcagcagccacctggacaggctccagtggtggtggtgtacgacgacagcgatagacctagcggcatccccgagagattcagcggcagcaattccggcaataccgccacactgaccatcagcagagtggaagctggcgacgaggccgtgtactactgccaagtgtgggacagcagcagcgatcacgtggtgtttggcggcggaacaaagctgacagtgcttggcggaggcggaagtggaggcggaggatctggcggcggaggctctcaactccagctgcaagagtctggccctggcctggtcaagcctagcgaaacactgagcctgacctgtaccgtgtctggcggctctatcagctccggcagctatttctggggctggatcagacaacctcctggcaaaggactggaatggatcggctccatctactacagcggcatcacctactacaaccccagcctgaagtccagagtgaccatctccgtggacaccagcaagaaccagttctccctgaagctgagcagcgtgacagccgccgataccgccgtgtattattgtgccagacatgacggcgctgtggccggcctgtttgattattggggacagggcaccctggtcaccgtgtcatctgctacgcgtgagcagaaactgatctcggaagaggatctgaaaattgaagttatgtatcctcctccttacctagacaatgagaagagcaatggaaccattatccatgtgaaagggaaacacctttgtccaagtcccctatttcccggaccttctaagcccttttgggtgctggtggtggttgggggagtcctggcttgctatagcttgctagtaacagtggcctttattattttctgggtgaggagtaagaggagcaggctcctgcacagtgactacatgaacatgactccacgccgccccggacccacccgcaagcattaccagccctatgccccaccacgcgacttcgcagcctatcgctccagagtgaagttcagcaggagcgcagacgcccccgcgtaccagcagggccagaaccagctctataacgagctcaatctaggacgaagagaggagtacgatgttttggacaagagacgtggccgggaccctgagatggggggaaagccgagaaggaagaaccctcaggaaggcctgtacaatgaactgcagaaagataagatggcggaggcctacagtgagattgggatgaaaggcgagcgccggaggggcaaggggcacgatggcctttaccagggtctcagtacagccaccaaggacacctacgacgcccttcacatgcaggccctgccccctcgc

SEQ ID NO: 7964 - DNA, 1515 bp, Artificial Sequence
  Synthetic Polynucloetide
atggccttaccagtgaccgccttgctcctgccgctggccttgctgctccacgccgccaggccgagctacgtgctgacacagcctccatccgtgtctgtggctccaggacagaccgccagaatcacatgcggcggcaacaacctcggcagcaagagcgtgcactggtatcagcagccacctggacaggctccagtggtggtggtgtacgacgacagcgatagacctagcggcatccccgagagattcagcggcagcaattccggcaataccgccacactgaccatcagcagagtggaagctggcgacgaggccgtgtactactgccaagtgtgggacagcagcagcgatcacgtggtgtttggcggcggaacaaagctgacagtgcttggcggaggcggaagtggaggcggaggatctggcggcggaggctctcaactccagctgcaagagtctggccctggcctggtcaagcctagcgaaacactgagcctgacctgtaccgtgtctggcggctctatcagctccggcagctatttctggggctggatcagacaacctcctggcaaaggactggaatggatcggctccatctactacagcggcatcacctactacaaccccagcctgaagtccagagtgaccatctccgtggacaccagcaagaaccagttctccctgaagctgagcagcgtgacagccgccgataccgccgtgtattattgtgccagacatgacggcgctgtggccggcctgtttgattattggggacagggcaccctggtcaccgtgtcatctgctacgcgtgagcagaaactgatctcggaagaggatctggcgaagcccaccacgacgccagcgccgcgaccaccaacaccggcgcccaccatcgcgtcgcagcccctgtccctgcgcccagaggcgtgccggccagcggcggggggcgcagtgcacacgagggggctggacttcgcctgtgacatctacatctgggcgcccttggccgggacttgtggggtccttctcctgtcactggttatcaccctttactgcaaacggggcagaaagaaactcctgtatatattcaaacaaccatttatgagaccagtacaaactactcaagaggaagatggctgtagctgccgatttccagaagaagaagaaggaggatgtgaactgagagtgaagttcagcaggagcgcagacgcccccgcgtaccagcagggccagaaccagctctataacgagctgaatctaggacgaagagaggagtacgatgttttggacaagagacgtggccgggaccctgagatggggggaaagccgagaaggaagaaccctcaggaaggcctgtacaatgaactgcagaaagataagatggcggaggcctacagtgagattgggatgaaaggcgagcgccggaggggcaaggggcacgatggcctttaccagggtctcagtacagccaccaaggacacctacgacgcccttcacatgcaggccctgccccctcgctga

SEQ ID NO: 7965 - DNA, 1515 bp, Artificial Sequence
  Synthetic Polynucloetide
atggccttaccagtgaccgccttgctcctgccgctggccttgctgctccacgccgccaggccgcaactccagctgcaagagtctggccctggcctggtcaagcctagcgaaacactgagcctgacctgtaccgtgtctggcggctctatcagctccggcagctatttctggggctggatcagacaacctcctggcaaaggactggaatggatcggctccatctactacagcggcatcacctactacaaccccagcctgaagtccagagtgaccatctccgtggacaccagcaagaaccagttctccctgaagctgagcagcgtgacagccgccgataccgccgtgtattattgtgccagacatgacggcgctgtggccggcctgtttgattattggggacagggcaccctggtcaccgtgtcatctgctggcggaggcggaagtggaggcggaggatctggcggcggaggctctagctacgtgctgacacagcctccatccgtgtctgtggctccaggacagaccgccagaatcacatgcggcggcaacaacctcggcagcaagagcgtgcactggtatcagcagccacctggacaggctccagtggtggtggtgtacgacgacagcgatagacctagcggcatccccgagagattcagcggcagcaattccggcaataccgccacactgaccatcagcagagtggaagctggcgacgaggccgtgtactactgccaagtgtgggacagcagcagcgatcacgtggtgtttggcggcggaacaaagctgacagtgcttacgcgtgagcagaaactgatctcggaagaggatctggcgaagcccaccacgacgccagcgccgcgaccaccaacaccggcgcccaccatcgcgtcgcagcccctgtccctgcgcccagaggcgtgccggccagcggcggggggcgcagtgcacacgagggggctggacttcgcctgtgacatctacatctgggcgcccttggccgggacttgtggggtccttctcctgtcactggttatcaccctttactgcaaacggggcagaaagaaactcctgtatatattcaaacaaccatttatgagaccagtacaaactactcaagaggaagatggctgtagctgccgatttccagaagaagaagaaggaggatgtgaactgagagtgaagttcagcaggagcgcagacgcccccgcgtaccagcagggccagaaccagctctataacgagctgaatctaggacgaagagaggagtacgatgttttggacaagagacgtggccgggaccctgagatggggggaaagccgagaaggaagaaccctcaggaaggcctgtacaatgaactgcagaaagataagatggcggaggcctacagtgagattgggatgaaaggcgagcgccggaggggcaaggggcacgatggcctttaccagggtctcagtacagccaccaaggacacctacgacgcccttcacatgcaggccctgccccctcgctga

SEQ ID NO: 7966 - DNA, 2754 bp, Artificial Sequence
  Synthetic Polynucloetide
atggccttaccagtgaccgccttgctcctgccgctggccttgctgctccacgccgccaggccgagctacgtgctgacacagcctccatccgtgtctgtggctccaggacagaccgccagaatcacatgcggcggcaacaacctcggcagcaagagcgtgcactggtatcagcagccacctggacaggctccagtggtggtggtgtacgacgacagcgatagacctagcggcatccccgagagattcagcggcagcaattccggcaataccgccacactgaccatcagcagagtggaagctggcgacgaggccgtgtactactgccaagtgtgggacagcagcagcgatcacgtggtgtttggcggcggaacaaagctgacagtgcttggcggaggcggaagtggaggcggaggatctggcggcggaggctctcaactccagctgcaagagtctggccctggcctggtcaagcctagcgaaacactgagcctgacctgtaccgtgtctggcggctctatcagctccggcagctatttctggggctggatcagacaacctcctggcaaaggactggaatggatcggctccatctactacagcggcatcacctactacaaccccagcctgaagtccagagtgaccatctccgtggacaccagcaagaaccagttctccctgaagctgagcagcgtgacagccgccgataccgccgtgtattattgtgccagacatgacggcgctgtggccggcctgtttgattattggggacagggcaccctggtcaccgtgtcatctgctacgcgtgagcagaaactgatctcggaagaggatctggcgaagcccaccacgacgccagcgccgcgaccaccaacaccggcgcccaccatcgcgtcgcagcccctgtccctgcgcccagaggcgtgccggccagcggcggggggcgcagtgcacacgagggggctggacttcgcctgtgacatctacatctgggcgcccttggccgggacttgtggggtccttctcctgtcactggttatcaccctttactgcgggcgcgccagagtgaagttcagcaggagcgcagacgcccccgcgtaccagcagggccagaaccagctctataacgagctgaatctaggacgaagagaggagtacgatgttttggacaagagacgtggccgggaccctgagatggggggaaagccgagaaggaagaaccctcaggaaggcctgtacaatgaactgcagaaagataagatggcggaggcctacagtgagattgggatgaaaggcgagcgccggaggggcaaggggcacgatggcctttaccagggtctcagtacagccaccaaggacacctacgacgcccttcacatgcaggccctgccccctcgctctagaggatctggagcaacaaacttctcactactcaaacaagcaggtgacgtggaggagaatcccgggcctgggatccacatggccacttacgaggttctctgtgaggtggcgcggaaactgggcacggatgacagggaagtggtattgttcctcctaaacgtgttcatacctcaacccacactggcccaattaattggagctcttagagctttaaaggaggagggcaggttaacgtttcccctgttagcggaatgtctgtttcgtgcaggtcgcagagacctcttgcgcgacctgcttcacttagacccgcgttttttagagcgccacctagcgggcacaatgagttatttcagcccttatcagctcactgttctccacgtagacggggagctgtgtgcgagggatattaggtctttgatatttttaagcaaggacactatagggtctcgcagcacaccacagacattcttacactgggtgtactgtatggaaaacttagacctactgggtcccactgacgtggatgccctaatgtcaatgcttagatctttgtcaagagtagacctacagcgccaagtgcaaaccctaatgggccttcacctttccggcccatcacactcccaacactatcgccatacaccactcgagaccgatttctacgactacaaggacgacgatgacaagactagtggctccggcgagggcagaggaagtctactaacctgcggagatgtggaagaaaatcctggcccacatatgaccgagtacaagcccacggtgcgcctcgccacccgcgacgacgtccccagggccgtacgcaccctcgccgccgcgttcgccgactaccccgccacgcgccacaccgtcgatccggaccgccacatcgagcgggtcaccgagctgcaagaactcttcctcacgcgcgtcgggctcgacatcggcaaggtgtgggtcgcggacgacggcgccgcggtggcggtctggaccacgccggagagcgtcgaagcgggggcggtgttcgccgagatcggcccgcgcatggccgagttgagcggttcccggctggccgcgcagcaacagatggaaggcctcctggcgccgcaccggcccaaggagcccgcgtggttcctggccaccgtcggcgtctcgcccgaccaccagggcaagggtctgggcagcgccgtcgtgctccccggagtggaggcggccgagcgcgccggggtgcccgccttcctggagacctccgcgccccgcaacctccccttctacgagcggctcggcttcaccgtcaccgccgacgtcgaggtgcccgaaggaccgcgcacctggtgcatgacccgcaagcccggtgcctga

SEQ ID NO: 7967 - DNA, 2574 bp, Artificial Sequence
  Synthetic Polynucloetide
atggccttaccagtgaccgccttgctcctgccgctggccttgctgctccacgccgccaggccgagctacgtgctgacacagcctccatccgtgtctgtggctccaggacagaccgccagaatcacatgcggcggcaacaacctcggcagcaagagcgtgcactggtatcagcagccacctggacaggctccagtggtggtggtgtacgacgacagcgatagacctagcggcatccccgagagattcagcggcagcaattccggcaataccgccacactgaccatcagcagagtggaagctggcgacgaggccgtgtactactgccaagtgtgggacagcagcagcgatcacgtggtgtttggcggcggaacaaagctgacagtgcttctcgagatccagaaccctgatcctgccgtgtaccagctgcgggatagcaagagcagcgacaagagcgtgtgtctgttcaccgacttcgacagccagaccaacgtgtcccagagcaaggactccgacgtgtacatcaccgataagtgcgtgctggacatgcggagcatggacttcaagagcaactccgccgtggcctggtccaacaagtccgatttcgcctgcgccaacgccttcaacaacagcattatccccgaggacacattcttcccaagcagcgacgtgccctgcgacgtgaagctggtggaaaagagcttcgagacagacaccaacctgaacttccagaacctgagcgtgatcggcttcagaatcctgctgctgaaagtggccggctttaacctgctgatgaccctgcggctgtggtccagccgcgccaagagaagcggatctggcgtgaagcagaccctgaatttcgacctgctgaagctggctggcgacgtggaatccaacccaggccctactagtatggactggatttggcgcatccttttccttgtcggcgctgctaccggcgcgcattccttcgaacaactccagctgcaagagtctggccctggcctggtcaagcctagcgaaacactgagcctgacctgtaccgtgtctggcggctctatcagctccggcagctatttctggggctggatcagacaacctcctggcaaaggactggaatggatcggctccatctactacagcggcatcacctactacaaccccagcctgaagtccagagtgaccatctccgtggacaccagcaagaaccagttctccctgaagctgagcagcgtgacagccgccgataccgccgtgtattattgtgccagacatgacggcgctgtggccggcctgtttgattattggggacagggcaccctggtcaccgtgtcatctgctacgcgtgaggacctgaagaacgtgttcccacctgaggtggccgtgttcgagcctagcaaggccgagatcgcccacacccagaaagccaccctcgtgtgcctggctaccggcttctaccccgaccatgtggaactgtcttggtgggtcaacggcaaagaggtgcacagcggcgtgtgtaccgacccccagccactgaaagaacagcccgccctgaacgacagccggtactgcctgagcagcagactgagagtgtccgccaccttctggcagaacccccggaaccacttcagatgccaggtgcagttctacggcctgagcgagaacgacgagtggacccaggacagagccaagcccgtgacccagatcgtgtctgccgaagcctggggcagagccgattgcggcatcaccagcgccagctaccaccagggcgtgctgagcgccaccatcctgtacgagatcctgctgggcaaggccaccctgtacgccgtgctggtgtctgccctggtgctgatggctatggtcaagcggaaggacagccggggaagggccaagcgatctggatctggagcaacaaacttctcactactcaaacaagcaggtgacgtggaggagaatcccgggccttctagaggccatatgaccgagtacaagcccacggtgcgcctcgccacccgcgacgacgtccccagggccgtacgcaccctcgccgccgcgttcgccgactaccccgccacgcgccacaccgtcgatccggaccgccacatcgagcgggtcaccgagctgcaagaactcttcctcacgcgcgtcgggctcgacatcggcaaggtgtgggtcgcggacgacggcgccgcggtggcggtctggaccacgccggagagcgtcgaagcgggggcggtgttcgccgagatcggcccgcgcatggccgagttgagcggttcccggctggccgcgcagcaacagatggaaggcctcctggcgccgcaccggcccaaggagcccgcgtggttcctggccaccgtcggcgtctcgcccgaccaccagggcaagggtctgggcagcgccgtcgtgctccccggagtggaggcggccgagcgcgccggggtgcccgccttcctggagacctccgcgccccgcaacctccccttctacgagcggctcggcttcaccgtcaccgccgacgtcgaggtgcccgaaggaccgcgcacctggtgcatgacccgcaagcccggtgcctga

SEQ ID NO: 7968 - DNA, 2571 bp, Artificial Sequence
  Synthetic Polynucloetide
atggccttaccagtgaccgccttgctcctgccgctggccttgctgctccacgccgccaggccgagctacgtgctgacacagcctccatccgtgtctgtggctccaggacagaccgccagaatcacatgcggcggcaacaacctcggcagcaagagcgtgcactggtatcagcagccacctggacaggctccagtggtggtggtgtacgacgacagcgatagacctagcggcatccccgagagattcagcggcagcaattccggcaataccgccacactgaccatcagcagagtggaagctggcgacgaggccgtgtactactgccaagtgtgggacagcagcagcgatcacgtggtgtttggcggcggaacaaagctgacagtgcttctcgaggacctgaagaacgtgttcccacctgaggtggccgtgttcgagcctagcaaggccgagatcgcccacacccagaaagccaccctcgtgtgcctggctaccggcttctaccccgaccatgtggaactgtcttggtgggtcaacggcaaagaggtgcacagcggcgtgtgtaccgacccccagccactgaaagaacagcccgccctgaacgacagccggtactgcctgagcagcagactgagagtgtccgccaccttctggcagaacccccggaaccacttcagatgccaggtgcagttctacggcctgagcgagaacgacgagtggacccaggacagagccaagcccgtgacccagatcgtgtctgccgaagcctggggcagagccgattgcggcatcaccagcgccagctaccaccagggcgtgctgagcgccaccatcctgtacgagatcctgctgggcaaggccaccctgtacgccgtgctggtgtctgccctggtgctgatggctatggtcaagcggaaggacagccggggaagggccaagcgatctggatctggagcaacaaacttctcactactcaaacaagcaggtgacgtggaggagaatcccgggcctactagtatggactggatttggcgcatccttttccttgtcggcgctgctaccggcgcgcattccttcgaacaactccagctgcaagagtctggccctggcctggtcaagcctagcgaaacactgagcctgacctgtaccgtgtctggcggctctatcagctccggcagctatttctggggctggatcagacaacctcctggcaaaggactggaatggatcggctccatctactacagcggcatcacctactacaaccccagcctgaagtccagagtgaccatctccgtggacaccagcaagaaccagttctccctgaagctgagcagcgtgacagccgccgataccgccgtgtattattgtgccagacatgacggcgctgtggccggcctgtttgattattggggacagggcaccctggtcaccgtgtcatctgctacgcgtatccagaaccctgatcctgccgtgtaccagctgcgggatagcaagagcagcgacaagagcgtgtgtctgttcaccgacttcgacagccagaccaacgtgtcccagagcaaggactccgacgtgtacatcaccgataagtgcgtgctggacatgcggagcatggacttcaagagcaactccgccgtggcctggtccaacaagtccgatttcgcctgcgccaacgccttcaacaacagcattatccccgaggacacattcttcccaagcagcgacgtgccctgcgacgtgaagctggtggaaaagagcttcgagacagacaccaacctgaacttccagaacctgagcgtgatcggcttcagaatcctgctgctgaaagtggccggctttaacctgctgatgaccctgcggctgtggtccagccgcgccaagagaagcggatctggcgtgaagcagaccctgaatttcgacctgctgaagctggctggcgacgtggaatccaacccaggcccttctagaggccatatgaccgagtacaagcccacggtgcgcctcgccacccgcgacgacgtccccagggccgtacgcaccctcgccgccgcgttcgccgactaccccgccacgcgccacaccgtcgatccggaccgccacatcgagcgggtcaccgagctgcaagaactcttcctcacgcgcgtcgggctcgacatcggcaaggtgtgggtcgcggacgacggcgccgcggtggcggtctggaccacgccggagagcgtcgaagcgggggcggtgttcgccgagatcggcccgcgcatggccgagttgagcggttcccggctggccgcgcagcaacagatggaaggcctcctggcgccgcaccggcccaaggagcccgcgtggttcctggccaccgtcggcgtctcgcccgaccaccagggcaagggtctgggcagcgccgtcgtgctccccggagtggaggcggccgagcgcgccggggtgcccgccttcctggagacctccgcgccccgcaacctccccttctacgagcggctcggcttcaccgtcaccgccgacgtcgaggtgcccgaaggaccgcgcacctggtgcatgacccgcaagcccggtgcctga

SEQ ID NO: 7969 - DNA, 1869 bp, Artificial Sequence
  Synthetic Polynucloetide
atggccttaccagtgaccgccttgctcctgccgctggccttgctgctccacgccgccaggccgagctacgtgctgacacagcctccatccgtgtctgtggctccaggacagaccgccagaatcacatgcggcggcaacaacctcggcagcaagagcgtgcactggtatcagcagccacctggacaggctccagtggtggtggtgtacgacgacagcgatagacctagcggcatccccgagagattcagcggcagcaattccggcaataccgccacactgaccatcagcagagtggaagctggcgacgaggccgtgtactactgccaagtgtgggacagcagcagcgatcacgtggtgtttggcggcggaacaaagctgacagtgcttctcgaggacctgaagaacgtgttcccacctgaggtggccgtgttcgagcctagcgaggccgagatcagccacacccagaaagccaccctcgtgtgcctggctaccggcttctaccccgaccatgtggaactgtcttggtgggtcaacggcaaagaggtgcacagcggcgtgtgtaccgacccccagccactgaaagaacagcccgccctgaacgacagccggtactgcctgagcagcagactgagagtgtccgccaccttctggcagaacccccggaaccacttcagatgccaggtgcagttctacggcctgagcgagaacgacgagtggacccaggacagagccaagcccgtgacccagatcgtgtctgccgaagcctggggcagagccgattgcggctttaccagcgagagctaccagcagggcgtgctgagcgccaccatcctgtacgagatcctgctgggcaaggccaccctgtacgccgtgctggtgtctgccctggtgctgatggctatggtcaagcggaaggacagccggggaagggccaagcgatctggatctggagcaacaaacttctcactactcaaacaagcaggtgacgtggaggagaatcccgggcctactagtatggactggatttggcgcatccttttccttgtcggcgctgctaccggcgcgcattccttcgaacaactccagctgcaagagtctggccctggcctggtcaagcctagcgaaacactgagcctgacctgtaccgtgtctggcggctctatcagctccggcagctatttctggggctggatcagacaacctcctggcaaaggactggaatggatcggctccatctactacagcggcatcacctactacaaccccagcctgaagtccagagtgaccatctccgtggacaccagcaagaaccagttctccctgaagctgagcagcgtgacagccgccgataccgccgtgtattattgtgccagacatgacggcgctgtggccggcctgtttgattattggggacagggcaccctggtcaccgtgtcatctgctacgcgtatccagaaccctgatcctgccgtgtaccagctgcgggatagcaagagcagcgacaagagcgtgtgtctgttcaccgacttcgacagccagaccaacgtgtcccagagcaaggactccgacgtgtacatcaccgataagtgcgtgctggacatgcggagcatggacttcaagagcaactccgccgtggcctggtccaacaagtccgatttcgcctgcgccaacgccttcaacaacagcattatccccgaggacacattcttcccaagccccgagagcagctgcgacgtgaagctggtggaaaagagcttcgagacagacaccaacctgaacttccagaacctgagcgtgatcggcttcagaatcctgctgctgaaagtggccggctttaacctgctgatgaccctgcggctgtggtccagc

SEQ ID NO: 7970 - DNA, 2544 bp, Artificial Sequence
  Synthetic Polynucloetide
atggccttaccagtgaccgccttgctcctgccgctggccttgctgctccacgccgccaggccgagctacgtgctgacacagcctccatccgtgtctgtggctccaggacagaccgccagaatcacatgcggcggcaacaacctcggcagcaagagcgtgcactggtatcagcagccacctggacaggctccagtggtggtggtgtacgacgacagcgatagacctagcggcatccccgagagattcagcggcagcaattccggcaataccgccacactgaccatcagcagagtggaagctggcgacgaggccgtgtactactgccaagtgtgggacagcagcagcgatcacgtggtgtttggcggcggaacaaagctgacagtgcttctcgaggacctgaagaacgtgttcccacctgaggtggccgtgttcgagcctagcgaggccgagatcagccacacccagaaagccaccctcgtgtgcctggctaccggcttctaccccgaccatgtggaactgtcttggtgggtcaacggcaaagaggtgcacagcggcgtgtgtaccgacccccagccactgaaagaacagcccgccctgaacgacagccggtactgcctgagcagcagactgagagtgtccgccaccttctggcagaacccccggaaccacttcagatgccaggtgcagttctacggcctgagcgagaacgacgagtggacccaggacagagccaagcccgtgacccagatcgtgtctgccgaagcctggggcagagccgattgcggctttaccagcgagagctaccagcagggcgtgctgagcgccaccatcctgtacgagatcctgctgggcaaggccaccctgtacgccgtgctggtgtctgccctggtgctgatggctatggtcaagcggaaggacagccggggaagggccaagcgatctggatctggagcaacaaacttctcactactcaaacaagcaggtgacgtggaggagaatcccgggcctactagtatggactggatttggcgcatccttttccttgtcggcgctgctaccggcgcgcattccttcgaacaactccagctgcaagagtctggccctggcctggtcaagcctagcgaaacactgagcctgacctgtaccgtgtctggcggctctatcagctccggcagctatttctggggctggatcagacaacctcctggcaaaggactggaatggatcggctccatctactacagcggcatcacctactacaaccccagcctgaagtccagagtgaccatctccgtggacaccagcaagaaccagttctccctgaagctgagcagcgtgacagccgccgataccgccgtgtattattgtgccagacatgacggcgctgtggccggcctgtttgattattggggacagggcaccctggtcaccgtgtcatctgctacgcgtatccagaaccctgatcctgccgtgtaccagctgcgggatagcaagagcagcgacaagagcgtgtgtctgttcaccgacttcgacagccagaccaacgtgtcccagagcaaggactccgacgtgtacatcaccgataagtgcgtgctggacatgcggagcatggacttcaagagcaactccgccgtggcctggtccaacaagtccgatttcgcctgcgccaacgccttcaacaacagcattatccccgaggacacattcttcccaagccccgagagcagctgcgacgtgaagctggtggaaaagagcttcgagacagacaccaacctgaacttccagaacctgagcgtgatcggcttcagaatcctgctgctgaaagtggccggctttaacctgctgatgaccctgcggctgtggtccagccgcgccaagagaagcggatctggcgtgaagcagaccctgaatttcgacctgctgaagctggctggcgacgtggaatccaacccaggcccttctagaggcgggatccacaccatggctacctacgaggtgctgtgcgaggtggcaagaaagctgggcaccgacgacagagaagtggtgctgttcctgctgaacgtgttcatccctcagcctacactggcccagctgatcggtgcactgagagccctgaaagaggaaggccggctgacctttcctctgctggccgaatgcctgttcagagccggaagaagggatctgctgcgggacctgctgcatctggaccccagatttctggaaagacacctggccggcaccatgagctacttcagcccttaccagctgaccgtgctgcacgttgacggcgaactgtgcgccagagatattcggagcctgatcttcctgagcaaggacaccatcggcagccggtctacccctcagacatttctgcactgggtgtactgcatggaaaacctggacctgctcggccccacagatgtggatgccctgatgtccatgctgagaagcctgagcagagtggacctccagagacaggtgcagacactgatgggactgcacctgagcggacctagccacagccagcactacagacacacccct

SEQ ID NO: 7971 - DNA, 1881 bp, Artificial Sequence
  Synthetic Polynucloetide
atggccttaccagtgaccgccttgctcctgccgctggccttgctgctccacgccgccaggccgagctacgtgctgacacagcctccatccgtgtctgtggctccaggacagaccgccagaatcacatgcggcggcaacaacctcggcagcaagagcgtgcactggtatcagcagccacctggacaggctccagtggtggtggtgtacgacgacagcgatagacctagcggcatccccgagagattcagcggcagcaattccggcaataccgccacactgaccatcagcagagtggaagctggcgacgaggccgtgtactactgccaagtgtgggacagcagcagcgatcacgtggtgtttggcggcggaacaaagctgacagtgcttctcgagatccagaaccctgatcctgccgtgtaccagctgcgggatagcaagagcagcgacaagagcgtgtgtctgttcaccgacttcgacagccagaccaacgtgtcccagagcaaggactccgacgtgtacatcaccgataagtgcgtgctggacatgcggagcatggacttcaagagcaactccgccgtggcctggtccaacaagtccgatttcgcctgcgccaacgccttcaacaacagcattatccccgaggacacattcttcccaagccccgagagcagctgcgacgtgaagctggtggaaaagagcttcgagacagacaccaacctgaacttccagaacctgagcgtgatcggcttcagaatcctgctgctgaaagtggccggctttaacctgctgatgaccctgcggctgtggtccagccgcgccaagagaagcggatctggcgtgaagcagaccctgaatttcgacctgctgaagctggctggcgacgtggaatccaacccaggccctactagtatggactggatttggcgcatccttttccttgtcggcgctgctaccggcgcgcattccttcgaacaactccagctgcaagagtctggccctggcctggtcaagcctagcgaaacactgagcctgacctgtaccgtgtctggcggctctatcagctccggcagctatttctggggctggatcagacaacctcctggcaaaggactggaatggatcggctccatctactacagcggcatcacctactacaaccccagcctgaagtccagagtgaccatctccgtggacaccagcaagaaccagttctccctgaagctgagcagcgtgacagccgccgataccgccgtgtattattgtgccagacatgacggcgctgtggccggcctgtttgattattggggacagggcaccctggtcaccgtgtcatctgctacgcgtgaggacctgaagaacgtgttcccacctgaggtggccgtgttcgagcctagcgaggccgagatcagccacacccagaaagccaccctcgtgtgcctggctaccggcttctaccccgaccatgtggaactgtcttggtgggtcaacggcaaagaggtgcacagcggcgtgtgtaccgacccccagccactgaaagaacagcccgccctgaacgacagccggtactgcctgagcagcagactgagagtgtccgccaccttctggcagaacccccggaaccacttcagatgccaggtgcagttctacggcctgagcgagaacgacgagtggacccaggacagagccaagcccgtgacccagatcgtgtctgccgaagcctggggcagagccgattgcggctttaccagcgagagctaccagcagggcgtgctgagcgccaccatcctgtacgagatcctgctgggcaaggccaccctgtacgccgtgctggtgtctgccctggtgctgatggctatggtcaagcggaaggacagccgggga

SEQ ID NO: 7972 - DNA, 2547 bp, Artificial Sequence
  Synthetic Polynucloetide
atggccttaccagtgaccgccttgctcctgccgctggccttgctgctccacgccgccaggccgagctacgtgctgacacagcctccatccgtgtctgtggctccaggacagaccgccagaatcacatgcggcggcaacaacctcggcagcaagagcgtgcactggtatcagcagccacctggacaggctccagtggtggtggtgtacgacgacagcgatagacctagcggcatccccgagagattcagcggcagcaattccggcaataccgccacactgaccatcagcagagtggaagctggcgacgaggccgtgtactactgccaagtgtgggacagcagcagcgatcacgtggtgtttggcggcggaacaaagctgacagtgcttctcgagatccagaaccctgatcctgccgtgtaccagctgcgggatagcaagagcagcgacaagagcgtgtgtctgttcaccgacttcgacagccagaccaacgtgtcccagagcaaggactccgacgtgtacatcaccgataagtgcgtgctggacatgcggagcatggacttcaagagcaactccgccgtggcctggtccaacaagtccgatttcgcctgcgccaacgccttcaacaacagcattatccccgaggacacattcttcccaagccccgagagcagctgcgacgtgaagctggtggaaaagagcttcgagacagacaccaacctgaacttccagaacctgagcgtgatcggcttcagaatcctgctgctgaaagtggccggctttaacctgctgatgaccctgcggctgtggtccagccgcgccaagagaagcggatctggcgtgaagcagaccctgaatttcgacctgctgaagctggctggcgacgtggaatccaacccaggccctactagtatggactggatttggcgcatccttttccttgtcggcgctgctaccggcgcgcattccttcgaacaactccagctgcaagagtctggccctggcctggtcaagcctagcgaaacactgagcctgacctgtaccgtgtctggcggctctatcagctccggcagctatttctggggctggatcagacaacctcctggcaaaggactggaatggatcggctccatctactacagcggcatcacctactacaaccccagcctgaagtccagagtgaccatctccgtggacaccagcaagaaccagttctccctgaagctgagcagcgtgacagccgccgataccgccgtgtattattgtgccagacatgacggcgctgtggccggcctgtttgattattggggacagggcaccctggtcaccgtgtcatctgctacgcgtgaggacctgaagaacgtgttcccacctgaggtggccgtgttcgagcctagcgaggccgagatcagccacacccagaaagccaccctcgtgtgcctggctaccggcttctaccccgaccatgtggaactgtcttggtgggtcaacggcaaagaggtgcacagcggcgtgtgtaccgacccccagccactgaaagaacagcccgccctgaacgacagccggtactgcctgagcagcagactgagagtgtccgccaccttctggcagaacccccggaaccacttcagatgccaggtgcagttctacggcctgagcgagaacgacgagtggacccaggacagagccaagcccgtgacccagatcgtgtctgccgaagcctggggcagagccgattgcggctttaccagcgagagctaccagcagggcgtgctgagcgccaccatcctgtacgagatcctgctgggcaaggccaccctgtacgccgtgctggtgtctgccctggtgctgatggctatggtcaagcggaaggacagccggggaagggccaagcgatctggatctggagcaacaaacttctcactactcaaacaagcaggtgacgtggaggagaatcccgggccttctagaggcgggatccacaccatggctacctacgaggtgctgtgcgaggtggcaagaaagctgggcaccgacgacagagaagtggtgctgttcctgctgaacgtgttcatccctcagcctacactggcccagctgatcggtgcactgagagccctgaaagaggaaggccggctgacctttcctctgctggccgaatgcctgttcagagccggaagaagggatctgctgcgggacctgctgcatctggaccccagatttctggaaagacacctggccggcaccatgagctacttcagcccttaccagctgaccgtgctgcacgttgacggcgaactgtgcgccagagatattcggagcctgatcttcctgagcaaggacaccatcggcagccggtctacccctcagacatttctgcactgggtgtactgcatggaaaacctggacctgctcggccccacagatgtggatgccctgatgtccatgctgagaagcctgagcagagtggacctccagagacaggtgcagacactgatgggactgcacctgagcggacctagccacagccagcactacagacacacccct

SEQ ID NO: 7973 - DNA, 2706 bp, Artificial Sequence
  Synthetic Polynucloetide
atggccttaccagtgaccgccttgctcctgccgctggccttgctgctccacgccgccaggccgctcgaggggaaaccaattcccaaccctcttctgggactggattcaaccggcagcggcgaggacctgaagaacgtgttcccacctgaggtggccgtgttcgagcctagcaaggccgagatcgcccacacccagaaagccaccctcgtgtgcctggctaccggcttctaccccgaccatgtggaactgtcttggtgggtcaacggcaaagaggtgcacagcggcgtgtgtaccgacccccagccactgaaagaacagcccgccctgaacgacagccggtactgcctgagcagcagactgagagtgtccgccaccttctggcagaacccccggaaccacttcagatgccaggtgcagttctacggcctgagcgagaacgacgagtggacccaggacagagccaagcccgtgacccagatcgtgtctgccgaagcctggggcagagccgattgcggcatcaccagcgccagctaccaccagggcgtgctgagcgccaccatcctgtacgagatcctgctgggcaaggccaccctgtacgccgtgctggtgtctgccctggtgctgatggctatggtcaagcggaaggacagccggggaagggccaagcgatctggatctggagcaacaaacttctcactactcaaacaagcaggtgacgtggaggagaatcccgggcctactagcatggccttaccagtgaccgccttgctcctgccgctggccttgctgctccacgccgccaggccgagctacgtgctgacacagcctccatccgtgtctgtggctccaggacagaccgccagaatcacatgcggcggcaacaacctcggcagcaagagcgtgcactggtatcagcagccacctggacaggctccagtggtggtggtgtacgacgacagcgatagacctagcggcatccccgagagattcagcggcagcaattccggcaataccgccacactgaccatcagcagagtggaagctggcgacgaggccgtgtactactgccaagtgtgggacagcagcagcgatcacgtggtgtttggcggcggaacaaagctgacagtgcttggcggaggcggaagtggaggcggaggatctggcggcggaggctctcaactccagctgcaagagtctggccctggcctggtcaagcctagcgaaacactgagcctgacctgtaccgtgtctggcggctctatcagctccggcagctatttctggggctggatcagacaacctcctggcaaaggactggaatggatcggctccatctactacagcggcatcacctactacaaccccagcctgaagtccagagtgaccatctccgtggacaccagcaagaaccagttctccctgaagctgagcagcgtgacagccgccgataccgccgtgtattattgtgccagacatgacggcgctgtggccggcctgtttgattattggggacagggcaccctggtcaccgtgtcatctgctacgcgtgagcagaaactgatctcggaagaggatgggagcggcatccagaaccctgatcctgccgtgtaccagctgcgggatagcaagagcagcgacaagagcgtgtgtctgttcaccgacttcgacagccagaccaacgtgtcccagagcaaggactccgacgtgtacatcaccgataagtgcgtgctggacatgcggagcatggacttcaagagcaactccgccgtggcctggtccaacaagtccgatttcgcctgcgccaacgccttcaacaacagcattatccccgaggacacattcttcccaagcagcgacgtgccctgcgacgtgaagctggtggaaaagagcttcgagacagacaccaacctgaacttccagaacctgagcgtgatcggcttcagaatcctgctgctgaaagtggccggctttaacctgctgatgaccctgcggctgtggtccagccgcgccaagagaagcggatctggcgtgaagcagaccctgaatttcgacctgctgaagctggctggcgacgtggaatccaacccaggcccttctagaggccatatgaccgagtacaagcccacggtgcgcctcgccacccgcgacgacgtccccagggccgtacgcaccctcgccgccgcgttcgccgactaccccgccacgcgccacaccgtcgatccggaccgccacatcgagcgggtcaccgagctgcaagaactcttcctcacgcgcgtcgggctcgacatcggcaaggtgtgggtcgcggacgacggcgccgcggtggcggtctggaccacgccggagagcgtcgaagcgggggcggtgttcgccgagatcggcccgcgcatggccgagttgagcggttcccggctggccgcgcagcaacagatggaaggcctcctggcgccgcaccggcccaaggagcccgcgtggttcctggccaccgtcggcgtctcgcccgaccaccagggcaagggtctgggcagcgccgtcgtgctccccggagtggaggcggccgagcgcgccggggtgcccgccttcctggagacctccgcgccccgcaacctccccttctacgagcggctcggcttcaccgtcaccgccgacgtcgaggtgcccgaaggaccgcgcacctggtgcatgacccgcaagcccggtgcctga

SEQ ID NO: 7974 - DNA, 2709 bp, Artificial Sequence
  Synthetic Polynucloetide
atggccttaccagtgaccgccttgctcctgccgctggccttgctgctccacgccgccaggccgctcgagcagaaactgatctcggaagaggatctgggctccggcgatcgccctgatcctgccgtgtaccagctgcgggatagcaagagcagcgacaagagcgtgtgtctgttcaccgacttcgacagccagaccaacgtgtcccagagcaaggactccgacgtgtacatcaccgataagtgcgtgctggacatgcggagcatggacttcaagagcaactccgccgtggcctggtccaacaagtccgatttcgcctgcgccaacgccttcaacaacagcattatccccgaggacacattcttcccaagccccgagagcagctgcgacgtgaagctggtggaaaagagcttcgagacagacaccaacctgaacttccagaacctgagcgtgatcggcttcagaatcctgctgctgaaagtggccggctttaacctgctgatgaccctgcggctgtggtccagctctagtcgcgccaagagaagcggatctggcgtgaagcagaccctgaatttcgacctgctgaagctggctggcgacgtggaatccaacccaggccccactagcatggccttaccagtgaccgccttgctcctgccgctggccttgctgctccacgccgccaggccgagctacgtgctgacacagcctccatccgtgtctgtggctccaggacagaccgccagaatcacatgcggcggcaacaacctcggcagcaagagcgtgcactggtatcagcagccacctggacaggctccagtggtggtggtgtacgacgacagcgatagacctagcggcatccccgagagattcagcggcagcaattccggcaataccgccacactgaccatcagcagagtggaagctggcgacgaggccgtgtactactgccaagtgtgggacagcagcagcgatcacgtggtgtttggcggcggaacaaagctgacagtgcttggcggaggcggaagtggaggcggaggatctggcggcggaggctctcaactccagctgcaagagtctggccctggcctggtcaagcctagcgaaacactgagcctgacctgtaccgtgtctggcggctctatcagctccggcagctatttctggggctggatcagacaacctcctggcaaaggactggaatggatcggctccatctactacagcggcatcacctactacaaccccagcctgaagtccagagtgaccatctccgtggacaccagcaagaaccagttctccctgaagctgagcagcgtgacagccgccgataccgccgtgtattattgtgccagacatgacggcgctgtggccggcctgtttgattattggggacagggcaccctggtcaccgtgtcatctgctacgcgtgggaaaccaattcccaaccctcttctgggactggattcaaccggcagcggcgaggacctgaagaacgtgttcccacctgaggtggccgtgttcgagcctagcgaggccgagatcagccacacccagaaagccaccctcgtgtgcctggctaccggcttctaccccgaccatgtggaactgtcttggtgggtcaacggcaaagaggtgcacagcggcgtgtgtaccgacccccagccactgaaagaacagcccgccctgaacgacagccggtactgcctgagcagcagactgagagtgtccgccaccttctggcagaacccccggaaccacttcagatgccaggtgcagttctacggcctgagcgagaacgacgagtggacccaggacagagccaagcccgtgacccagatcgtgtctgccgaagcctggggcagagccgattgcggctttaccagcgagagctaccagcagggcgtgctgagcgccaccatcctgtacgagatcctgctgggcaaggccaccctgtacgccgtgctggtgtctgccctggtgctgatggctatggtcaagcggaaggacagccggggaagggccaagcgatctggatctggagcaacaaacttctcactactcaaacaagcaggtgacgtggaggagaatcccgggccttctagaggccatatgaccgagtacaagcccacggtgcgcctcgccacccgcgacgacgtccccagggccgtacgcaccctcgccgccgcgttcgccgactaccccgccacgcgccacaccgtcgatccggaccgccacatcgagcgggtcaccgagctgcaagaactcttcctcacgcgcgtcgggctcgacatcggcaaggtgtgggtcgcggacgacggcgccgcggtggcggtctggaccacgccggagagcgtcgaagcgggggcggtgttcgccgagatcggcccgcgcatggccgagttgagcggttcccggctggccgcgcagcaacagatggaaggcctcctggcgccgcaccggcccaaggagcccgcgtggttcctggccaccgtcggcgtctcgcccgaccaccagggcaagggtctgggcagcgccgtcgtgctccccggagtggaggcggccgagcgcgccggggtgcccgccttcctggagacctccgcgccccgcaacctccccttctacgagcggctcggcttcaccgtcaccgccgacgtcgaggtgcccgaaggaccgcgcacctggtgcatgacccgcaagcccggtgcctga

SEQ ID NO: 7975 - DNA, 2571 bp, Artificial Sequence
  Synthetic Polynucloetide
atggccttaccagtgaccgccttgctcctgccgctggccttgctgctccacgccgccaggccgagctacgtgctgacacagcctccatccgtgtctgtggctccaggacagaccgccagaatcacatgcggcggcaacaacctcggcagcaagagcgtgcactggtatcagcagccacctggacaggctccagtggtggtggtgtacgacgacagcgatagacctagcggcatccccgagagattcagcggcagcaattccggcaataccgccacactgaccatcagcagagtggaagctggcgacgaggccgtgtactactgccaagtgtgggacagcagcagcgatcacgtggtgtttggcggcggaacaaagctgacagtgcttctcgaggacctgaagaacgtgttcccacctgaggtggccgtgttcgagcctagcgaggccgagatcagccacacccagaaagccaccctcgtgtgcctggctaccggcttctaccccgaccatgtggaactgtcttggtgggtcaacggcaaagaggtgcacagcggcgtgtctaccgacccccagccactgaaagaacagcccgccctgaacgacagccggtactgcctgagcagcagactgagagtgtccgccaccttctggcagaacccccggaaccacttcagatgccaggtgcagttctacggcctgagcgagaacgacgagtggacccaggacagagccaagcccgtgacccagatcgtgtctgccgaagcctggggcagagccgattgcggctttaccagcgagagctaccagcagggcgtgctgagcgccaccatcctgtacgagatcctgctgggcaaggccaccctgtacgccgtgctggtgtctgccctggtgctgatggctatggtcaagcggaaggacagccggggaagggccaagcgatctggatctggagcaacaaacttctcactactcaaacaagcaggtgacgtggaggagaatcccgggcctactagtatggactggatttggcgcatccttttccttgtcggcgctgctaccggcgcgcattccttcgaacaactccagctgcaagagtctggccctggcctggtcaagcctagcgaaacactgagcctgacctgtaccgtgtctggcggctctatcagctccggcagctatttctggggctggatcagacaacctcctggcaaaggactggaatggatcggctccatctactacagcggcatcacctactacaaccccagcctgaagtccagagtgaccatctccgtggacaccagcaagaaccagttctccctgaagctgagcagcgtgacagccgccgataccgccgtgtattattgtgccagacatgacggcgctgtggccggcctgtttgattattggggacagggcaccctggtcaccgtgtcatctgctacgcgtatccagaaccctgatcctgccgtgtaccagctgcgggatagcaagagcagcgacaagagcgtgtgtctgttcaccgacttcgacagccagaccaacgtgtcccagagcaaggactccgacgtgtacatcaccgataagaccgtgctggacatgcggagcatggacttcaagagcaactccgccgtggcctggtccaacaagtccgatttcgcctgcgccaacgccttcaacaacagcattatccccgaggacacattcttcccaagccccgagagcagctgcgacgtgaagctggtggaaaagagcttcgagacagacaccaacctgaacttccagaacctgagcgtgatcggcttcagaatcctgctgctgaaagtggccggctttaacctgctgatgaccctgcggctgtggtccagccgcgccaagagaagcggatctggcgtgaagcagaccctgaatttcgacctgctgaagctggctggcgacgtggaatccaacccaggcccttctagaggccatatgaccgagtacaagcccacggtgcgcctcgccacccgcgacgacgtccccagggccgtacgcaccctcgccgccgcgttcgccgactaccccgccacgcgccacaccgtcgatccggaccgccacatcgagcgggtcaccgagctgcaagaactcttcctcacgcgcgtcgggctcgacatcggcaaggtgtgggtcgcggacgacggcgccgcggtggcggtctggaccacgccggagagcgtcgaagcgggggcggtgttcgccgagatcggcccgcgcatggccgagttgagcggttcccggctggccgcgcagcaacagatggaaggcctcctggcgccgcaccggcccaaggagcccgcgtggttcctggccaccgtcggcgtctcgcccgaccaccagggcaagggtctgggcagcgccgtcgtgctccccggagtggaggcggccgagcgcgccggggtgcccgccttcctggagacctccgcgccccgcaacctccccttctacgagcggctcggcttcaccgtcaccgccgacgtcgaggtgcccgaaggaccgcgcacctggtgcatgacccgcaagcccggtgcctga

SEQ ID NO: 7976 - DNA, 2817 bp, Artificial Sequence
  Synthetic Polynucloetide
atggccttaccagtgaccgccttgctcctgccgctggccttgctgctccacgccgccaggccgagctacgtgctgacacagcctccatccgtgtctgtggctccaggacagaccgccagaatcacatgcggcggcaacaacctcggcagcaagagcgtgcactggtatcagcagccacctggacaggctccagtggtggtggtgtacgacgacagcgatagacctagcggcatccccgagagattcagcggcagcaattccggcaataccgccacactgaccatcagcagagtggaagctggcgacgaggccgtgtactactgccaagtgtgggacagcagcagcgatcacgtggtgtttggcggcggaacaaagctgacagtgcttctcgaggacctgaagaacgtgttcccacctgaggtggccgtgttcgagcctagcgaggccgagatcagccacacccagaaagccaccctcgtgtgcctggctaccggcttctaccccgaccatgtggaactgtcttggtgggtcaacggcaaagaggtgcacagcggcgtgtctaccgacccccagccactgaaagaacagcccgccctgaacgacagccggtactgcctgagcagcagactgagagtgtccgccaccttctggcagaacccccggaaccacttcagatgccaggtgcagttctacggcctgagcgagaacgacgagtggacccaggacagagccaagcccgtgacccagatcgtgtctgccgaagcctggggcagagccgattgcggctttaccagcgagagctaccagcagggcgtgctgagcgccaccatcctgtacgagatcctgctgggcaaggccaccctgtacgccgtgctggtgtctgccctggtgctgatggctatggtcaagcggaaggacagccggggaagggccaagcgatctggatctggagcaacaaacttctcactactcaaacaagcaggtgacgtggaggagaatcccgggcctactagtatggactggatttggcgcatccttttccttgtcggcgctgctaccggcgcgcattccttcgaacaactccagctgcaagagtctggccctggcctggtcaagcctagcgaaacactgagcctgacctgtaccgtgtctggcggctctatcagctccggcagctatttctggggctggatcagacaacctcctggcaaaggactggaatggatcggctccatctactacagcggcatcacctactacaaccccagcctgaagtccagagtgaccatctccgtggacaccagcaagaaccagttctccctgaagctgagcagcgtgacagccgccgataccgccgtgtattattgtgccagacatgacggcgctgtggccggcctgtttgattattggggacagggcaccctggtcaccgtgtcatctgctacgcgtgagcagaaactgatctcggaagaggatgggagcggcaccccattcccttctctggcccctcccatcatgctgctggtggacggcaagcagcagatggtggtcgtgtgcctggtgctggatgtggccccacctggactggacagccccatctggtttagcgccggcaatggctctgccctggacgcctttacctacggcccaagccctgccaccgatggcacctggacaaatctggcccacctgagcctgcccagcgaggaactggcttcttgggagcctctcgtgtgccacacaggacctggcgctgagggacacagcagatccacccagcctatgcacctgtctggcgaggccagcaccgccagaacctgtcctcaggaacctctgagaggcacccctggcggagcactgtggctgggagtgctgagactgctgctgttcaagctgctgctgtttgacctgctgctgacctgctcctgtctgtgcgatcctgccggccctctgccttctcctgccaccaccacaagactgagagccctgggcagccacagactgcaccctgccacagagacaggcggcagagaggccacaagcagccctagaccccagcccagagacagaagatggggcgataccccccctggcagaaagcctggatctccagtccgcgccaagagaagcggatctggcgtgaagcagaccctgaatttcgacctgctgaagctggctggcgacgtggaatccaacccaggcccttctagaggccatatgaccgagtacaagcccacggtgcgcctcgccacccgcgacgacgtccccagggccgtacgcaccctcgccgccgcgttcgccgactaccccgccacgcgccacaccgtcgatccggaccgccacatcgagcgggtcaccgagctgcaagaactcttcctcacgcgcgtcgggctcgacatcggcaaggtgtgggtcgcggacgacggcgccgcggtggcggtctggaccacgccggagagcgtcgaagcgggggcggtgttcgccgagatcggcccgcgcatggccgagttgagcggttcccggctggccgcgcagcaacagatggaaggcctcctggcgccgcaccggcccaaggagcccgcgtggttcctggccaccgtcggcgtctcgcccgaccaccagggcaagggtctgggcagcgccgtcgtgctccccggagtggaggcggccgagcgcgccggggtgcccgccttcctggagacctccgcgccccgcaacctccccttctacgagcggctcggcttcaccgtcaccgccgacgtcgaggtgcccgaaggaccgcgcacctggtgcatgacccgcaagcccggtgcctga

SEQ ID NO: 7977 - DNA, 2871 bp, Artificial Sequence
  Synthetic Polynucloetide
atggccttaccagtgaccgccttgctcctgccgctggccttgctgctccacgccgccaggccgctcgaggacctgaagaacgtgttcccacctgaggtggccgtgttcgagcctagcgaggccgagatcagccacacccagaaagccaccctcgtgtgcctggctaccggcttctaccccgaccatgtggaactgtcttggtgggtcaacggcaaagaggtgcacagcggcgtgtctaccgacccccagccactgaaagaacagcccgccctgaacgacagccggtactgcctgagcagcagactgagagtgtccgccaccttctggcagaacccccggaaccacttcagatgccaggtgcagttctacggcctgagcgagaacgacgagtggacccaggacagagccaagcccgtgacccagatcgtgtctgccgaagcctggggcagagccgattgcggctttaccagcgagagctaccagcagggcgtgctgagcgccaccatcctgtacgagatcctgctgggcaaggccaccctgtacgccgtgctggtgtctgccctggtgctgatggctatggtcaagcggaaggacagccggggaagggccaagcgatctggatctggagcaacaaacttctcactactcaaacaagcaggtgacgtggaggagaatcccgggcctactagcatggccttaccagtgaccgccttgctcctgccgctggccttgctgctccacgccgccaggccgagctacgtgctgacacagcctccatccgtgtctgtggctccaggacagaccgccagaatcacatgcggcggcaacaacctcggcagcaagagcgtgcactggtatcagcagccacctggacaggctccagtggtggtggtgtacgacgacagcgatagacctagcggcatccccgagagattcagcggcagcaattccggcaataccgccacactgaccatcagcagagtggaagctggcgacgaggccgtgtactactgccaagtgtgggacagcagcagcgatcacgtggtgtttggcggcggaacaaagctgacagtgcttggcggaggcggaagtggaggcggaggatctggcggcggaggctctcaactccagctgcaagagtctggccctggcctggtcaagcctagcgaaacactgagcctgacctgtaccgtgtctggcggctctatcagctccggcagctatttctggggctggatcagacaacctcctggcaaaggactggaatggatcggctccatctactacagcggcatcacctactacaaccccagcctgaagtccagagtgaccatctccgtggacaccagcaagaaccagttctccctgaagctgagcagcgtgacagccgccgataccgccgtgtattattgtgccagacatgacggcgctgtggccggcctgtttgattattggggacagggcaccctggtcaccgtgtcatctgctacgcgtgagcagaaactgatctcggaagaggatctggggagcggcaccccattcccttctctggcccctcccatcatgctgctggtggacggcaagcagcagatggtggtcgtgtgcctggtgctggatgtggccccacctggactggacagccccatctggtttagcgccggcaatggctctgccctggacgcctttacctacggcccaagccctgccaccgatggcacctggacaaatctggcccacctgagcctgcccagcgaggaactggcttcttgggagcctctcgtgtgccacacaggacctggcgctgagggacacagcagatccacccagcctatgcacctgtctggcgaggccagcaccgccagaacctgtcctcaggaacctctgagaggcacccctggcggagcactgtggctgggagtgctgagactgctgctgttcaagctgctgctgtttgacctgctgctgacctgctcctgtctgtgcgatcctgccggccctctgccttctcctgccaccaccacaagactgagagccctgggcagccacagactgcaccctgccacagagacaggcggcagagaggccacaagcagccctagaccccagcccagagacagaagatggggcgataccccccctggcagaaagcctggatctccagtccgcgccaagagaagcggatctggcgtgaagcagaccctgaatttcgacctgctgaagctggctggcgacgtggaatccaacccaggcccttctagatctagaggccatatgaccgagtacaagcccacggtgcgcctcgccacccgcgacgacgtccccagggccgtacgcaccctcgccgccgcgttcgccgactaccccgccacgcgccacaccgtcgatccggaccgccacatcgagcgggtcaccgagctgcaagaactcttcctcacgcgcgtcgggctcgacatcggcaaggtgtgggtcgcggacgacggcgccgcggtggcggtctggaccacgccggagagcgtcgaagcgggggcggtgttcgccgagatcggcccgcgcatggccgagttgagcggttcccggctggccgcgcagcaacagatggaaggcctcctggcgccgcaccggcccaaggagcccgcgtggttcctggccaccgtcggcgtctcgcccgaccaccagggcaagggtctgggcagcgccgtcgtgctccccggagtggaggcggccgagcgcgccggggtgcccgccttcctggagacctccgcgccccgcaacctccccttctacgagcggctcggcttcaccgtcaccgccgacgtcgaggtgcccgaaggaccgcgcacctggtgcatgacccgcaagcccggtgcctga

SEQ ID NO: 7978 - DNA, 2682 bp, Artificial Sequence
  Synthetic Polynucloetide
atggccttaccagtgaccgccttgctcctgccgctggccttgctgctccacgccgccaggccgagctacgtgctgacacagcctccatccgtgtctgtggctccaggacagaccgccagaatcacatgcggcggcaacaacctcggcagcaagagcgtgcactggtatcagcagccacctggacaggctccagtggtggtggtgtacgacgacagcgatagacctagcggcatccccgagagattcagcggcagcaattccggcaataccgccacactgaccatcagcagagtggaagctggcgacgaggccgtgtactactgccaagtgtgggacagcagcagcgatcacgtggtgtttggcggcggaacaaagctgacagtgcttctcgaggggaaaccaattcccaaccctcttctgggactggattcaaccggcagcggcgacaagcagctggacgccgacgtgtcccccaagcctaccatcttcctgccctctatcgccgagacaaagctccagaaggccggcacctacctgtgcctgctggaaaagttcttcccagatgtgattaagatccactggcaggaaaagaagtccaacaccatcctgggcagccaggaaggcaacaccatgaagaccaacgacacctacatgaagttcagctggctgaccgtgcccgagaagtccctggacaaagaacacagatgcatcgtgcggcacgaaaacaacaagaacggcgtggaccaggaaatcatcttcccacccatcaagaccgatgtgattacaatggaccccaaggacaactgctccaaggacgccaacgataccctgctgctccagctgaccaacaccagcgcctactacatgtacttgttgctgctgctgaagtccgtggtgtacttcgccatcatcacatgctgcctgctgcggagaaccgccttctgctgcaacggcgagaagtctagggccaagcgatctggatctggagcaacaaacttctcactactcaaacaagcaggtgacgtggaggagaatcccgggcctactagtatggactggatttggcgcatccttttccttgtcggcgctgctaccggcgcgcattccttcgaacaactccagctgcaagagtctggccctggcctggtcaagcctagcgaaacactgagcctgacctgtaccgtgtctggcggctctatcagctccggcagctatttctggggctggatcagacaacctcctggcaaaggactggaatggatcggctccatctactacagcggcatcacctactacaaccccagcctgaagtccagagtgaccatctccgtggacaccagcaagaaccagttctccctgaagctgagcagcgtgacagccgccgataccgccgtgtattattgtgccagacatgacggcgctgtggccggcctgtttgattattggggacagggcaccctggtcaccgtgtcatctgctacgcgtgagcagaaactgatctcggaagaggatgggagcggcagccagcctcacaccaagcccagcgtgttcgtgatgaagaacggcaccaacgtggcctgcctcgtgaaagagttctaccccaaggacatcaggatcaacctggtgtccagcaagaagatcaccgagttcgaccccgccatcgtgatctcccccagcggcaagtacaacgccgtgaagctggggaagtacgaggacagcaacagcgtgacctgctccgtgcagcacgacaacaagaccgtgcacagcaccgactttgaagtgaaaaccgactccaccgaccacgtgaagcccaaagagacagagaacaccaagcagcccagcaagagctgccacaagcccaaggccatcgtgcacaccgagaaagtgaacatgatgagcctgaccgtgctgggcctgcggatgctgttcgccaaaaccgtggccgtgaacttcctgctgaccgccaagctgttcttcctccgcgccaagagaagcggatctggcgtgaagcagaccctgaatttcgacctgctgaagctggctggcgacgtggaatccaacccaggcccttctagaggccatatgaccgagtacaagcccacggtgcgcctcgccacccgcgacgacgtccccagggccgtacgcaccctcgccgccgcgttcgccgactaccccgccacgcgccacaccgtcgatccggaccgccacatcgagcgggtcaccgagctgcaagaactcttcctcacgcgcgtcgggctcgacatcggcaaggtgtgggtcgcggacgacggcgccgcggtggcggtctggaccacgccggagagcgtcgaagcgggggcggtgttcgccgagatcggcccgcgcatggccgagttgagcggttcccggctggccgcgcagcaacagatggaaggcctcctggcgccgcaccggcccaaggagcccgcgtggttcctggccaccgtcggcgtctcgcccgaccaccagggcaagggtctgggcagcgccgtcgtgctccccggagtggaggcggccgagcgcgccggggtgcccgccttcctggagacctccgcgccccgcaacctccccttctacgagcggctcggcttcaccgtcaccgccgacgtcgaggtgcccgaaggaccgcgcacctggtgcatgacccgcaagcccggtgcctga

SEQ ID NO: 7979 - DNA, 1893 bp, Artificial Sequence
  Synthetic Polynucloetide
atggccttaccagtgaccgccttgctcctgccgctggccttgctgctccacgccgccaggccgagctacgtgctgacacagcctccatccgtgtctgtggctccaggacagaccgccagaatcacatgcggcggcaacaacctcggcagcaagagcgtgcactggtatcagcagccacctggacaggctccagtggtggtggtgtacgacgacagcgatagacctagcggcatccccgagagattcagcggcagcaattccggcaataccgccacactgaccatcagcagagtggaagctggcgacgaggccgtgtactactgccaagtgtgggacagcagcagcgatcacgtggtgtttggcggcggaacaaagctgacagtgcttctcgagagccagcctcacaccaagcccagcgtgttcgtgatgaagaacggcaccaacgtggcctgcctcgtgaaagagttctaccccaaggacatcaggatcaacctggtgtccagcaagaagatcaccgagttcgaccccgccatcgtgatctcccccagcggcaagtacaacgccgtgaagctggggaagtacgaggacagcaacagcgtgacctgctccgtgcagcacgacaacaagaccgtgcacagcaccgactttgaagtgaaaaccgactccaccgaccacgtgaagcccaaagagacagagaacaccaagcagcccagcaagagctgccacaagcccaaggccatcgtgcacaccgagaaagtgaacatgatgagcctgaccgtgctgggcctgcggatgctgttcgccaaaaccgtggccgtgaacttcctgctgaccgccaagctgttcttcctcagggccaagcgatctggatctggagcaacaaacttctcactactcaaacaagcaggtgacgtggaggagaatcccgggcctactagtatggactggatttggcgcatccttttccttgtcggcgctgctaccggcgcgcattccttcgaacaactccagctgcaagagtctggccctggcctggtcaagcctagcgaaacactgagcctgacctgtaccgtgtctggcggctctatcagctccggcagctatttctggggctggatcagacaacctcctggcaaaggactggaatggatcggctccatctactacagcggcatcacctactacaaccccagcctgaagtccagagtgaccatctccgtggacaccagcaagaaccagttctccctgaagctgagcagcgtgacagccgccgataccgccgtgtattattgtgccagacatgacggcgctgtggccggcctgtttgattattggggacagggcaccctggtcaccgtgtcatctgctacgcgtgacaagcagctggacgccgacgtgtcccccaagcctaccatcttcctgccctctatcgccgagacaaagctccagaaggccggcacctacctgtgcctgctggaaaagttcttcccagatgtgattaagatccactggcaggaaaagaagtccaacaccatcctgggcagccaggaaggcaacaccatgaagaccaacgacacctacatgaagttcagctggctgaccgtgcccgagaagtccctggacaaagaacacagatgcatcgtgcggcacgaaaacaacaagaacggcgtggaccaggaaatcatcttcccacccatcaagaccgatgtgattacaatggaccccaaggacaactgctccaaggacgccaacgataccctgctgctccagctgaccaacaccagcgcctactacatgtacttgttgctgctgctgaagtccgtggtgtacttcgccatcatcacatgctgcctgctgcggagaaccgccttctgctgcaacggcgagaagtct

SEQ ID NO: 7980 - DNA, 2727 bp, Artificial Sequence
  Synthetic Polynucloetide
atggccttaccagtgaccgccttgctcctgccgctggccttgctgctccacgccgccaggccgctcgaggggaaaccaattcccaaccctcttctgggactggattcaaccggcagcggcgacaagcagctggacgccgacgtgtcccccaagcctaccatcttcctgccctctatcgccgagacaaagctccagaaggccggcacctacctgtgcctgctggaaaagttcttcccagatgtgattaagatccactggcaggaaaagaagtccaacaccatcctgggcagccaggaaggcaacaccatgaagaccaacgacacctacatgaagttcagctggctgaccgtgcccgagaagtccctggacaaagaacacagatgcatcgtgcggcacgaaaacaacaagaacggcgtggaccaggaaatcatcttcccacccatcaagaccgatgtgattacaatggaccccaaggacaactgctccaaggacgccaacgataccctgctgctccagctgaccaacaccagcgcctactacatgtacttgttgctgctgctgaagtccgtggtgtacttcgccatcatcacatgctgcctgctgcggagaaccgccttctgctgcaacggcgagaagtctagggccaagcgatctggatctggagcaacaaacttctcactactcaaacaagcaggtgacgtggaggagaatcccgggcctactagcatggccttaccagtgaccgccttgctcctgccgctggccttgctgctccacgccgccaggccgagctacgtgctgacacagcctccatccgtgtctgtggctccaggacagaccgccagaatcacatgcggcggcaacaacctcggcagcaagagcgtgcactggtatcagcagccacctggacaggctccagtggtggtggtgtacgacgacagcgatagacctagcggcatccccgagagattcagcggcagcaattccggcaataccgccacactgaccatcagcagagtggaagctggcgacgaggccgtgtactactgccaagtgtgggacagcagcagcgatcacgtggtgtttggcggcggaacaaagctgacagtgcttggcggaggcggaagtggaggcggaggatctggcggcggaggctctcaactccagctgcaagagtctggccctggcctggtcaagcctagcgaaacactgagcctgacctgtaccgtgtctggcggctctatcagctccggcagctatttctggggctggatcagacaacctcctggcaaaggactggaatggatcggctccatctactacagcggcatcacctactacaaccccagcctgaagtccagagtgaccatctccgtggacaccagcaagaaccagttctccctgaagctgagcagcgtgacagccgccgataccgccgtgtattattgtgccagacatgacggcgctgtggccggcctgtttgattattggggacagggcaccctggtcaccgtgtcatctgctacgcgtgagcagaaactgatctcggaagaggatgggagcggcagccagcctcacaccaagcccagcgtgttcgtgatgaagaacggcaccaacgtggcctgcctcgtgaaagagttctaccccaaggacatcaggatcaacctggtgtccagcaagaagatcaccgagttcgaccccgccatcgtgatctcccccagcggcaagtacaacgccgtgaagctggggaagtacgaggacagcaacagcgtgacctgctccgtgcagcacgacaacaagaccgtgcacagcaccgactttgaagtgaaaaccgactccaccgaccacgtgaagcccaaagagacagagaacaccaagcagcccagcaagagctgccacaagcccaaggccatcgtgcacaccgagaaagtgaacatgatgagcctgaccgtgctgggcctgcggatgctgttcgccaaaaccgtggccgtgaacttcctgctgaccgccaagctgttcttcctccgcgccaagagaagcggatctggcgtgaagcagaccctgaatttcgacctgctgaagctggctggcgacgtggaatccaacccaggcccttctagaggccatatgaccgagtacaagcccacggtgcgcctcgccacccgcgacgacgtccccagggccgtacgcaccctcgccgccgcgttcgccgactaccccgccacgcgccacaccgtcgatccggaccgccacatcgagcgggtcaccgagctgcaagaactcttcctcacgcgcgtcgggctcgacatcggcaaggtgtgggtcgcggacgacggcgccgcggtggcggtctggaccacgccggagagcgtcgaagcgggggcggtgttcgccgagatcggcccgcgcatggccgagttgagcggttcccggctggccgcgcagcaacagatggaaggcctcctggcgccgcaccggcccaaggagcccgcgtggttcctggccaccgtcggcgtctcgcccgaccaccagggcaagggtctgggcagcgccgtcgtgctccccggagtggaggcggccgagcgcgccggggtgcccgccttcctggagacctccgcgccccgcaacctccccttctacgagcggctcggcttcaccgtcaccgccgacgtcgaggtgcccgaaggaccgcgcacctggtgcatgacccgcaagcccggtgcctga

SEQ ID NO: 7981 - DNA, 3102 bp, Artificial Sequence
  Synthetic Polynucloetide
atggccttaccagtgaccgccttgctcctgccgctggccttgctgctccacgccgccaggccgagctacgtgctgacacagcctccatccgtgtctgtggctccaggacagaccgccagaatcacatgcggcggcaacaacctcggcagcaagagcgtgcactggtatcagcagccacctggacaggctccagtggtggtggtgtacgacgacagcgatagacctagcggcatccccgagagattcagcggcagcaattccggcaataccgccacactgaccatcagcagagtggaagctggcgacgaggccgtgtactactgccaagtgtgggacagcagcagcgatcacgtggtgtttggcggcggaacaaagctgacagtgcttggacagcctaaggccaatcctaccgtgacactgttccctccaagcagcgaagaactccaggccaacaaggccacacttgtgtgcctgatctccgacttctaccctggggctgtgacagtggcttggaaggccgatggatctcctgtgaaagccggcgtggaaaccaccaagccatccaagcagagcaacaacaaatacgccgccagctcctacctgagcctgacacctgagcagtggaagtcccacagatcctacagctgccaagtgacccacgaaggcagcaccgtggaaaagacagtggcccctacagagtgcagcggatcccagagcttcggcctgctggaccccaagctgtgctacctgctggatggcatcctgttcatctacggcgtgatcctgaccgccctgttcctgagagtgaagttcagcagaagcgccgacgcccctgcctaccagcagggacagaaccaactgtacaacgagctgaacctgggcagacgggaagagtacgacgtgctggacaagcggagaggcagggaccctgagatgggcggaaagccccagcggagaaagaacccccaggaaggactgtataacgaactccagaaagacaagatggccgaagcctacagcgagatcggcatgaagggcgagcggagaagaggcaagggccacgatggcctgtaccagggcctgagcaccgccaccaaggacacctatgacgccctgcacatgcaggccctgcctccaagaagggccaagcgatctggatctggagcaacaaacttctcactactcaaacaagcaggtgacgtggaggagaatcccgggcctactagtatggactggatttggcgcatccttttccttgtcggcgctgctaccggcgcgcattccttcgaacaactccagctgcaagagtctggccctggcctggtcaagcctagcgaaacactgagcctgacctgtaccgtgtctggcggctctatcagctccggcagctatttctggggctggatcagacaacctcctggcaaaggactggaatggatcggctccatctactacagcggcatcacctactacaaccccagcctgaagtccagagtgaccatctccgtggacaccagcaagaaccagttctccctgaagctgagcagcgtgacagccgccgataccgccgtgtattattgtgccagacatgacggcgctgtggccggcctgtttgattattggggacagggcaccctggtcaccgtgtcatctgctgcctctacaaagggaccctccgtgtttcctctggctcccagcagcaagtctacaagcggaggaacagccgctctgggctgcctggtcaaggattactttcccgagcctgtgaccgtgtcctggaatagcggagcactgacaagcggcgtgcacacctttccagccgtgctgcaaagcagcggcctgtactctctgagcagcgtggtcacagtgcctagctctagcctgggcacccagacctacatctgcaatgtgaaccacaagcctagcaacaccaaggtggacaagagagtggaacccaagagctgtggtacccagagttttgggttgttggaccctaaattgtgctatctgttggacggaatcctgttcatttacggagtgatcctgaccgcattgttcctgcgggttaagttttccagatccgcagacgcacccgcttaccaacaagggcagaaccaactctacaatgaacttaatttggggcggagggaagagtacgacgttctggacaaaaggaggggacgagatcccgagatgggcggaaagcctcagcgaaggaagaatccgcaagaggggctttataacgaactccagaaagataaaatggcagaagcctatagtgagattgggatgaagggagaaaggaggaggggtaaaggtcacgatgggttgtaccaaggattgagcacagccactaaagatacctatgatgcgctccacatgcaggccctgccgccaagacgcgccaagagaagcggatctggcgtgaagcagaccctgaatttcgacctgctgaagctggctggcgacgtggaatccaacccaggcccttctagaggccatatgaccgagtacaagcccacggtgcgcctcgccacccgcgacgacgtccccagggccgtacgcaccctcgccgccgcgttcgccgactaccccgccacgcgccacaccgtcgatccggaccgccacatcgagcgggtcaccgagctgcaagaactcttcctcacgcgcgtcgggctcgacatcggcaaggtgtgggtcgcggacgacggcgccgcggtggcggtctggaccacgccggagagcgtcgaagcgggggcggtgttcgccgagatcggcccgcgcatggccgagttgagcggttcccggctggccgcgcagcaacagatggaaggcctcctggcgccgcaccggcccaaggagcccgcgtggttcctggccaccgtcggcgtctcgcccgaccaccagggcaagggtctgggcagcgccgtcgtgctccccggagtggaggcggccgagcgcgccggggtgcccgccttcctggagacctccgcgccccgcaacctccccttctacgagcggctcggcttcaccgtcaccgccgacgtcgaggtgcccgaaggaccgcgcacctggtgcatgacccgcaagcccggtgcctga

SEQ ID NO: 7982 - DNA, 2457 bp, Artificial Sequence
  Synthetic Polynucloetide
atggccttaccagtgaccgccttgctcctgccgctggccttgctgctccacgccgccaggccgagctacgtgctgacacagcctccatccgtgtctgtggctccaggacagaccgccagaatcacatgcggcggcaacaacctcggcagcaagagcgtgcactggtatcagcagccacctggacaggctccagtggtggtggtgtacgacgacagcgatagacctagcggcatccccgagagattcagcggcagcaattccggcaataccgccacactgaccatcagcagagtggaagctggcgacgaggccgtgtactactgccaagtgtgggacagcagcagcgatcacgtggtgtttggcggcggaacaaagctgacagtgcttctcgaggacctgaagaacgtgttcccacctgaggtggccgtgttcgagcctagcgaggccgagatcagccacacccagaaagccaccctcgtgtgcctggctaccggcttctaccccgaccatgtggaactgtcttggtgggtcaacggcaaagaggtgcacagcggcgtgtctaccgacccccagccactgaaagaacagcccgccctgaacgacagccggtactgcctgagcagcagactgagagtgtccgccaccttctggcagaacccccggaaccacttcagatgccaggtgcagttctacggcctgagcgagaacgacgagtggacccaggacagagccaagcccgtgacccagatcgtgtctgccgaagcctggggcagagccgattgcggatcccagagcttcggcctgctggaccccaagctgtgctacctgctggatggcatcctgttcatctacggcgtgatcctgaccgccctgttcctgagagtgaagttcagcagaagcgccgacgcccctgcctaccagcagggacagaaccaactgtacaacgagctgaacctgggcagacgggaagagtacgacgtgctggacaagcggagaggcagggaccctgagatgggcggaaagccccagcggagaaagaacccccaggaaggactgtataacgaactccagaaagacaagatggccgaagcctacagcgagatcggcatgaagggcgagcggagaagaggcaagggccacgatggcctgtaccagggcctgagcaccgccaccaaggacacctatgacgccctgcacatgcaggccctgcctccaagaagggccaagcgatctggatctggagcaacaaacttctcactactcaaacaagcaggtgacgtggaggagaatcccgggcctactagtatggactggatttggcgcatccttttccttgtcggcgctgctaccggcgcgcattccttcgaacaactccagctgcaagagtctggccctggcctggtcaagcctagcgaaacactgagcctgacctgtaccgtgtctggcggctctatcagctccggcagctatttctggggctggatcagacaacctcctggcaaaggactggaatggatcggctccatctactacagcggcatcacctactacaaccccagcctgaagtccagagtgaccatctccgtggacaccagcaagaaccagttctccctgaagctgagcagcgtgacagccgccgataccgccgtgtattattgtgccagacatgacggcgctgtggccggcctgtttgattattggggacagggcaccctggtcaccgtgtcatctgctacgcgtatccagaaccctgatcctgccgtgtaccagctgcgggatagcaagagcagcgacaagagcgtgtgtctgttcaccgacttcgacagccagaccaacgtgtcccagagcaaggactccgacgtgtacatcaccgataagaccgtgctggacatgcggagcatggacttcaagagcaactccgccgtggcctggtccaacaagtccgatttcgcctgcgccaacgccttcaacaacagcattatccccgaggacacattcttcccaagccccgagagcagctgcggtacccagagttttgggttgttggaccctaaattgtgctatctgttggacggaatcctgttcatttacggagtgatcctgaccgcattgttcctgcgggttaagttttccagatccgcagacgcacccgcttaccaacaagggcagaaccaactctacaatgaacttaatttggggcggagggaagagtacgacgttctggacaaaaggaggggacgagatcccgagatgggcggaaagcctcagcgaaggaagaatccgcaagaggggctttataacgaactccagaaagataaaatggcagaagcctatagtgagattgggatgaagggagaaaggaggaggggtaaaggtcacgatgggttgtaccaaggattgagcacagccactaaagatacctatgatgcgctccacatgcaggccctgccgccaaga

SEQ ID NO: 7983 - DNA, 2457 bp, Artificial Sequence
  Synthetic Polynucloetide
atggccttaccagtgaccgccttgctcctgccgctggccttgctgctccacgccgccaggccgagctacgtgctgacacagcctccatccgtgtctgtggctccaggacagaccgccagaatcacatgcggcggcaacaacctcggcagcaagagcgtgcactggtatcagcagccacctggacaggctccagtggtggtggtgtacgacgacagcgatagacctagcggcatccccgagagattcagcggcagcaattccggcaataccgccacactgaccatcagcagagtggaagctggcgacgaggccgtgtactactgccaagtgtgggacagcagcagcgatcacgtggtgtttggcggcggaacaaagctgacagtgcttctcgaggacctgaagaacgtgttcccacctgaggtggccgtgttcgagcctagcaaggccgagatcgcccacacccagaaagccaccctcgtgtgcctggctaccggcttctaccccgaccatgtggaactgtcttggtgggtcaacggcaaagaggtgcacagcggcgtgtgtaccgacccccagccactgaaagaacagcccgccctgaacgacagccggtactgcctgagcagcagactgagagtgtccgccaccttctggcagaacccccggaaccacttcagatgccaggtgcagttctacggcctgagcgagaacgacgagtggacccaggacagagccaagcccgtgacccagatcgtgtctgccgaagcctggggcagagccgattgcggatcccagagcttcggcctgctggaccccaagctgtgctacctgctggatggcatcctgttcatctacggcgtgatcctgaccgccctgttcctgagagtgaagttcagcagaagcgccgacgcccctgcctaccagcagggacagaaccaactgtacaacgagctgaacctgggcagacgggaagagtacgacgtgctggacaagcggagaggcagggaccctgagatgggcggaaagccccagcggagaaagaacccccaggaaggactgtataacgaactccagaaagacaagatggccgaagcctacagcgagatcggcatgaagggcgagcggagaagaggcaagggccacgatggcctgtaccagggcctgagcaccgccaccaaggacacctatgacgccctgcacatgcaggccctgcctccaagaagggccaagcgatctggatctggagcaacaaacttctcactactcaaacaagcaggtgacgtggaggagaatcccgggcctactagtatggactggatttggcgcatccttttccttgtcggcgctgctaccggcgcgcattccttcgaacaactccagctgcaagagtctggccctggcctggtcaagcctagcgaaacactgagcctgacctgtaccgtgtctggcggctctatcagctccggcagctatttctggggctggatcagacaacctcctggcaaaggactggaatggatcggctccatctactacagcggcatcacctactacaaccccagcctgaagtccagagtgaccatctccgtggacaccagcaagaaccagttctccctgaagctgagcagcgtgacagccgccgataccgccgtgtattattgtgccagacatgacggcgctgtggccggcctgtttgattattggggacagggcaccctggtcaccgtgtcatctgctacgcgtatccagaaccctgatcctgccgtgtaccagctgcgggatagcaagagcagcgacaagagcgtgtgtctgttcaccgacttcgacagccagaccaacgtgtcccagagcaaggactccgacgtgtacatcaccgataagtgcgtgctggacatgcggagcatggacttcaagagcaactccgccgtggcctggtccaacaagtccgatttcgcctgcgccaacgccttcaacaacagcattatccccgaggacacattcttcccaagcagcgacgtgccctgcggtacccagagttttgggttgttggaccctaaattgtgctatctgttggacggaatcctgttcatttacggagtgatcctgaccgcattgttcctgcgggttaagttttccagatccgcagacgcacccgcttaccaacaagggcagaaccaactctacaatgaacttaatttggggcggagggaagagtacgacgttctggacaaaaggaggggacgagatcccgagatgggcggaaagcctcagcgaaggaagaatccgcaagaggggctttataacgaactccagaaagataaaatggcagaagcctatagtgagattgggatgaagggagaaaggaggaggggtaaaggtcacgatgggttgtaccaaggattgagcacagccactaaagatacctatgatgcgctccacatgcaggccctgccgccaaga

SEQ ID NO: 7984 - DNA, 2670 bp, Artificial Sequence
  Synthetic Polynucloetide
atggccttaccagtgaccgccttgctcctgccgctggccttgctgctccacgccgccaggccgagctacgtgctgacacagcctccatccgtgtctgtggctccaggacagaccgccagaatcacatgcggcggcaacaacctcggcagcaagagcgtgcactggtatcagcagccacctggacaggctccagtggtggtggtgtacgacgacagcgatagacctagcggcatccccgagagattcagcggcagcaattccggcaataccgccacactgaccatcagcagagtggaagctggcgacgaggccgtgtactactgccaagtgtgggacagcagcagcgatcacgtggtgtttggcggcggaacaaagctgacagtgcttctcgaggggaaaccaattcccaaccctcttctgggactggattcaaccggcagcggcgaggacctgaagaacgtgttcccacctgaggtggccgtgttcgagcctagcgaggccgagatcagccacacccagaaagccaccctcgtgtgcctggctaccggcttctaccccgaccatgtggaactgtcttggtgggtcaacggcaaagaggtgcacagcggcgtgtctaccgacccccagccactgaaagaacagcccgccctgaacgacagccggtactgcctgagcagcagactgagagtgtccgccaccttctggcagaacccccggaaccacttcagatgccaggtgcagttctacggcctgagcgagaacgacgagtggacccaggacagagccaagcccgtgacccagatcgtgtctgccgaagcctggggcagagccgattgcggatcccagagcttcggcctgctggaccccaagctgtgctacctgctggatggcatcctgttcatctacggcgtgatcctgaccgccctgttcctgagagtgaagttcagcagaagcgccgacgcccctgcctaccagcagggacagaaccaactgtacaacgagctgaacctgggcagacgggaagagtacgacgtgctggacaagcggagaggcagggaccctgagatgggcggaaagccccagcggagaaagaacccccaggaaggactgtataacgaactccagaaagacaagatggccgaagcctacagcgagatcggcatgaagggcgagcggagaagaggcaagggccacgatggcctgtaccagggcctgagcaccgccaccaaggacacctatgacgccctgcacatgcaggccctgcctccaagaagggccaagcgatctggatctggagcaacaaacttctcactactcaaacaagcaggtgacgtggaggagaatcccgggcctactagtatggactggatttggcgcatccttttccttgtcggcgctgctaccggcgcgcattccttcgaacaactccagctgcaagagtctggccctggcctggtcaagcctagcgaaacactgagcctgacctgtaccgtgtctggcggctctatcagctccggcagctatttctggggctggatcagacaacctcctggcaaaggactggaatggatcggctccatctactacagcggcatcacctactacaaccccagcctgaagtccagagtgaccatctccgtggacaccagcaagaaccagttctccctgaagctgagcagcgtgacagccgccgataccgccgtgtattattgtgccagacatgacggcgctgtggccggcctgtttgattattggggacagggcaccctggtcaccgtgtcatctgctacgcgtgagcagaaactgatctcggaagaggatgggagcggcatccagaaccctgatcctgccgtgtaccagctgcgggatagcaagagcagcgacaagagcgtgtgtctgttcaccgacttcgacagccagaccaacgtgtcccagagcaaggactccgacgtgtacatcaccgataagaccgtgctggacatgcggagcatggacttcaagagcaactccgccgtggcctggtccaacaagtccgatttcgcctgcgccaacgccttcaacaacagcattatccccgaggacacattcttcccaagccccgagagcagctgcggtacccagagttttgggttgttggaccctaaattgtgctatctgttggacggaatcctgttcatttacggagtgatcctgaccgcattgttcctgaggagcaagcggtcacggctgctccacagcgattacatgaatatgacaccacgaagaccgggtcctactcgcaaacactaccaaccctacgcacctccccgcgactttgcagcgtaccgatctcgggttaagttttccagatccgcagacgcacccgcttaccaacaagggcagaaccaactctacaatgaacttaatttggggcggagggaagagtacgacgttctggacaaaaggaggggacgagatcccgagatgggcggaaagcctcagcgaaggaagaatccgcaagaggggctttataacgaactccagaaagataaaatggcagaagcctatagtgagattgggatgaagggagaaaggaggaggggtaaaggtcacgatgggttgtaccaaggattgagcacagccactaaagatacctatgatgcgctccacatgcaggccctgccgccaaga

SEQ ID NO: 7985 - DNA, 2793 bp, Artificial Sequence
  Synthetic Polynucloetide
atggccttaccagtgaccgccttgctcctgccgctggccttgctgctccacgccgccaggccgagctacgtgctgacacagcctccatccgtgtctgtggctccaggacagaccgccagaatcacatgcggcggcaacaacctcggcagcaagagcgtgcactggtatcagcagccacctggacaggctccagtggtggtggtgtacgacgacagcgatagacctagcggcatccccgagagattcagcggcagcaattccggcaataccgccacactgaccatcagcagagtggaagctggcgacgaggccgtgtactactgccaagtgtgggacagcagcagcgatcacgtggtgtttggcggcggaacaaagctgacagtgcttctcgaggggaaaccaattcccaaccctcttctgggactggattcaaccggcagcggcgaggacctgaagaacgtgttcccacctgaggtggccgtgttcgagcctagcgaggccgagatcagccacacccagaaagccaccctcgtgtgcctggctaccggcttctaccccgaccatgtggaactgtcttggtgggtcaacggcaaagaggtgcacagcggcgtgtctaccgacccccagccactgaaagaacagcccgccctgaacgacagccggtactgcctgagcagcagactgagagtgtccgccaccttctggcagaacccccggaaccacttcagatgccaggtgcagttctacggcctgagcgagaacgacgagtggacccaggacagagccaagcccgtgacccagatcgtgtctgccgaagcctggggcagagccgattgcggatcccagagcttcggcctgctggaccccaagctgtgctacctgctggatggcatcctgttcatctacggcgtgatcctgaccgccctgttcctgaggagtaagaggagcaggctcctgcacagtgactacatgaacatgactccacgccgccccggacccacccgcaagcattaccagccctatgccccaccacgcgacttcgcagcctatcgctccagagtgaagttcagcagaagcgccgacgcccctgcctaccagcagggacagaaccaactgtacaacgagctgaacctgggcagacgggaagagtacgacgtgctggacaagcggagaggcagggaccctgagatgggcggaaagccccagcggagaaagaacccccaggaaggactgtataacgaactccagaaagacaagatggccgaagcctacagcgagatcggcatgaagggcgagcggagaagaggcaagggccacgatggcctgtaccagggcctgagcaccgccaccaaggacacctatgacgccctgcacatgcaggccctgcctccaagaagggccaagcgatctggatctggagcaacaaacttctcactactcaaacaagcaggtgacgtggaggagaatcccgggcctactagtatggactggatttggcgcatccttttccttgtcggcgctgctaccggcgcgcattccttcgaacaactccagctgcaagagtctggccctggcctggtcaagcctagcgaaacactgagcctgacctgtaccgtgtctggcggctctatcagctccggcagctatttctggggctggatcagacaacctcctggcaaaggactggaatggatcggctccatctactacagcggcatcacctactacaaccccagcctgaagtccagagtgaccatctccgtggacaccagcaagaaccagttctccctgaagctgagcagcgtgacagccgccgataccgccgtgtattattgtgccagacatgacggcgctgtggccggcctgtttgattattggggacagggcaccctggtcaccgtgtcatctgctacgcgtgagcagaaactgatctcggaagaggatgggagcggcatccagaaccctgatcctgccgtgtaccagctgcgggatagcaagagcagcgacaagagcgtgtgtctgttcaccgacttcgacagccagaccaacgtgtcccagagcaaggactccgacgtgtacatcaccgataagaccgtgctggacatgcggagcatggacttcaagagcaactccgccgtggcctggtccaacaagtccgatttcgcctgcgccaacgccttcaacaacagcattatccccgaggacacattcttcccaagccccgagagcagctgcggtacccagagttttgggttgttggaccctaaattgtgctatctgttggacggaatcctgttcatttacggagtgatcctgaccgcattgttcctgaggagcaagcggtcacggctgctccacagcgattacatgaatatgacaccacgaagaccgggtcctactcgcaaacactaccaaccctacgcacctccccgcgactttgcagcgtaccgatctcgggttaagttttccagatccgcagacgcacccgcttaccaacaagggcagaaccaactctacaatgaacttaatttggggcggagggaagagtacgacgttctggacaaaaggaggggacgagatcccgagatgggcggaaagcctcagcgaaggaagaatccgcaagaggggctttataacgaactccagaaagataaaatggcagaagcctatagtgagattgggatgaagggagaaaggaggaggggtaaaggtcacgatgggttgtaccaaggattgagcacagccactaaagatacctatgatgcgctccacatgcaggccctgccgccaaga

SEQ ID NO: 7986 - DNA, 2676 bp, Artificial Sequence
  Synthetic Polynucloetide
atggccttaccagtgaccgccttgctcctgccgctggccttgctgctccacgccgccaggccgagctacgtgctgacacagcctccatccgtgtctgtggctccaggacagaccgccagaatcacatgcggcggcaacaacctcggcagcaagagcgtgcactggtatcagcagccacctggacaggctccagtggtggtggtgtacgacgacagcgatagacctagcggcatccccgagagattcagcggcagcaattccggcaataccgccacactgaccatcagcagagtggaagctggcgacgaggccgtgtactactgccaagtgtgggacagcagcagcgatcacgtggtgtttggcggcggaacaaagctgacagtgcttctcgaggggaaaccaattcccaaccctcttctgggactggattcaaccggcagcggcgaggacctgaagaacgtgttcccacctgaggtggccgtgttcgagcctagcgaggccgagatcagccacacccagaaagccaccctcgtgtgcctggctaccggcttctaccccgaccatgtggaactgtcttggtgggtcaacggcaaagaggtgcacagcggcgtgtctaccgacccccagccactgaaagaacagcccgccctgaacgacagccggtactgcctgagcagcagactgagagtgtccgccaccttctggcagaacccccggaaccacttcagatgccaggtgcagttctacggcctgagcgagaacgacgagtggacccaggacagagccaagcccgtgacccagatcgtgtctgccgaagcctggggcagagccgattgcggatcccagagcttcggcctgctggaccccaagctgtgctacctgctggatggcatcctgttcatctacggcgtgatcctgaccgccctgttcctgagagtgaagttcagcagaagcgccgacgcccctgcctaccagcagggacagaaccaactgtacaacgagctgaacctgggcagacgggaagagtacgacgtgctggacaagcggagaggcagggaccctgagatgggcggaaagccccagcggagaaagaacccccaggaaggactgtataacgaactccagaaagacaagatggccgaagcctacagcgagatcggcatgaagggcgagcggagaagaggcaagggccacgatggcctgtaccagggcctgagcaccgccaccaaggacacctatgacgccctgcacatgcaggccctgcctccaagaagggccaagcgatctggatctggagcaacaaacttctcactactcaaacaagcaggtgacgtggaggagaatcccgggcctactagtatggactggatttggcgcatccttttccttgtcggcgctgctaccggcgcgcattccttcgaacaactccagctgcaagagtctggccctggcctggtcaagcctagcgaaacactgagcctgacctgtaccgtgtctggcggctctatcagctccggcagctatttctggggctggatcagacaacctcctggcaaaggactggaatggatcggctccatctactacagcggcatcacctactacaaccccagcctgaagtccagagtgaccatctccgtggacaccagcaagaaccagttctccctgaagctgagcagcgtgacagccgccgataccgccgtgtattattgtgccagacatgacggcgctgtggccggcctgtttgattattggggacagggcaccctggtcaccgtgtcatctgctacgcgtgagcagaaactgatctcggaagaggatctggggagcggcatccagaaccctgatcctgccgtgtaccagctgcgggatagcaagagcagcgacaagagcgtgtgtctgttcaccgacttcgacagccagaccaacgtgtcccagagcaaggactccgacgtgtacatcaccgataagaccgtgctggacatgcggagcatggacttcaagagcaactccgccgtggcctggtccaacaagtccgatttcgcctgcgccaacgccttcaacaacagcattatccccgaggacacattcttcccaagccccgagagcagctgcggtacccagagttttgggttgttggaccctaaattgtgctatctgttggacggaatcctgttcatttacggagtgatcctgaccgcattgttcctgaagagaggccggaagaagctgctgtacatcttcaagcagcctttcatgcggcccgtgcagaccacccaggaagaggacggctgctcctgccggttccccgaggaagaagaaggcggctgcgagctgcgggttaagttttccagatccgcagacgcacccgcttaccaacaagggcagaaccaactctacaatgaacttaatttggggcggagggaagagtacgacgttctggacaaaaggaggggacgagatcccgagatgggcggaaagcctcagcgaaggaagaatccgcaagaggggctttataacgaactccagaaagataaaatggcagaagcctatagtgagattgggatgaagggagaaaggaggaggggtaaaggtcacgatgggttgtaccaaggattgagcacagccactaaagatacctatgatgcgctccacatgcaggccctgccgccaaga

SEQ ID NO: 7987 - DNA, 2802 bp, Artificial Sequence
  Synthetic Polynucloetide
atggccttaccagtgaccgccttgctcctgccgctggccttgctgctccacgccgccaggccgagctacgtgctgacacagcctccatccgtgtctgtggctccaggacagaccgccagaatcacatgcggcggcaacaacctcggcagcaagagcgtgcactggtatcagcagccacctggacaggctccagtggtggtggtgtacgacgacagcgatagacctagcggcatccccgagagattcagcggcagcaattccggcaataccgccacactgaccatcagcagagtggaagctggcgacgaggccgtgtactactgccaagtgtgggacagcagcagcgatcacgtggtgtttggcggcggaacaaagctgacagtgcttctcgaggggaaaccaattcccaaccctcttctgggactggattcaaccggcagcggcgaggacctgaagaacgtgttcccacctgaggtggccgtgttcgagcctagcgaggccgagatcagccacacccagaaagccaccctcgtgtgcctggctaccggcttctaccccgaccatgtggaactgtcttggtgggtcaacggcaaagaggtgcacagcggcgtgtctaccgacccccagccactgaaagaacagcccgccctgaacgacagccggtactgcctgagcagcagactgagagtgtccgccaccttctggcagaacccccggaaccacttcagatgccaggtgcagttctacggcctgagcgagaacgacgagtggacccaggacagagccaagcccgtgacccagatcgtgtctgccgaagcctggggcagagccgattgcggatcccagagcttcggcctgctggaccccaagctgtgctacctgctggatggcatcctgttcatctacggcgtgatcctgaccgccctgttcctgaaacggggcagaaagaaactcctgtatatattcaaacaaccatttatgagaccagtacaaactactcaagaggaagatggctgtagctgccgatttccagaagaagaagaaggaggatgtgaactgagagtgaagttcagcagaagcgccgacgcccctgcctaccagcagggacagaaccaactgtacaacgagctgaacctgggcagacgggaagagtacgacgtgctggacaagcggagaggcagggaccctgagatgggcggaaagccccagcggagaaagaacccccaggaaggactgtataacgaactccagaaagacaagatggccgaagcctacagcgagatcggcatgaagggcgagcggagaagaggcaagggccacgatggcctgtaccagggcctgagcaccgccaccaaggacacctatgacgccctgcacatgcaggccctgcctccaagaagggccaagcgatctggatctggagcaacaaacttctcactactcaaacaagcaggtgacgtggaggagaatcccgggcctactagtatggactggatttggcgcatccttttccttgtcggcgctgctaccggcgcgcattccttcgaacaactccagctgcaagagtctggccctggcctggtcaagcctagcgaaacactgagcctgacctgtaccgtgtctggcggctctatcagctccggcagctatttctggggctggatcagacaacctcctggcaaaggactggaatggatcggctccatctactacagcggcatcacctactacaaccccagcctgaagtccagagtgaccatctccgtggacaccagcaagaaccagttctccctgaagctgagcagcgtgacagccgccgataccgccgtgtattattgtgccagacatgacggcgctgtggccggcctgtttgattattggggacagggcaccctggtcaccgtgtcatctgctacgcgtgagcagaaactgatctcggaagaggatctggggagcggcatccagaaccctgatcctgccgtgtaccagctgcgggatagcaagagcagcgacaagagcgtgtgtctgttcaccgacttcgacagccagaccaacgtgtcccagagcaaggactccgacgtgtacatcaccgataagaccgtgctggacatgcggagcatggacttcaagagcaactccgccgtggcctggtccaacaagtccgatttcgcctgcgccaacgccttcaacaacagcattatccccgaggacacattcttcccaagccccgagagcagctgcggtacccagagttttgggttgttggaccctaaattgtgctatctgttggacggaatcctgttcatttacggagtgatcctgaccgcattgttcctgaagagaggccggaagaagctgctgtacatcttcaagcagcctttcatgcggcccgtgcagaccacccaggaagaggacggctgctcctgccggttccccgaggaagaagaaggcggctgcgagctgcgggttaagttttccagatccgcagacgcacccgcttaccaacaagggcagaaccaactctacaatgaacttaatttggggcggagggaagagtacgacgttctggacaaaaggaggggacgagatcccgagatgggcggaaagcctcagcgaaggaagaatccgcaagaggggctttataacgaactccagaaagataaaatggcagaagcctatagtgagattgggatgaagggagaaaggaggaggggtaaaggtcacgatgggttgtaccaaggattgagcacagccactaaagatacctatgatgcgctccacatgcaggccctgccgccaaga

SEQ ID NO: 7988 - DNA, 2475 bp, Artificial Sequence
  Synthetic Polynucloetide
atggccttaccagtgaccgccttgctcctgccgctggccttgctgctccacgccgccaggccgagctacgtgctgacacagcctccatccgtgtctgtggctccaggacagaccgccagaatcacatgcggcggcaacaacctcggcagcaagagcgtgcactggtatcagcagccacctggacaggctccagtggtggtggtgtacgacgacagcgatagacctagcggcatccccgagagattcagcggcagcaattccggcaataccgccacactgaccatcagcagagtggaagctggcgacgaggccgtgtactactgccaagtgtgggacagcagcagcgatcacgtggtgtttggcggcggaacaaagctgacagtgcttctcgagcagagcttcggcctgctggaccccaagctgtgctacctgctggatggcatcctgttcatctacggcgtgatcctgaccgccctgttcctgagagtgaagttcagcagaagcgccgacgcccctgcctaccagcagggacagaaccaactgtacaacgagctgaacctgggcagacgggaagagtacgacgtgctggacaagcggagaggcagggaccctgagatgggcggaaagccccagcggagaaagaacccccaggaaggactgtataacgaactccagaaagacaagatggccgaagcctacagcgagatcggcatgaagggcgagcggagaagaggcaagggccacgatggcctgtaccagggcctgagcaccgccaccaaggacacctatgacgccctgcacatgcaggccctgcctccaagaagggccaagcgatctggatctggagcaacaaacttctcactactcaaacaagcaggtgacgtggaggagaatcccgggcctactagtatggactggatttggcgcatccttttccttgtcggcgctgctaccggcgcgcattccttcgaacaactccagctgcaagagtctggccctggcctggtcaagcctagcgaaacactgagcctgacctgtaccgtgtctggcggctctatcagctccggcagctatttctggggctggatcagacaacctcctggcaaaggactggaatggatcggctccatctactacagcggcatcacctactacaaccccagcctgaagtccagagtgaccatctccgtggacaccagcaagaaccagttctccctgaagctgagcagcgtgacagccgccgataccgccgtgtattattgtgccagacatgacggcgctgtggccggcctgtttgattattggggacagggcaccctggtcaccgtgtcatctgctacgcgtcagagttttgggttgttggaccctaaattgtgctatctgttggacggaatcctgttcatttacggagtgatcctgaccgcattgttcctgcgggttaagttttccagatccgcagacgcacccgcttaccaacaagggcagaaccaactctacaatgaacttaatttggggcggagggaagagtacgacgttctggacaaaaggaggggacgagatcccgagatgggcggaaagcctcagcgaaggaagaatccgcaagaggggctttataacgaactccagaaagataaaatggcagaagcctatagtgagattgggatgaagggagaaaggaggaggggtaaaggtcacgatgggttgtaccaaggattgagcacagccactaaagatacctatgatgcgctccacatgcaggccctgccgccaagacgcgccaagagaagcggatctggcgtgaagcagaccctgaatttcgacctgctgaagctggctggcgacgtggaatccaacccaggcccttctagaggccatatgaccgagtacaagcccacggtgcgcctcgccacccgcgacgacgtccccagggccgtacgcaccctcgccgccgcgttcgccgactaccccgccacgcgccacaccgtcgatccggaccgccacatcgagcgggtcaccgagctgcaagaactcttcctcacgcgcgtcgggctcgacatcggcaaggtgtgggtcgcggacgacggcgccgcggtggcggtctggaccacgccggagagcgtcgaagcgggggcggtgttcgccgagatcggcccgcgcatggccgagttgagcggttcccggctggccgcgcagcaacagatggaaggcctcctggcgccgcaccggcccaaggagcccgcgtggttcctggccaccgtcggcgtctcgcccgaccaccagggcaagggtctgggcagcgccgtcgtgctccccggagtggaggcggccgagcgcgccggggtgcccgccttcctggagacctccgcgccccgcaacctccccttctacgagcggctcggcttcaccgtcaccgccgacgtcgaggtgcccgaaggaccgcgcacctggtgcatgacccgcaagcccggtgcctga

SEQ ID NO: 7989 - DNA, 1947 bp, Artificial Sequence
  Synthetic Polynucloetide
atggccttaccagtgaccgccttgctcctgccgctggccttgctgctccacgccgccaggccgagctacgtgctgacacagcctccatccgtgtctgtggctccaggacagaccgccagaatcacatgcggcggcaacaacctcggcagcaagagcgtgcactggtatcagcagccacctggacaggctccagtggtggtggtgtacgacgacagcgatagacctagcggcatccccgagagattcagcggcagcaattccggcaataccgccacactgaccatcagcagagtggaagctggcgacgaggccgtgtactactgccaagtgtgggacagcagcagcgatcacgtggtgtttggcggcggaacaaagctgacagtgcttctcgagggacagcctaaggccaatcctaccgtgacactgttccctccaagcagcgaagaactccaggccaacaaggccacacttgtgtgcctgatctccgacttctaccctggggctgtgacagtggcttggaaggccgatggatctcctgtgaaagccggcgtggaaaccaccaagccatccaagcagagcaacaacaaatacgccgccagctcctacctgagcctgacacctgagcagtggaagtcccacagatcctacagctgccaagtgacccacgaaggcagcaccgtggaaaagacagtggcccctacagagtgcagccccatcaagaccgatgtgattacaatggaccccaaggacaactgctccaaggacgccaacgataccctgctgctccagctgaccaacaccagcgcctactacatgtacttgttgctgctgctgaagtccgtggtgtacttcgccatcatcacatgctgcctgctgcggagaaccgccttctgctgcaacggcgagaagtctagggccaagcgatctggatctggagcaacaaacttctcactactcaaacaagcaggtgacgtggaggagaatcccgggcctactagtatggactggatttggcgcatccttttccttgtcggcgctgctaccggcgcgcattccttcgaacaactccagctgcaagagtctggccctggcctggtcaagcctagcgaaacactgagcctgacctgtaccgtgtctggcggctctatcagctccggcagctatttctggggctggatcagacaacctcctggcaaaggactggaatggatcggctccatctactacagcggcatcacctactacaaccccagcctgaagtccagagtgaccatctccgtggacaccagcaagaaccagttctccctgaagctgagcagcgtgacagccgccgataccgccgtgtattattgtgccagacatgacggcgctgtggccggcctgtttgattattggggacagggcaccctggtcaccgtgtcatctgctacgcgtgcctctacaaagggaccctccgtgtttcctctggctcccagcagcaagtctacaagcggaggaacagccgctctgggctgcctggtcaaggattactttcccgagcctgtgaccgtgtcctggaatagcggagcactgacaagcggcgtgcacacctttccagccgtgctgcaaagcagcggcctgtactctctgagcagcgtggtcacagtgcctagctctagcctgggcacccagacctacatctgcaatgtgaaccacaagcctagcaacaccaaggtggacaagagagtggaacccaagagctgtgaagtgaaaaccgactccaccgaccacgtgaagcccaaagagacagagaacaccaagcagcccagcaagagctgccacaagcccaaggccatcgtgcacaccgagaaagtgaacatgatgagcctgaccgtgctgggcctgcggatgctgttcgccaaaaccgtggccgtgaacttcctgctgaccgccaagctgttcttcctc

SEQ ID NO: 7990 - DNA, 1881 bp, Artificial Sequence
  Synthetic Polynucloetide
atggccttaccagtgaccgccttgctcctgccgctggccttgctgctccacgccgccaggccgagctacgtgctgacacagcctccatccgtgtctgtggctccaggacagaccgccagaatcacatgcggcggcaacaacctcggcagcaagagcgtgcactggtatcagcagccacctggacaggctccagtggtggtggtgtacgacgacagcgatagacctagcggcatccccgagagattcagcggcagcaattccggcaataccgccacactgaccatcagcagagtggaagctggcgacgaggccgtgtactactgccaagtgtgggacagcagcagcgatcacgtggtgtttggcggcggaacaaagctgacagtgcttctcgagggacagcctaaggccaatcctaccgtgacactgttccctccaagcagcgaagaactccaggccaacaaggccacacttgtgtgcctgatctccgacttctaccctggggctgtgacagtggcttggaaggccgatggatctcctgtgaaagccggcgtggaaaccaccaagccatccaagcagagcaacaacaaatacgccgccagctcctacctgagcctgacacctgagcagtggaagtcccacagatcctacagctgccaagtgacccacgaaggcagcaccgtggaaaagacagtggcccctacagagtgcagcggcagagccgattgcggcatcaccagcgccagctaccaccagggcgtgctgagcgccaccatcctgtacgagatcctgctgggcaaggccaccctgtacgccgtgctggtgtctgccctggtgctgatggctatggtcaagcggaaggacagccggggaagggccaagcgatctggatctggagcaacaaacttctcactactcaaacaagcaggtgacgtggaggagaatcccgggcctactagtatggactggatttggcgcatccttttccttgtcggcgctgctaccggcgcgcattccttcgaacaactccagctgcaagagtctggccctggcctggtcaagcctagcgaaacactgagcctgacctgtaccgtgtctggcggctctatcagctccggcagctatttctggggctggatcagacaacctcctggcaaaggactggaatggatcggctccatctactacagcggcatcacctactacaaccccagcctgaagtccagagtgaccatctccgtggacaccagcaagaaccagttctccctgaagctgagcagcgtgacagccgccgataccgccgtgtattattgtgccagacatgacggcgctgtggccggcctgtttgattattggggacagggcaccctggtcaccgtgtcatctgctacgcgtgcctctacaaagggaccctccgtgtttcctctggctcccagcagcaagtctacaagcggaggaacagccgctctgggctgcctggtcaaggattactttcccgagcctgtgaccgtgtcctggaatagcggagcactgacaagcggcgtgcacacctttccagccgtgctgcaaagcagcggcctgtactctctgagcagcgtggtcacagtgcctagctctagcctgggcacccagacctacatctgcaatgtgaaccacaagcctagcaacaccaaggtggacaagagagtggaacccaagagctgtatccccgaggacacattcttcccaagcagcgacgtgccctgcgacgtgaagctggtggaaaagagcttcgagacagacaccaacctgaacttccagaacctgagcgtgatcggcttcagaatcctgctgctgaaagtggccggctttaacctgctgatgaccctgcggctgtggtccagc

SEQ ID NO: 7991 - DNA, 1881 bp, Artificial Sequence
  Synthetic Polynucloetide
atggccttaccagtgaccgccttgctcctgccgctggccttgctgctccacgccgccaggccgagctacgtgctgacacagcctccatccgtgtctgtggctccaggacagaccgccagaatcacatgcggcggcaacaacctcggcagcaagagcgtgcactggtatcagcagccacctggacaggctccagtggtggtggtgtacgacgacagcgatagacctagcggcatccccgagagattcagcggcagcaattccggcaataccgccacactgaccatcagcagagtggaagctggcgacgaggccgtgtactactgccaagtgtgggacagcagcagcgatcacgtggtgtttggcggcggaacaaagctgacagtgcttctcgagggacagcctaaggccaatcctaccgtgacactgttccctccaagcagcgaagaactccaggccaacaaggccacacttgtgtgcctgatctccgacttctaccctggggctgtgacagtggcttggaaggccgatggatctcctgtgaaagccggcgtggaaaccaccaagccatccaagcagagcaacaacaaatacgccgccagctcctacctgagcctgacacctgagcagtggaagtcccacagatcctacagctgccaagtgacccacgaaggcagcaccgtggaaaagacagtggcccctacagagtgcagcggcagagccgattgcggctttaccagcgagagctaccagcagggcgtgctgagcgccaccatcctgtacgagatcctgctgggcaaggccaccctgtacgccgtgctggtgtctgccctggtgctgatggctatggtcaagcggaaggacagccggggaagggccaagcgatctggatctggagcaacaaacttctcactactcaaacaagcaggtgacgtggaggagaatcccgggcctactagtatggactggatttggcgcatccttttccttgtcggcgctgctaccggcgcgcattccttcgaacaactccagctgcaagagtctggccctggcctggtcaagcctagcgaaacactgagcctgacctgtaccgtgtctggcggctctatcagctccggcagctatttctggggctggatcagacaacctcctggcaaaggactggaatggatcggctccatctactacagcggcatcacctactacaaccccagcctgaagtccagagtgaccatctccgtggacaccagcaagaaccagttctccctgaagctgagcagcgtgacagccgccgataccgccgtgtattattgtgccagacatgacggcgctgtggccggcctgtttgattattggggacagggcaccctggtcaccgtgtcatctgctacgcgtgcctctacaaagggaccctccgtgtttcctctggctcccagcagcaagtctacaagcggaggaacagccgctctgggctgcctggtcaaggattactttcccgagcctgtgaccgtgtcctggaatagcggagcactgacaagcggcgtgcacacctttccagccgtgctgcaaagcagcggcctgtactctctgagcagcgtggtcacagtgcctagctctagcctgggcacccagacctacatctgcaatgtgaaccacaagcctagcaacaccaaggtggacaagagagtggaacccaagagctgtatccccgaggacacattcttcccaagccccgagagcagctgcgacgtgaagctggtggaaaagagcttcgagacagacaccaacctgaacttccagaacctgagcgtgatcggcttcagaatcctgctgctgaaagtggccggctttaacctgctgatgaccctgcggctgtggtccagc

SEQ ID NO: 7992 - DNA, 1359 bp, Artificial Sequence
  Synthetic Polynucloetide
atggccttaccagtgaccgccttgctcctgccgctggccttgctgctccacgccgccaggccgagctacgtgctgacacagcctccatccgtgtctgtggctccaggacagaccgccagaatcacatgcggcggcaacaacctcggcagcaagagcgtgcactggtatcagcagccacctggacaggctccagtggtggtggtgtacgacgacagcgatagacctagcggcatccccgagagattcagcggcagcaattccggcaataccgccacactgaccatcagcagagtggaagctggcgacgaggccgtgtactactgccaagtgtgggacagcagcagcgatcacgtggtgtttggcggcggaacaaagctgacagtgcttggcggaggcggaagtggaggcggaggatctggcggcggaggctctcaactccagctgcaagagtctggccctggcctggtcaagcctagcgaaacactgagcctgacctgtaccgtgtctggcggctctatcagctccggcagctatttctggggctggatcagacaacctcctggcaaaggactggaatggatcggctccatctactacagcggcatcacctactacaaccccagcctgaagtccagagtgaccatctccgtggacaccagcaagaaccagttctccctgaagctgagcagcgtgacagccgccgataccgccgtgtattattgtgccagacatgacggcgctgtggccggcctgtttgattattggggacagggcaccctggtcaccgtgtcatctgctacgcgtgacggtaacgaggagatgggaggaatcactcaaaccccttacaaagtctcaatttcaggaacaactgttatccttacatgtccccagtatcctggcagcgagatcctttggcagcataacgacaagaatatagggggagatgaagacgataagaatatcggatctgacgaggatcacttgagcctgaaagagttctccgagcttgaacaaagcggatattatgtgtgctatccgcgcgggtcaaagccggaagacgctaacttttacctttatctccgagccagagtgtgcgaaaattgcatggaaatggacgttatgtccgttgctacaatagttatcgtagatatatgcatcacgggtggactgcttctgctggtttattattggtccaagaatagaaaggccaaagctaaacccgtgaccagaggcgctggcgcaggcggaaggcaaaggggacaaaacaaagaacggccaccaccagtgccaaatccagattatgagcctattcggaaaggacagagggacctgtactctggcctgaatcagagaagaatc

SEQ ID NO: 7993 - DNA, 1254 bp, Artificial Sequence
  Synthetic Polynucloetide
atggccttaccagtgaccgccttgctcctgccgctggccttgctgctccacgccgccaggccgagctacgtgctgacacagcctccatccgtgtctgtggctccaggacagaccgccagaatcacatgcggcggcaacaacctcggcagcaagagcgtgcactggtatcagcagccacctggacaggctccagtggtggtggtgtacgacgacagcgatagacctagcggcatccccgagagattcagcggcagcaattccggcaataccgccacactgaccatcagcagagtggaagctggcgacgaggccgtgtactactgccaagtgtgggacagcagcagcgatcacgtggtgtttggcggcggaacaaagctgacagtgcttggcggaggcggaagtggaggcggaggatctggcggcggaggctctcaactccagctgcaagagtctggccctggcctggtcaagcctagcgaaacactgagcctgacctgtaccgtgtctggcggctctatcagctccggcagctatttctggggctggatcagacaacctcctggcaaaggactggaatggatcggctccatctactacagcggcatcacctactacaaccccagcctgaagtccagagtgaccatctccgtggacaccagcaagaaccagttctccctgaagctgagcagcgtgacagccgccgataccgccgtgtattattgtgccagacatgacggcgctgtggccggcctgtttgattattggggacagggcaccctggtcaccgtgtcatctgctacgcgtttcaagatccccatcgaggaactggaagatcgggtgttcgtgaactgcaacacctctatcacctgggtggaaggcaccgtgggaacactgctgagcgacatcaccagactggacctcggcaagcggattctggaccctcggggcatctacagatgcaacggcaccgacatctacaaggacaaagaaagcaccgtgcaggtccactacagaatgtgccagtcctgcgtggaactggaccctgctacagtggccggcatcatcgtgaccgatgtgatcgctactctgctgctggctctgggagtgttctgcttcgccggacacgaaacaggcagactgtctggcgctgccgatacacaggccctgctgagaaacgaccaagtgtatcagcccctgcgcgacagagatgatgcccagtattctcacctcggcggcaactgggctagaaacaag

SEQ ID NO: 7994 - DNA, 1284 bp, Artificial Sequence
  Synthetic Polynucloetide
atggccttaccagtgaccgccttgctcctgccgctggccttgctgctccacgccgccaggccgagctacgtgctgacacagcctccatccgtgtctgtggctccaggacagaccgccagaatcacatgcggcggcaacaacctcggcagcaagagcgtgcactggtatcagcagccacctggacaggctccagtggtggtggtgtacgacgacagcgatagacctagcggcatccccgagagattcagcggcagcaattccggcaataccgccacactgaccatcagcagagtggaagctggcgacgaggccgtgtactactgccaagtgtgggacagcagcagcgatcacgtggtgtttggcggcggaacaaagctgacagtgcttggcggaggcggaagtggaggcggaggatctggcggcggaggctctcaactccagctgcaagagtctggccctggcctggtcaagcctagcgaaacactgagcctgacctgtaccgtgtctggcggctctatcagctccggcagctatttctggggctggatcagacaacctcctggcaaaggactggaatggatcggctccatctactacagcggcatcacctactacaaccccagcctgaagtccagagtgaccatctccgtggacaccagcaagaaccagttctccctgaagctgagcagcgtgacagccgccgataccgccgtgtattattgtgccagacatgacggcgctgtggccggcctgtttgattattggggacagggcaccctggtcaccgtgtcatctgctacgcgtcagagcatcaagggcaaccacctggtcaaggtgtacgactaccaagaggacggcagcgtgctgctgacatgtgatgccgaggccaagaacatcacctggtttaaggacggcaagatgatcggcttcctgaccgaggacaagaagaagtggaacctgggcagcaacgctaaggaccccagaggcatgtatcagtgcaagggcagccagaacaagagcaagcccctccaggtgtactaccggatgtgccagaactgcatcgagctgaacgccgctaccatcagcggctttctgttcgccgagatcgtgtccatcttcgtgctggccgtgggcgtgtactttatcgctggacaggatggcgtgcggcagagcagagcttccgataagcaaaccctgctgcctaacgaccagctgtaccagcctctgaaggacagagaggacgaccagtacagccacctccagggcaatcagctgagaagaaac

SEQ ID NO: 7995 - DNA, 1233 bp, Artificial Sequence
  Synthetic Polynucloetide
atggccttaccagtgaccgccttgctcctgccgctggccttgctgctccacgccgccaggccgagctacgtgctgacacagcctccatccgtgtctgtggctccaggacagaccgccagaatcacatgcggcggcaacaacctcggcagcaagagcgtgcactggtatcagcagccacctggacaggctccagtggtggtggtgtacgacgacagcgatagacctagcggcatccccgagagattcagcggcagcaattccggcaataccgccacactgaccatcagcagagtggaagctggcgacgaggccgtgtactactgccaagtgtgggacagcagcagcgatcacgtggtgtttggcggcggaacaaagctgacagtgcttggcggaggcggaagtggaggcggaggatctggcggcggaggctctcaactccagctgcaagagtctggccctggcctggtcaagcctagcgaaacactgagcctgacctgtaccgtgtctggcggctctatcagctccggcagctatttctggggctggatcagacaacctcctggcaaaggactggaatggatcggctccatctactacagcggcatcacctactacaaccccagcctgaagtccagagtgaccatctccgtggacaccagcaagaaccagttctccctgaagctgagcagcgtgacagccgccgataccgccgtgtattattgtgccagacatgacggcgctgtggccggcctgtttgattattggggacagggcaccctggtcaccgtgtcatctgctacgcgtcagagttttgggttgttggaccctaaattgtgctatctgttggacggaatcctgttcatttacggagtgatcctgaccgcattgttcctgcgggttaagttttccagatccgcagacgcacccgcttaccaacaagggcagaaccaactctacaatgaacttaatttggggcggagggaagagtacgacgttctggacaaaaggaggggacgagatcccgagatgggcggaaagcctcagcgaaggaagaatccgcaagaggggctttataacgaactccagaaagataaaatggcagaagcctatagtgagattgggatgaagggagaaaggaggaggggtaaaggtcacgatgggttgtaccaaggattgagcacagccactaaagatacctatgatgcgctccacatgcaggccctgccgccaaga

SEQ ID NO: 7996 - DNA, 1359 bp, Artificial Sequence
  Synthetic Polynucloetide
atggccttaccagtgaccgccttgctcctgccgctggccttgctgctccacgccgccaggccgcaactccagctgcaagagtctggccctggcctggtcaagcctagcgaaacactgagcctgacctgtaccgtgtctggcggctctatcagctccggcagctatttctggggctggatcagacaacctcctggcaaaggactggaatggatcggctccatctactacagcggcatcacctactacaaccccagcctgaagtccagagtgaccatctccgtggacaccagcaagaaccagttctccctgaagctgagcagcgtgacagccgccgataccgccgtgtattattgtgccagacatgacggcgctgtggccggcctgtttgattattggggacagggcaccctggtcaccgtgtcatctgctggcggaggcggaagtggaggcggaggatctggcggcggaggctctagctacgtgctgacacagcctccatccgtgtctgtggctccaggacagaccgccagaatcacatgcggcggcaacaacctcggcagcaagagcgtgcactggtatcagcagccacctggacaggctccagtggtggtggtgtacgacgacagcgatagacctagcggcatccccgagagattcagcggcagcaattccggcaataccgccacactgaccatcagcagagtggaagctggcgacgaggccgtgtactactgccaagtgtgggacagcagcagcgatcacgtggtgtttggcggcggaacaaagctgacagtgcttacgcgtgacggtaacgaggagatgggaggaatcactcaaaccccttacaaagtctcaatttcaggaacaactgttatccttacatgtccccagtatcctggcagcgagatcctttggcagcataacgacaagaatatagggggagatgaagacgataagaatatcggatctgacgaggatcacttgagcctgaaagagttctccgagcttgaacaaagcggatattatgtgtgctatccgcgcgggtcaaagccggaagacgctaacttttacctttatctccgagccagagtgtgcgaaaattgcatggaaatggacgttatgtccgttgctacaatagttatcgtagatatatgcatcacgggtggactgcttctgctggtttattattggtccaagaatagaaaggccaaagctaaacccgtgaccagaggcgctggcgcaggcggaaggcaaaggggacaaaacaaagaacggccaccaccagtgccaaatccagattatgagcctattcggaaaggacagagggacctgtactctggcctgaatcagagaagaatc

SEQ ID NO: 7997 - DNA, 1254 bp, Artificial Sequence
  Synthetic Polynucloetide
atggccttaccagtgaccgccttgctcctgccgctggccttgctgctccacgccgccaggccgcaactccagctgcaagagtctggccctggcctggtcaagcctagcgaaacactgagcctgacctgtaccgtgtctggcggctctatcagctccggcagctatttctggggctggatcagacaacctcctggcaaaggactggaatggatcggctccatctactacagcggcatcacctactacaaccccagcctgaagtccagagtgaccatctccgtggacaccagcaagaaccagttctccctgaagctgagcagcgtgacagccgccgataccgccgtgtattattgtgccagacatgacggcgctgtggccggcctgtttgattattggggacagggcaccctggtcaccgtgtcatctgctggcggaggcggaagtggaggcggaggatctggcggcggaggctctagctacgtgctgacacagcctccatccgtgtctgtggctccaggacagaccgccagaatcacatgcggcggcaacaacctcggcagcaagagcgtgcactggtatcagcagccacctggacaggctccagtggtggtggtgtacgacgacagcgatagacctagcggcatccccgagagattcagcggcagcaattccggcaataccgccacactgaccatcagcagagtggaagctggcgacgaggccgtgtactactgccaagtgtgggacagcagcagcgatcacgtggtgtttggcggcggaacaaagctgacagtgcttacgcgtttcaagatccccatcgaggaactggaagatcgggtgttcgtgaactgcaacacctctatcacctgggtggaaggcaccgtgggaacactgctgagcgacatcaccagactggacctcggcaagcggattctggaccctcggggcatctacagatgcaacggcaccgacatctacaaggacaaagaaagcaccgtgcaggtccactacagaatgtgccagtcctgcgtggaactggaccctgctacagtggccggcatcatcgtgaccgatgtgatcgctactctgctgctggctctgggagtgttctgcttcgccggacacgaaacaggcagactgtctggcgctgccgatacacaggccctgctgagaaacgaccaagtgtatcagcccctgcgcgacagagatgatgcccagtattctcacctcggcggcaactgggctagaaacaag

SEQ ID NO: 7998 - DNA, 1284 bp, Artificial Sequence
  Synthetic Polynucloetide
atggccttaccagtgaccgccttgctcctgccgctggccttgctgctccacgccgccaggccgcaactccagctgcaagagtctggccctggcctggtcaagcctagcgaaacactgagcctgacctgtaccgtgtctggcggctctatcagctccggcagctatttctggggctggatcagacaacctcctggcaaaggactggaatggatcggctccatctactacagcggcatcacctactacaaccccagcctgaagtccagagtgaccatctccgtggacaccagcaagaaccagttctccctgaagctgagcagcgtgacagccgccgataccgccgtgtattattgtgccagacatgacggcgctgtggccggcctgtttgattattggggacagggcaccctggtcaccgtgtcatctgctggcggaggcggaagtggaggcggaggatctggcggcggaggctctagctacgtgctgacacagcctccatccgtgtctgtggctccaggacagaccgccagaatcacatgcggcggcaacaacctcggcagcaagagcgtgcactggtatcagcagccacctggacaggctccagtggtggtggtgtacgacgacagcgatagacctagcggcatccccgagagattcagcggcagcaattccggcaataccgccacactgaccatcagcagagtggaagctggcgacgaggccgtgtactactgccaagtgtgggacagcagcagcgatcacgtggtgtttggcggcggaacaaagctgacagtgcttacgcgtcagagcatcaagggcaaccacctggtcaaggtgtacgactaccaagaggacggcagcgtgctgctgacatgtgatgccgaggccaagaacatcacctggtttaaggacggcaagatgatcggcttcctgaccgaggacaagaagaagtggaacctgggcagcaacgctaaggaccccagaggcatgtatcagtgcaagggcagccagaacaagagcaagcccctccaggtgtactaccggatgtgccagaactgcatcgagctgaacgccgctaccatcagcggctttctgttcgccgagatcgtgtccatcttcgtgctggccgtgggcgtgtactttatcgctggacaggatggcgtgcggcagagcagagcttccgataagcaaaccctgctgcctaacgaccagctgtaccagcctctgaaggacagagaggacgaccagtacagccacctccagggcaatcagctgagaagaaac

SEQ ID NO: 7999 - DNA, 1233 bp, Artificial Sequence
  Synthetic Polynucloetide
atggccttaccagtgaccgccttgctcctgccgctggccttgctgctccacgccgccaggccgcaactccagctgcaagagtctggccctggcctggtcaagcctagcgaaacactgagcctgacctgtaccgtgtctggcggctctatcagctccggcagctatttctggggctggatcagacaacctcctggcaaaggactggaatggatcggctccatctactacagcggcatcacctactacaaccccagcctgaagtccagagtgaccatctccgtggacaccagcaagaaccagttctccctgaagctgagcagcgtgacagccgccgataccgccgtgtattattgtgccagacatgacggcgctgtggccggcctgtttgattattggggacagggcaccctggtcaccgtgtcatctgctggcggaggcggaagtggaggcggaggatctggcggcggaggctctagctacgtgctgacacagcctccatccgtgtctgtggctccaggacagaccgccagaatcacatgcggcggcaacaacctcggcagcaagagcgtgcactggtatcagcagccacctggacaggctccagtggtggtggtgtacgacgacagcgatagacctagcggcatccccgagagattcagcggcagcaattccggcaataccgccacactgaccatcagcagagtggaagctggcgacgaggccgtgtactactgccaagtgtgggacagcagcagcgatcacgtggtgtttggcggcggaacaaagctgacagtgcttacgcgtcagagttttgggttgttggaccctaaattgtgctatctgttggacggaatcctgttcatttacggagtgatcctgaccgcattgttcctgcgggttaagttttccagatccgcagacgcacccgcttaccaacaagggcagaaccaactctacaatgaacttaatttggggcggagggaagagtacgacgttctggacaaaaggaggggacgagatcccgagatgggcggaaagcctcagcgaaggaagaatccgcaagaggggctttataacgaactccagaaagataaaatggcagaagcctatagtgagattgggatgaagggagaaaggaggaggggtaaaggtcacgatgggttgtaccaaggattgagcacagccactaaagatacctatgatgcgctccacatgcaggccctgccgccaaga

SEQ ID NO: 8000 - DNA, 1935 bp, Artificial Sequence
  Synthetic Polynucloetide
atggccttaccagtgaccgccttgctcctgccgctggccttgctgctccacgccgccaggccgagctacgtgctgacacagcctccatccgtgtctgtggctccaggacagaccgccagaatcacatgcggcggcaacaacctcggcagcaagagcgtgcactggtatcagcagccacctggacaggctccagtggtggtggtgtacgacgacagcgatagacctagcggcatccccgagagattcagcggcagcaattccggcaataccgccacactgaccatcagcagagtggaagctggcgacgaggccgtgtactactgccaagtgtgggacagcagcagcgatcacgtggtgtttggcggcggaacaaagctgacagtgcttggcggaggcggaagtggaggcggaggatctggcggcggaggctctcaactccagctgcaagagtctggccctggcctggtcaagcctagcgaaacactgagcctgacctgtaccgtgtctggcggctctatcagctccggcagctatttctggggctggatcagacaacctcctggcaaaggactggaatggatcggctccatctactacagcggcatcacctactacaaccccagcctgaagtccagagtgaccatctccgtggacaccagcaagaaccagttctccctgaagctgagcagcgtgacagccgccgataccgccgtgtattattgtgccagacatgacggcgctgtggccggcctgtttgattattggggacagggcaccctggtcaccgtgtcatctgctacgcgtgggagcggcatccagaaccctgatcctgccgtgtaccagctgcgggatagcaagagcagcgacaagagcgtgtgtctgttcaccgacttcgacagccagaccaacgtgtcccagagcaaggactccgacgtgtacatcaccgataagaccgtgctggacatgcggagcatggacttcaagagcaactccgccgtggcctggtccaacaagtccgatttcgcctgcgccaacgccttcaacaacagcattatccccgaggacacattcttcccaagccccgagagcagctgcgacgtgaagctggtggaaaagagcttcgagacagacaccaacctgaacttccagaacctgagcgtgatcggcttcagaatcctgctgctgaaagtggccggctttaacctgctgatgaccctgcggctgtggtccagccgcgccaagagaagcggatctggcgtgaagcagaccctgaatttcgacctgctgaagctggctggcgacgtggaatccaacccaggcccttctagaggccatatgaccgagtacaagcccacggtgcgcctcgccacccgcgacgacgtccccagggccgtacgcaccctcgccgccgcgttcgccgactaccccgccacgcgccacaccgtcgatccggaccgccacatcgagcgggtcaccgagctgcaagaactcttcctcacgcgcgtcgggctcgacatcggcaaggtgtgggtcgcggacgacggcgccgcggtggcggtctggaccacgccggagagcgtcgaagcgggggcggtgttcgccgagatcggcccgcgcatggccgagttgagcggttcccggctggccgcgcagcaacagatggaaggcctcctggcgccgcaccggcccaaggagcccgcgtggttcctggccaccgtcggcgtctcgcccgaccaccagggcaagggtctgggcagcgccgtcgtgctccccggagtggaggcggccgagcgcgccggggtgcccgccttcctggagacctccgcgccccgcaacctccccttctacgagcggctcggcttcaccgtcaccgccgacgtcgaggtgcccgaaggaccgcgcacctggtgcatgacccgcaagcccggtgcctga

SEQ ID NO: 8001 - DNA, 2031 bp, Artificial Sequence
  Synthetic Polynucloetide
atggccttaccagtgaccgccttgctcctgccgctggccttgctgctccacgccgccaggccgagctacgtgctgacacagcctccatccgtgtctgtggctccaggacagaccgccagaatcacatgcggcggcaacaacctcggcagcaagagcgtgcactggtatcagcagccacctggacaggctccagtggtggtggtgtacgacgacagcgatagacctagcggcatccccgagagattcagcggcagcaattccggcaataccgccacactgaccatcagcagagtggaagctggcgacgaggccgtgtactactgccaagtgtgggacagcagcagcgatcacgtggtgtttggcggcggaacaaagctgacagtgcttggcggaggcggaagtggaggcggaggatctggcggcggaggctctcaactccagctgcaagagtctggccctggcctggtcaagcctagcgaaacactgagcctgacctgtaccgtgtctggcggctctatcagctccggcagctatttctggggctggatcagacaacctcctggcaaaggactggaatggatcggctccatctactacagcggcatcacctactacaaccccagcctgaagtccagagtgaccatctccgtggacaccagcaagaaccagttctccctgaagctgagcagcgtgacagccgccgataccgccgtgtattattgtgccagacatgacggcgctgtggccggcctgtttgattattggggacagggcaccctggtcaccgtgtcatctgctctcgaggacctgaagaacgtgttcccacctgaggtggccgtgttcgagcctagcgaggccgagatcagccacacccagaaagccaccctcgtgtgcctggctaccggcttctaccccgaccatgtggaactgtcttggtgggtcaacggcaaagaggtgcacagcggcgtgtctaccgacccccagccactgaaagaacagcccgccctgaacgacagccggtactgcctgagcagcagactgagagtgtccgccaccttctggcagaacccccggaaccacttcagatgccaggtgcagttctacggcctgagcgagaacgacgagtggacccaggacagagccaagcccgtgacccagatcgtgtctgccgaagcctggggcagagccgattgcggctttaccagcgagagctaccagcagggcgtgctgagcgccaccatcctgtacgagatcctgctgggcaaggccaccctgtacgccgtgctggtgtctgccctggtgctgatggctatggtcaagcggaaggacagccggggaagggccaagcgatctggatctggagcaacaaacttctcactactcaaacaagcaggtgacgtggaggagaatcccgggcctactagaggccatatgaccgagtacaagcccacggtgcgcctcgccacccgcgacgacgtccccagggccgtacgcaccctcgccgccgcgttcgccgactaccccgccacgcgccacaccgtcgatccggaccgccacatcgagcgggtcaccgagctgcaagaactcttcctcacgcgcgtcgggctcgacatcggcaaggtgtgggtcgcggacgacggcgccgcggtggcggtctggaccacgccggagagcgtcgaagcgggggcggtgttcgccgagatcggcccgcgcatggccgagttgagcggttcccggctggccgcgcagcaacagatggaaggcctcctggcgccgcaccggcccaaggagcccgcgtggttcctggccaccgtcggcgtctcgcccgaccaccagggcaagggtctgggcagcgccgtcgtgctccccggagtggaggcggccgagcgcgccggggtgcccgccttcctggagacctccgcgccccgcaacctccccttctacgagcggctcggcttcaccgtcaccgccgacgtcgaggtgcccgaaggaccgcgcacctggtgcatgacccgcaagcccggtgcctga

SEQ ID NO: 8002 - DNA, 2181 bp, Artificial Sequence
  Synthetic Polynucloetide
atggccttaccagtgaccgccttgctcctgccgctggccttgctgctccacgccgccaggccgagctacgtgctgacacagcctccatccgtgtctgtggctccaggacagaccgccagaatcacatgcggcggcaacaacctcggcagcaagagcgtgcactggtatcagcagccacctggacaggctccagtggtggtggtgtacgacgacagcgatagacctagcggcatccccgagagattcagcggcagcaattccggcaataccgccacactgaccatcagcagagtggaagctggcgacgaggccgtgtactactgccaagtgtgggacagcagcagcgatcacgtggtgtttggcggcggaacaaagctgacagtgcttggcggaggcggaagtggaggcggaggatctggcggcggaggctctcaactccagctgcaagagtctggccctggcctggtcaagcctagcgaaacactgagcctgacctgtaccgtgtctggcggctctatcagctccggcagctatttctggggctggatcagacaacctcctggcaaaggactggaatggatcggctccatctactacagcggcatcacctactacaaccccagcctgaagtccagagtgaccatctccgtggacaccagcaagaaccagttctccctgaagctgagcagcgtgacagccgccgataccgccgtgtattattgtgccagacatgacggcgctgtggccggcctgtttgattattggggacagggcaccctggtcaccgtgtcatctgctacgcgtgagcagaaactgatctcggaagaggatctggggagcggcaccccattcccttctctggcccctcccatcatgctgctggtggacggcaagcagcagatggtggtcgtgtgcctggtgctggatgtggccccacctggactggacagccccatctggtttagcgccggcaatggctctgccctggacgcctttacctacggcccaagccctgccaccgatggcacctggacaaatctggcccacctgagcctgcccagcgaggaactggcttcttgggagcctctcgtgtgccacacaggacctggcgctgagggacacagcagatccacccagcctatgcacctgtctggcgaggccagcaccgccagaacctgtcctcaggaacctctgagaggcacccctggcggagcactgtggctgggagtgctgagactgctgctgttcaagctgctgctgtttgacctgctgctgacctgctcctgtctgtgcgatcctgccggccctctgccttctcctgccaccaccacaagactgagagccctgggcagccacagactgcaccctgccacagagacaggcggcagagaggccacaagcagccctagaccccagcccagagacagaagatggggcgataccccccctggcagaaagcctggatctccagtccgcgccaagagaagcggatctggcgtgaagcagaccctgaatttcgacctgctgaagctggctggcgacgtggaatccaacccaggcccttctagatctagaggccatatgaccgagtacaagcccacggtgcgcctcgccacccgcgacgacgtccccagggccgtacgcaccctcgccgccgcgttcgccgactaccccgccacgcgccacaccgtcgatccggaccgccacatcgagcgggtcaccgagctgcaagaactcttcctcacgcgcgtcgggctcgacatcggcaaggtgtgggtcgcggacgacggcgccgcggtggcggtctggaccacgccggagagcgtcgaagcgggggcggtgttcgccgagatcggcccgcgcatggccgagttgagcggttcccggctggccgcgcagcaacagatggaaggcctcctggcgccgcaccggcccaaggagcccgcgtggttcctggccaccgtcggcgtctcgcccgaccaccagggcaagggtctgggcagcgccgtcgtgctccccggagtggaggcggccgagcgcgccggggtgcccgccttcctggagacctccgcgccccgcaacctccccttctacgagcggctcggcttcaccgtcaccgccgacgtcgaggtgcccgaaggaccgcgcacctggtgcatgacccgcaagcccggtgcctga

SEQ ID NO: 8003 - DNA, 1620 bp, Artificial Sequence
  Synthetic Polynucloetide
atggccttaccagtgaccgccttgctcctgccgctggccttgctgctccacgccgccaggccgagctacgtgctgacacagcctccatccgtgtctgtggctccaggacagaccgccagaatcacatgcggcggcaacaacctcggcagcaagagcgtgcactggtatcagcagccacctggacaggctccagtggtggtggtgtacgacgacagcgatagacctagcggcatccccgagagattcagcggcagcaattccggcaataccgccacactgaccatcagcagagtggaagctggcgacgaggccgtgtactactgccaagtgtgggacagcagcagcgatcacgtggtgtttggcggcggaacaaagctgacagtgcttctcgaggacctgaagaacgtgttcccacctgaggtggccgtgttcgagcctagcgaggccgagatcagccacacccagaaagccaccctcgtgtgcctggctaccggcttctaccccgaccatgtggaactgtcttggtgggtcaacggcaaagaggtgcacagcggcgtgtctaccgacccccagccactgaaagaacagcccgccctgaacgacagccggtactgcctgagcagcagactgagagtgtccgccaccttctggcagaacccccggaaccacttcagatgccaggtgcagttctacggcctgagcgagaacgacgagtggacccaggacagagccaagcccgtgacccagatcgtgtctgccgaagcctggggcagagccgattgcggctttaccagcgagagctaccagcagggcgtgctgagcgccaccatcctgtacgagatcctgctgggcaaggccaccctgtacgccgtgctggtgtctgccctggtgctgatggctatggtcaagcggaaggacagccggggaagggccaagcgatctggatctggagcaacaaacttctcactactcaaacaagcaggtgacgtggaggagaatcccgggcctactagaggccatatgaccgagtacaagcccacggtgcgcctcgccacccgcgacgacgtccccagggccgtacgcaccctcgccgccgcgttcgccgactaccccgccacgcgccacaccgtcgatccggaccgccacatcgagcgggtcaccgagctgcaagaactcttcctcacgcgcgtcgggctcgacatcggcaaggtgtgggtcgcggacgacggcgccgcggtggcggtctggaccacgccggagagcgtcgaagcgggggcggtgttcgccgagatcggcccgcgcatggccgagttgagcggttcccggctggccgcgcagcaacagatggaaggcctcctggcgccgcaccggcccaaggagcccgcgtggttcctggccaccgtcggcgtctcgcccgaccaccagggcaagggtctgggcagcgccgtcgtgctccccggagtggaggcggccgagcgcgccggggtgcccgccttcctggagacctccgcgccccgcaacctccccttctacgagcggctcggcttcaccgtcaccgccgacgtcgaggtgcccgaaggaccgcgcacctggtgcatgacccgcaagcccggtgcctga

SEQ ID NO: 8004 - DNA, 927 bp, Artificial Sequence
  Synthetic Polynucloetide
atggccttaccagtgaccgccttgctcctgccgctggccttgctgctccacgccgccaggccgagctacgtgctgacacagcctccatccgtgtctgtggctccaggacagaccgccagaatcacatgcggcggcaacaacctcggcagcaagagcgtgcactggtatcagcagccacctggacaggctccagtggtggtggtgtacgacgacagcgatagacctagcggcatccccgagagattcagcggcagcaattccggcaataccgccacactgaccatcagcagagtggaagctggcgacgaggccgtgtactactgccaagtgtgggacagcagcagcgatcacgtggtgtttggcggcggaacaaagctgacagtgcttctcgaggacctgaagaacgtgttcccacctgaggtggccgtgttcgagcctagcgaggccgagatcagccacacccagaaagccaccctcgtgtgcctggctaccggcttctaccccgaccatgtggaactgtcttggtgggtcaacggcaaagaggtgcacagcggcgtgtctaccgacccccagccactgaaagaacagcccgccctgaacgacagccggtactgcctgagcagcagactgagagtgtccgccaccttctggcagaacccccggaaccacttcagatgccaggtgcagttctacggcctgagcgagaacgacgagtggacccaggacagagccaagcccgtgacccagatcgtgtctgccgaagcctggggcagagccgattgcggctttaccagcgagagctaccagcagggcgtgctgagcgccaccatcctgtacgagatcctgctgggcaaggccaccctgtacgccgtgctggtgtctgccctggtgctgatggctatggtcaagcggaaggacagccgggga

SEQ ID NO: 8005 - DNA, 1356 bp, Artificial Sequence; identical to SEQ ID NO: 7936
  Synthetic Polynucloetide

SEQ ID NO: 8006 - DNA, 855 bp, Artificial Sequence; identical to SEQ ID NO: 7937
  Synthetic Polynucloetide

SEQ ID NO: 8007 - DNA, 1674 bp, Artificial Sequence
  Synthetic Polynucloetide
atggccttaccagtgaccgccttgctcctgccgctggccttgctgctccacgccgccaggccgagctacgtgctgacacagcctccatccgtgtctgtggctccaggacagaccgccagaatcacatgcggcggcaacaacctcggcagcaagagcgtgcactggtatcagcagccacctggacaggctccagtggtggtggtgtacgacgacagcgatagacctagcggcatccccgagagattcagcggcagcaattccggcaataccgccacactgaccatcagcagagtggaagctggcgacgaggccgtgtactactgccaagtgtgggacagcagcagcgatcacgtggtgtttggcggcggaacaaagctgacagtgcttctcgaggggaaaccaattcccaaccctcttctgggactggattcaaccggcagcggcgaggacctgaagaacgtgttcccacctgaggtggccgtgttcgagcctagcgaggccgagatcagccacacccagaaagccaccctcgtgtgcctggctaccggcttctaccccgaccatgtggaactgtcttggtgggtcaacggcaaagaggtgcacagcggcgtgtgtaccgacccccagccactgaaagaacagcccgccctgaacgacagccggtactgcctgagcagcagactgagagtgtccgccaccttctggcagaacccccggaaccacttcagatgccaggtgcagttctacggcctgagcgagaacgacgagtggacccaggacagagccaagcccgtgacccagatcgtgtctgccgaagcctggggcagagccgattgcggctttaccagcgagagctaccagcagggcgtgctgagcgccaccatcctgtacgagatcctgctgggcaaggccaccctgtacgccgtgctggtgtctgccctggtgctgatggctatggtcaagcggaaggacagccggggaagggccaagcgatctggatctggagcaacaaacttctcactactcaaacaagcaggtgacgtggaggagaatcccgggcctactagaggccatatgaccgagtacaagcccacggtgcgcctcgccacccgcgacgacgtccccagggccgtacgcaccctcgccgccgcgttcgccgactaccccgccacgcgccacaccgtcgatccggaccgccacatcgagcgggtcaccgagctgcaagaactcttcctcacgcgcgtcgggctcgacatcggcaaggtgtgggtcgcggacgacggcgccgcggtggcggtctggaccacgccggagagcgtcgaagcgggggcggtgttcgccgagatcggcccgcgcatggccgagttgagcggttcccggctggccgcgcagcaacagatggaaggcctcctggcgccgcaccggcccaaggagcccgcgtggttcctggccaccgtcggcgtctcgcccgaccaccagggcaagggtctgggcagcgccgtcgtgctccccggagtggaggcggccgagcgcgccggggtgcccgccttcctggagacctccgcgccccgcaacctccccttctacgagcggctcggcttcaccgtcaccgccgacgtcgaggtgcccgaaggaccgcgcacctggtgcatgacccgcaagcccggtgcctga

SEQ ID NO: 8008 - DNA, 984 bp, Artificial Sequence
  Synthetic Polynucloetide
atggccttaccagtgaccgccttgctcctgccgctggccttgctgctccacgccgccaggccgagctacgtgctgacacagcctccatccgtgtctgtggctccaggacagaccgccagaatcacatgcggcggcaacaacctcggcagcaagagcgtgcactggtatcagcagccacctggacaggctccagtggtggtggtgtacgacgacagcgatagacctagcggcatccccgagagattcagcggcagcaattccggcaataccgccacactgaccatcagcagagtggaagctggcgacgaggccgtgtactactgccaagtgtgggacagcagcagcgatcacgtggtgtttggcggcggaacaaagctgacagtgcttctcgaggggaaaccaattcccaaccctcttctgggactggattcaaccggcagcggcgaggacctgaagaacgtgttcccacctgaggtggccgtgttcgagcctagcgaggccgagatcagccacacccagaaagccaccctcgtgtgcctggctaccggcttctaccccgaccatgtggaactgtcttggtgggtcaacggcaaagaggtgcacagcggcgtgtgtaccgacccccagccactgaaagaacagcccgccctgaacgacagccggtactgcctgagcagcagactgagagtgtccgccaccttctggcagaacccccggaaccacttcagatgccaggtgcagttctacggcctgagcgagaacgacgagtggacccaggacagagccaagcccgtgacccagatcgtgtctgccgaagcctggggcagagccgattgcggctttaccagcgagagctaccagcagggcgtgctgagcgccaccatcctgtacgagatcctgctgggcaaggccaccctgtacgccgtgctggtgtctgccctggtgctgatggctatggtcaagcggaaggacagccggggatga

SEQ ID NO: 8009 - DNA, 1392 bp, Artificial Sequence; identical to SEQ ID NO: 7940
  Synthetic Polynucloetide

SEQ ID NO: 8010 - DNA, 894 bp, Artificial Sequence; identical to SEQ ID NO: 7941
  Synthetic Polynucloetide

SEQ ID NO: 8011 - DNA, 1935 bp, Artificial Sequence
  Synthetic Polynucloetide
atggccttaccagtgaccgccttgctcctgccgctggccttgctgctccacgccgccaggccgagctacgtgctgacacagcctccatccgtgtctgtggctccaggacagaccgccagaatcacatgcggcggcaacaacctcggcagcaagagcgtgcactggtatcagcagccacctggacaggctccagtggtggtggtgtacgacgacagcgatagacctagcggcatccccgagagattcagcggcagcaattccggcaataccgccacactgaccatcagcagagtggaagctggcgacgaggccgtgtactactgccaagtgtgggacagcagcagcgatcacgtggtgtttggcggcggaacaaagctgacagtgcttggcggaggcggaagtggaggcggaggatctggcggcggaggctctcaactccagctgcaagagtctggccctggcctggtcaagcctagcgaaacactgagcctgacctgtaccgtgtctggcggctctatcagctccggcagctatttctggggctggatcagacaacctcctggcaaaggactggaatggatcggctccatctactacagcggcatcacctactacaaccccagcctgaagtccagagtgaccatctccgtggacaccagcaagaaccagttctccctgaagctgagcagcgtgacagccgccgataccgccgtgtattattgtgccagacatgacggcgctgtggccggcctgtttgattattggggacagggcaccctggtcaccgtgtcatctgctacgcgtgggagcggcatccagaaccctgatcctgccgtgtaccagctgcgggatagcaagagcagcgacaagagcgtgtgtctgttcaccgacttcgacagccagaccaacgtgtcccagagcaaggactccgacgtgtacatcaccgataagaccgtgctggacatgcggagcatggacttcaagagcaactccgccgtggcctggtccaacaagtccgatttcgcctgcgccaacgccttcaacaacagcattatccccgaggacacattcttcccaagcagcgacgtgccctgcgacgtgaagctggtggaaaagagcttcgagacagacaccaacctgaacttccagaacctgagcgtgatcggcttcagaatcctgctgctgaaagtggccggctttaacctgctgatgaccctgcggctgtggtccagccgcgccaagagaagcggatctggcgtgaagcagaccctgaatttcgacctgctgaagctggctggcgacgtggaatccaacccaggcccttctagaggccatatgaccgagtacaagcccacggtgcgcctcgccacccgcgacgacgtccccagggccgtacgcaccctcgccgccgcgttcgccgactaccccgccacgcgccacaccgtcgatccggaccgccacatcgagcgggtcaccgagctgcaagaactcttcctcacgcgcgtcgggctcgacatcggcaaggtgtgggtcgcggacgacggcgccgcggtggcggtctggaccacgccggagagcgtcgaagcgggggcggtgttcgccgagatcggcccgcgcatggccgagttgagcggttcccggctggccgcgcagcaacagatggaaggcctcctggcgccgcaccggcccaaggagcccgcgtggttcctggccaccgtcggcgtctcgcccgaccaccagggcaagggtctgggcagcgccgtcgtgctccccggagtggaggcggccgagcgcgccggggtgcccgccttcctggagacctccgcgccccgcaacctccccttctacgagcggctcggcttcaccgtcaccgccgacgtcgaggtgcccgaaggaccgcgcacctggtgcatgacccgcaagcccggtgcctga

SEQ ID NO: 8012 - DNA, 2031 bp, Artificial Sequence
  Synthetic Polynucloetide
atggccttaccagtgaccgccttgctcctgccgctggccttgctgctccacgccgccaggccgagctacgtgctgacacagcctccatccgtgtctgtggctccaggacagaccgccagaatcacatgcggcggcaacaacctcggcagcaagagcgtgcactggtatcagcagccacctggacaggctccagtggtggtggtgtacgacgacagcgatagacctagcggcatccccgagagattcagcggcagcaattccggcaataccgccacactgaccatcagcagagtggaagctggcgacgaggccgtgtactactgccaagtgtgggacagcagcagcgatcacgtggtgtttggcggcggaacaaagctgacagtgcttggcggaggcggaagtggaggcggaggatctggcggcggaggctctcaactccagctgcaagagtctggccctggcctggtcaagcctagcgaaacactgagcctgacctgtaccgtgtctggcggctctatcagctccggcagctatttctggggctggatcagacaacctcctggcaaaggactggaatggatcggctccatctactacagcggcatcacctactacaaccccagcctgaagtccagagtgaccatctccgtggacaccagcaagaaccagttctccctgaagctgagcagcgtgacagccgccgataccgccgtgtattattgtgccagacatgacggcgctgtggccggcctgtttgattattggggacagggcaccctggtcaccgtgtcatctgctctcgaggacctgaagaacgtgttcccacctgaggtggccgtgttcgagcctagcaaggccgagatcgcccacacccagaaagccaccctcgtgtgcctggctaccggcttctaccccgaccatgtggaactgtcttggtgggtcaacggcaaagaggtgcacagcggcgtgtctaccgacccccagccactgaaagaacagcccgccctgaacgacagccggtactgcctgagcagcagactgagagtgtccgccaccttctggcagaacccccggaaccacttcagatgccaggtgcagttctacggcctgagcgagaacgacgagtggacccaggacagagccaagcccgtgacccagatcgtgtctgccgaagcctggggcagagccgattgcggcatcaccagcgccagctaccaccagggcgtgctgagcgccaccatcctgtacgagatcctgctgggcaaggccaccctgtacgccgtgctggtgtctgccctggtgctgatggctatggtcaagcggaaggacagccggggaagggccaagcgatctggatctggagcaacaaacttctcactactcaaacaagcaggtgacgtggaggagaatcccgggcctactagaggccatatgaccgagtacaagcccacggtgcgcctcgccacccgcgacgacgtccccagggccgtacgcaccctcgccgccgcgttcgccgactaccccgccacgcgccacaccgtcgatccggaccgccacatcgagcgggtcaccgagctgcaagaactcttcctcacgcgcgtcgggctcgacatcggcaaggtgtgggtcgcggacgacggcgccgcggtggcggtctggaccacgccggagagcgtcgaagcgggggcggtgttcgccgagatcggcccgcgcatggccgagttgagcggttcccggctggccgcgcagcaacagatggaaggcctcctggcgccgcaccggcccaaggagcccgcgtggttcctggccaccgtcggcgtctcgcccgaccaccagggcaagggtctgggcagcgccgtcgtgctccccggagtggaggcggccgagcgcgccggggtgcccgccttcctggagacctccgcgccccgcaacctccccttctacgagcggctcggcttcaccgtcaccgccgacgtcgaggtgcccgaaggaccgcgcacctggtgcatgacccgcaagcccggtgcctga

SEQ ID NO: 8013 - DNA, 2100 bp, Artificial Sequence
  Synthetic Polynucloetide
atggccttaccagtgaccgccttgctcctgccgctggccttgctgctccacgccgccaggccgagctacgtgctgacacagcctccatccgtgtctgtggctccaggacagaccgccagaatcacatgcggcggcaacaacctcggcagcaagagcgtgcactggtatcagcagccacctggacaggctccagtggtggtggtgtacgacgacagcgatagacctagcggcatccccgagagattcagcggcagcaattccggcaataccgccacactgaccatcagcagagtggaagctggcgacgaggccgtgtactactgccaagtgtgggacagcagcagcgatcacgtggtgtttggcggcggaacaaagctgacagtgcttggcggaggcggaagtggaggcggaggatctggcggcggaggctctcaactccagctgcaagagtctggccctggcctggtcaagcctagcgaaacactgagcctgacctgtaccgtgtctggcggctctatcagctccggcagctatttctggggctggatcagacaacctcctggcaaaggactggaatggatcggctccatctactacagcggcatcacctactacaaccccagcctgaagtccagagtgaccatctccgtggacaccagcaagaaccagttctccctgaagctgagcagcgtgacagccgccgataccgccgtgtattattgtgccagacatgacggcgctgtggccggcctgtttgattattggggacagggcaccctggtcaccgtgtcatctgctacgcgtgggtctggaggcggaggcagcggcggaggcgggagcggcgacggtaacgaggagatgggaggaatcactcaaaccccttacaaagtctcaatttcaggaacaactgttatccttacatgtccccagtatcctggcagcgagatcctttggcagcataacgacaagaatatagggggagatgaagacgataagaatatcggatctgacgaggatcacttgagcctgaaagagttctccgagcttgaacaaagcggatattatgtgtgctatccgcgcgggtcaaagccggaagacgctaacttttacctttatctccgagccagagtgtgcgaaaattgcatggaaatggacgttatgtccgttgctacaatagttatcgtagatatatgcatcacgggtggactgcttctgctggtttattattggtccaagaatagaaaggccaaagctaaacccgtgaccagaggcgctggcgcaggcggaaggcaaaggggacaaaacaaagaacggccaccaccagtgccaaatccagattatgagcctattcggaaaggacagagggacctgtactctggcctgaatcagagaagaatccgcgccaagagaagcggatctggcgtgaagcagaccctgaatttcgacctgctgaagctggctggcgacgtggaatccaacccaggcccttctagaggccatatgaccgagtacaagcccacggtgcgcctcgccacccgcgacgacgtccccagggccgtacgcaccctcgccgccgcgttcgccgactaccccgccacgcgccacaccgtcgatccggaccgccacatcgagcgggtcaccgagctgcaagaactcttcctcacgcgcgtcgggctcgacatcggcaaggtgtgggtcgcggacgacggcgccgcggtggcggtctggaccacgccggagagcgtcgaagcgggggcggtgttcgccgagatcggcccgcgcatggccgagttgagcggttcccggctggccgcgcagcaacagatggaaggcctcctggcgccgcaccggcccaaggagcccgcgtggttcctggccaccgtcggcgtctcgcccgaccaccagggcaagggtctgggcagcgccgtcgtgctccccggagtggaggcggccgagcgcgccggggtgcccgccttcctggagacctccgcgccccgcaacctccccttctacgagcggctcggcttcaccgtcaccgccgacgtcgaggtgcccgaaggaccgcgcacctggtgcatgacccgcaagcccggtgcctga

SEQ ID NO: 8014 - DNA, 1995 bp, Artificial Sequence
  Synthetic Polynucloetide
atggccttaccagtgaccgccttgctcctgccgctggccttgctgctccacgccgccaggccgagctacgtgctgacacagcctccatccgtgtctgtggctccaggacagaccgccagaatcacatgcggcggcaacaacctcggcagcaagagcgtgcactggtatcagcagccacctggacaggctccagtggtggtggtgtacgacgacagcgatagacctagcggcatccccgagagattcagcggcagcaattccggcaataccgccacactgaccatcagcagagtggaagctggcgacgaggccgtgtactactgccaagtgtgggacagcagcagcgatcacgtggtgtttggcggcggaacaaagctgacagtgcttggcggaggcggaagtggaggcggaggatctggcggcggaggctctcaactccagctgcaagagtctggccctggcctggtcaagcctagcgaaacactgagcctgacctgtaccgtgtctggcggctctatcagctccggcagctatttctggggctggatcagacaacctcctggcaaaggactggaatggatcggctccatctactacagcggcatcacctactacaaccccagcctgaagtccagagtgaccatctccgtggacaccagcaagaaccagttctccctgaagctgagcagcgtgacagccgccgataccgccgtgtattattgtgccagacatgacggcgctgtggccggcctgtttgattattggggacagggcaccctggtcaccgtgtcatctgctacgcgtgggtctggaggcggaggcagcggcggaggcgggagcggcttcaagatccccatcgaggaactggaagatcgggtgttcgtgaactgcaacacctctatcacctgggtggaaggcaccgtgggaacactgctgagcgacatcaccagactggacctcggcaagcggattctggaccctcggggcatctacagatgcaacggcaccgacatctacaaggacaaagaaagcaccgtgcaggtccactacagaatgtgccagtcctgcgtggaactggaccctgctacagtggccggcatcatcgtgaccgatgtgatcgctactctgctgctggctctgggagtgttctgcttcgccggacacgaaacaggcagactgtctggcgctgccgatacacaggccctgctgagaaacgaccaagtgtatcagcccctgcgcgacagagatgatgcccagtattctcacctcggcggcaactgggctagaaacaagcgcgccaagagaagcggatctggcgtgaagcagaccctgaatttcgacctgctgaagctggctggcgacgtggaatccaacccaggcccttctagaggccatatgaccgagtacaagcccacggtgcgcctcgccacccgcgacgacgtccccagggccgtacgcaccctcgccgccgcgttcgccgactaccccgccacgcgccacaccgtcgatccggaccgccacatcgagcgggtcaccgagctgcaagaactcttcctcacgcgcgtcgggctcgacatcggcaaggtgtgggtcgcggacgacggcgccgcggtggcggtctggaccacgccggagagcgtcgaagcgggggcggtgttcgccgagatcggcccgcgcatggccgagttgagcggttcccggctggccgcgcagcaacagatggaaggcctcctggcgccgcaccggcccaaggagcccgcgtggttcctggccaccgtcggcgtctcgcccgaccaccagggcaagggtctgggcagcgccgtcgtgctccccggagtggaggcggccgagcgcgccggggtgcccgccttcctggagacctccgcgccccgcaacctccccttctacgagcggctcggcttcaccgtcaccgccgacgtcgaggtgcccgaaggaccgcgcacctggtgcatgacccgcaagcccggtgcctga

SEQ ID NO: 8015 - DNA, 2025 bp, Artificial Sequence
  Synthetic Polynucloetide
atggccttaccagtgaccgccttgctcctgccgctggccttgctgctccacgccgccaggccgagctacgtgctgacacagcctccatccgtgtctgtggctccaggacagaccgccagaatcacatgcggcggcaacaacctcggcagcaagagcgtgcactggtatcagcagccacctggacaggctccagtggtggtggtgtacgacgacagcgatagacctagcggcatccccgagagattcagcggcagcaattccggcaataccgccacactgaccatcagcagagtggaagctggcgacgaggccgtgtactactgccaagtgtgggacagcagcagcgatcacgtggtgtttggcggcggaacaaagctgacagtgcttggcggaggcggaagtggaggcggaggatctggcggcggaggctctcaactccagctgcaagagtctggccctggcctggtcaagcctagcgaaacactgagcctgacctgtaccgtgtctggcggctctatcagctccggcagctatttctggggctggatcagacaacctcctggcaaaggactggaatggatcggctccatctactacagcggcatcacctactacaaccccagcctgaagtccagagtgaccatctccgtggacaccagcaagaaccagttctccctgaagctgagcagcgtgacagccgccgataccgccgtgtattattgtgccagacatgacggcgctgtggccggcctgtttgattattggggacagggcaccctggtcaccgtgtcatctgctacgcgtgggtctggaggcggaggcagcggcggaggcgggagcggccagagcatcaagggcaaccacctggtcaaggtgtacgactaccaagaggacggcagcgtgctgctgacatgtgatgccgaggccaagaacatcacctggtttaaggacggcaagatgatcggcttcctgaccgaggacaagaagaagtggaacctgggcagcaacgctaaggaccccagaggcatgtatcagtgcaagggcagccagaacaagagcaagcccctccaggtgtactaccggatgtgccagaactgcatcgagctgaacgccgctaccatcagcggctttctgttcgccgagatcgtgtccatcttcgtgctggccgtgggcgtgtactttatcgctggacaggatggcgtgcggcagagcagagcttccgataagcaaaccctgctgcctaacgaccagctgtaccagcctctgaaggacagagaggacgaccagtacagccacctccagggcaatcagctgagaagaaaccgcgccaagagaagcggatctggcgtgaagcagaccctgaatttcgacctgctgaagctggctggcgacgtggaatccaacccaggcccttctagaggccatatgaccgagtacaagcccacggtgcgcctcgccacccgcgacgacgtccccagggccgtacgcaccctcgccgccgcgttcgccgactaccccgccacgcgccacaccgtcgatccggaccgccacatcgagcgggtcaccgagctgcaagaactcttcctcacgcgcgtcgggctcgacatcggcaaggtgtgggtcgcggacgacggcgccgcggtggcggtctggaccacgccggagagcgtcgaagcgggggcggtgttcgccgagatcggcccgcgcatggccgagttgagcggttcccggctggccgcgcagcaacagatggaaggcctcctggcgccgcaccggcccaaggagcccgcgtggttcctggccaccgtcggcgtctcgcccgaccaccagggcaagggtctgggcagcgccgtcgtgctccccggagtggaggcggccgagcgcgccggggtgcccgccttcctggagacctccgcgccccgcaacctccccttctacgagcggctcggcttcaccgtcaccgccgacgtcgaggtgcccgaaggaccgcgcacctggtgcatgacccgcaagcccggtgcctga

SEQ ID NO: 8016 - DNA, 1974 bp, Artificial Sequence
  Synthetic Polynucloetide
atggccttaccagtgaccgccttgctcctgccgctggccttgctgctccacgccgccaggccgagctacgtgctgacacagcctccatccgtgtctgtggctccaggacagaccgccagaatcacatgcggcggcaacaacctcggcagcaagagcgtgcactggtatcagcagccacctggacaggctccagtggtggtggtgtacgacgacagcgatagacctagcggcatccccgagagattcagcggcagcaattccggcaataccgccacactgaccatcagcagagtggaagctggcgacgaggccgtgtactactgccaagtgtgggacagcagcagcgatcacgtggtgtttggcggcggaacaaagctgacagtgcttggcggaggcggaagtggaggcggaggatctggcggcggaggctctcaactccagctgcaagagtctggccctggcctggtcaagcctagcgaaacactgagcctgacctgtaccgtgtctggcggctctatcagctccggcagctatttctggggctggatcagacaacctcctggcaaaggactggaatggatcggctccatctactacagcggcatcacctactacaaccccagcctgaagtccagagtgaccatctccgtggacaccagcaagaaccagttctccctgaagctgagcagcgtgacagccgccgataccgccgtgtattattgtgccagacatgacggcgctgtggccggcctgtttgattattggggacagggcaccctggtcaccgtgtcatctgctacgcgtgggtctggaggcggaggcagcggcggaggcgggagcggccagagttttgggttgttggaccctaaattgtgctatctgttggacggaatcctgttcatttacggagtgatcctgaccgcattgttcctgcgggttaagttttccagatccgcagacgcacccgcttaccaacaagggcagaaccaactctacaatgaacttaatttggggcggagggaagagtacgacgttctggacaaaaggaggggacgagatcccgagatgggcggaaagcctcagcgaaggaagaatccgcaagaggggctttataacgaactccagaaagataaaatggcagaagcctatagtgagattgggatgaagggagaaaggaggaggggtaaaggtcacgatgggttgtaccaaggattgagcacagccactaaagatacctatgatgcgctccacatgcaggccctgccgccaagacgcgccaagagaagcggatctggcgtgaagcagaccctgaatttcgacctgctgaagctggctggcgacgtggaatccaacccaggcccttctagaggccatatgaccgagtacaagcccacggtgcgcctcgccacccgcgacgacgtccccagggccgtacgcaccctcgccgccgcgttcgccgactaccccgccacgcgccacaccgtcgatccggaccgccacatcgagcgggtcaccgagctgcaagaactcttcctcacgcgcgtcgggctcgacatcggcaaggtgtgggtcgcggacgacggcgccgcggtggcggtctggaccacgccggagagcgtcgaagcgggggcggtgttcgccgagatcggcccgcgcatggccgagttgagcggttcccggctggccgcgcagcaacagatggaaggcctcctggcgccgcaccggcccaaggagcccgcgtggttcctggccaccgtcggcgtctcgcccgaccaccagggcaagggtctgggcagcgccgtcgtgctccccggagtggaggcggccgagcgcgccggggtgcccgccttcctggagacctccgcgccccgcaacctccccttctacgagcggctcggcttcaccgtcaccgccgacgtcgaggtgcccgaaggaccgcgcacctggtgcatgacccgcaagcccggtgcctga

SEQ ID NO: 8017 - DNA, 2274 bp, Artificial Sequence
  Synthetic Polynucloetide
atggccttaccagtgaccgccttgctcctgccgctggccttgctgctccacgccgccaggccggaagtgcagctggttgaatctggcggaggactggttcagcctggcggatctctgagactgtcttgtgccgccagcggcttcagcttcagcgacttttggatgagctgggtccgacaggcccctggcaaaggacttgaatgggtcgccacaatcagccaggccggcagcgagaaggactacgtggactctgtgaagggcagattcaccatcagccgggacaacgccaagaagtccctgtacctccagatgaacagcctgagagccgaggacaccgccgtgtactattgtgcctctggcgtgtacagcttcgactacagaggccagggcaccctggtcacagtctcttctggtaccggcggaggcggatctggcggcggaggtagcggtggcggaggatctgaattcagctacgtgctgacacagcctccatccgtgtctgtggctccaggacagaccgccagaatcacatgcggcggcaacaacctcggcagcaagagcgtgcactggtatcagcagccacctggacaggctccagtggtggtggtgtacgacgacagcgatagacctagcggcatccccgagagattcagcggcagcaattccggcaataccgccacactgaccatcagcagagtggaagctggcgacgaggccgtgtactactgccaagtgtgggacagcagcagcgatcacgtggtgtttggcggcggaacaaagctgacagtgcttctcgaggacctgaagaacgtgttcccacctgaggtggccgtgttcgagcctagcgaggccgagatcagccacacccagaaagccaccctcgtgtgcctggctaccggcttctaccccgaccatgtggaactgtcttggtgggtcaacggcaaagaggtgcacagcggcgtgtgtaccgacccccagccactgaaagaacagcccgccctgaacgacagccggtactgcctgagcagcagactgagagtgtccgccaccttctggcagaacccccggaaccacttcagatgccaggtgcagttctacggcctgagcgagaacgacgagtggacccaggacagagccaagcccgtgacccagatcgtgtctgccgaagcctggggcagagccgattgcggctttaccagcgagagctaccagcagggcgtgctgagcgccaccatcctgtacgagatcctgctgggcaaggccaccctgtacgccgtgctggtgtctgccctggtgctgatggctatggtcaagcggaaggacagccggggaagggccaagcgatctggatctggagcaacaaacttctcactactcaaacaagcaggtgacgtggaggagaatcccgggcctactagtatggactggatttggcgcatccttttccttgtcggcgctgctaccggcgcgcattccttcgaacaactccagctgcaagagtctggccctggcctggtcaagcctagcgaaacactgagcctgacctgtaccgtgtctggcggctctatcagctccggcagctatttctggggctggatcagacaacctcctggcaaaggactggaatggatcggctccatctactacagcggcatcacctactacaaccccagcctgaagtccagagtgaccatctccgtggacaccagcaagaaccagttctccctgaagctgagcagcgtgacagccgccgataccgccgtgtattattgtgccagacatgacggcgctgtggccggcctgtttgattattggggacagggcaccctggtcaccgtgtcatctgctacgcgtatccagaaccctgatcctgccgtgtaccagctgcgggatagcaagagcagcgacaagagcgtgtgtctgttcaccgacttcgacagccagaccaacgtgtcccagagcaaggactccgacgtgtacatcaccgataagtgcgtgctggacatgcggagcatggacttcaagagcaactccgccgtggcctggtccaacaagtccgatttcgcctgcgccaacgccttcaacaacagcattatccccgaggacacattcttcccaagccccgagagcagctgcgacgtgaagctggtggaaaagagcttcgagacagacaccaacctgaacttccagaacctgagcgtgatcggcttcagaatcctgctgctgaaagtggccggctttaacctgctgatgaccctgcggctgtggtccagc

SEQ ID NO: 8018 - DNA, 2286 bp, Artificial Sequence
  Synthetic Polynucloetide
atggccttaccagtgaccgccttgctcctgccgctggccttgctgctccacgccgccaggccggaagtgcagctggttgaatctggcggaggactggttcagcctggcggatctctgagactgtcttgtgccgccagcggcttcagcttcagcgacttttggatgagctgggtccgacaggcccctggcaaaggacttgaatgggtcgccacaatcagccaggccggcagcgagaaggactacgtggactctgtgaagggcagattcaccatcagccgggacaacgccaagaagtccctgtacctccagatgaacagcctgagagccgaggacaccgccgtgtactattgtgcctctggcgtgtacagcttcgactacagaggccagggcaccctggtcacagtctcttctggtaccggcggaggcggatctggcggcggaggtagcggtggcggaggatctgaattcagctacgtgctgacacagcctccatccgtgtctgtggctccaggacagaccgccagaatcacatgcggcggcaacaacctcggcagcaagagcgtgcactggtatcagcagccacctggacaggctccagtggtggtggtgtacgacgacagcgatagacctagcggcatccccgagagattcagcggcagcaattccggcaataccgccacactgaccatcagcagagtggaagctggcgacgaggccgtgtactactgccaagtgtgggacagcagcagcgatcacgtggtgtttggcggcggaacaaagctgacagtgcttctcgagatccagaaccctgatcctgccgtgtaccagctgcgggatagcaagagcagcgacaagagcgtgtgtctgttcaccgacttcgacagccagaccaacgtgtcccagagcaaggactccgacgtgtacatcaccgataagtgcgtgctggacatgcggagcatggacttcaagagcaactccgccgtggcctggtccaacaagtccgatttcgcctgcgccaacgccttcaacaacagcattatccccgaggacacattcttcccaagccccgagagcagctgcgacgtgaagctggtggaaaagagcttcgagacagacaccaacctgaacttccagaacctgagcgtgatcggcttcagaatcctgctgctgaaagtggccggctttaacctgctgatgaccctgcggctgtggtccagccgcgccaagagaagcggatctggcgtgaagcagaccctgaatttcgacctgctgaagctggctggcgacgtggaatccaacccaggccctactagtatggactggatttggcgcatccttttccttgtcggcgctgctaccggcgcgcattccttcgaacaactccagctgcaagagtctggccctggcctggtcaagcctagcgaaacactgagcctgacctgtaccgtgtctggcggctctatcagctccggcagctatttctggggctggatcagacaacctcctggcaaaggactggaatggatcggctccatctactacagcggcatcacctactacaaccccagcctgaagtccagagtgaccatctccgtggacaccagcaagaaccagttctccctgaagctgagcagcgtgacagccgccgataccgccgtgtattattgtgccagacatgacggcgctgtggccggcctgtttgattattggggacagggcaccctggtcaccgtgtcatctgctacgcgtgaggacctgaagaacgtgttcccacctgaggtggccgtgttcgagcctagcgaggccgagatcagccacacccagaaagccaccctcgtgtgcctggctaccggcttctaccccgaccatgtggaactgtcttggtgggtcaacggcaaagaggtgcacagcggcgtgtgtaccgacccccagccactgaaagaacagcccgccctgaacgacagccggtactgcctgagcagcagactgagagtgtccgccaccttctggcagaacccccggaaccacttcagatgccaggtgcagttctacggcctgagcgagaacgacgagtggacccaggacagagccaagcccgtgacccagatcgtgtctgccgaagcctggggcagagccgattgcggctttaccagcgagagctaccagcagggcgtgctgagcgccaccatcctgtacgagatcctgctgggcaaggccaccctgtacgccgtgctggtgtctgccctggtgctgatggctatggtcaagcggaaggacagccgggga

SEQ ID NO: 8019 - DNA, 2862 bp, Artificial Sequence
  Synthetic Polynucloetide
atggccttaccagtgaccgccttgctcctgccgctggccttgctgctccacgccgccaggccggaagtgcagctggttgaatctggcggaggactggttcagcctggcggatctctgagactgtcttgtgccgccagcggcttcagcttcagcgacttttggatgagctgggtccgacaggcccctggcaaaggacttgaatgggtcgccacaatcagccaggccggcagcgagaaggactacgtggactctgtgaagggcagattcaccatcagccgggacaacgccaagaagtccctgtacctccagatgaacagcctgagagccgaggacaccgccgtgtactattgtgcctctggcgtgtacagcttcgactacagaggccagggcaccctggtcacagtctcttctggtaccggcggaggcggatctggcggcggaggtagcggtggcggaggatctgaattcagctacgtgctgacacagcctccatccgtgtctgtggctccaggacagaccgccagaatcacatgcggcggcaacaacctcggcagcaagagcgtgcactggtatcagcagccacctggacaggctccagtggtggtggtgtacgacgacagcgatagacctagcggcatccccgagagattcagcggcagcaattccggcaataccgccacactgaccatcagcagagtggaagctggcgacgaggccgtgtactactgccaagtgtgggacagcagcagcgatcacgtggtgtttggcggcggaacaaagctgacagtgcttctcgaggacctgaagaacgtgttcccacctgaggtggccgtgttcgagcctagcgaggccgagatcagccacacccagaaagccaccctcgtgtgcctggctaccggcttctaccccgaccatgtggaactgtcttggtgggtcaacggcaaagaggtgcacagcggcgtgtctaccgacccccagccactgaaagaacagcccgccctgaacgacagccggtactgcctgagcagcagactgagagtgtccgccaccttctggcagaacccccggaaccacttcagatgccaggtgcagttctacggcctgagcgagaacgacgagtggacccaggacagagccaagcccgtgacccagatcgtgtctgccgaagcctggggcagagccgattgcggatcccagagcttcggcctgctggaccccaagctgtgctacctgctggatggcatcctgttcatctacggcgtgatcctgaccgccctgttcctgagagtgaagttcagcagaagcgccgacgcccctgcctaccagcagggacagaaccaactgtacaacgagctgaacctgggcagacgggaagagtacgacgtgctggacaagcggagaggcagggaccctgagatgggcggaaagccccagcggagaaagaacccccaggaaggactgtataacgaactccagaaagacaagatggccgaagcctacagcgagatcggcatgaagggcgagcggagaagaggcaagggccacgatggcctgtaccagggcctgagcaccgccaccaaggacacctatgacgccctgcacatgcaggccctgcctccaagaagggccaagcgatctggatctggagcaacaaacttctcactactcaaacaagcaggtgacgtggaggagaatcccgggcctactagtatggactggatttggcgcatccttttccttgtcggcgctgctaccggcgcgcattccttcgaacaactccagctgcaagagtctggccctggcctggtcaagcctagcgaaacactgagcctgacctgtaccgtgtctggcggctctatcagctccggcagctatttctggggctggatcagacaacctcctggcaaaggactggaatggatcggctccatctactacagcggcatcacctactacaaccccagcctgaagtccagagtgaccatctccgtggacaccagcaagaaccagttctccctgaagctgagcagcgtgacagccgccgataccgccgtgtattattgtgccagacatgacggcgctgtggccggcctgtttgattattggggacagggcaccctggtcaccgtgtcatctgctacgcgtatccagaaccctgatcctgccgtgtaccagctgcgggatagcaagagcagcgacaagagcgtgtgtctgttcaccgacttcgacagccagaccaacgtgtcccagagcaaggactccgacgtgtacatcaccgataagaccgtgctggacatgcggagcatggacttcaagagcaactccgccgtggcctggtccaacaagtccgatttcgcctgcgccaacgccttcaacaacagcattatccccgaggacacattcttcccaagccccgagagcagctgcggtacccagagttttgggttgttggaccctaaattgtgctatctgttggacggaatcctgttcatttacggagtgatcctgaccgcattgttcctgcgggttaagttttccagatccgcagacgcacccgcttaccaacaagggcagaaccaactctacaatgaacttaatttggggcggagggaagagtacgacgttctggacaaaaggaggggacgagatcccgagatgggcggaaagcctcagcgaaggaagaatccgcaagaggggctttataacgaactccagaaagataaaatggcagaagcctatagtgagattgggatgaagggagaaaggaggaggggtaaaggtcacgatgggttgtaccaaggattgagcacagccactaaagatacctatgatgcgctccacatgcaggccctgccgccaaga

SEQ ID NO: 8020 - DNA, 2352 bp, Artificial Sequence
  Synthetic Polynucloetide
atggccttaccagtgaccgccttgctcctgccgctggccttgctgctccacgccgccaggccggaagtgcagctggttgaatctggcggaggactggttcagcctggcggatctctgagactgtcttgtgccgccagcggcttcagcttcagcgacttttggatgagctgggtccgacaggcccctggcaaaggacttgaatgggtcgccacaatcagccaggccggcagcgagaaggactacgtggactctgtgaagggcagattcaccatcagccgggacaacgccaagaagtccctgtacctccagatgaacagcctgagagccgaggacaccgccgtgtactattgtgcctctggcgtgtacagcttcgactacagaggccagggcaccctggtcacagtctcttctggtaccggcggaggcggatctggcggcggaggtagcggtggcggaggatctgaattcagctacgtgctgacacagcctccatccgtgtctgtggctccaggacagaccgccagaatcacatgcggcggcaacaacctcggcagcaagagcgtgcactggtatcagcagccacctggacaggctccagtggtggtggtgtacgacgacagcgatagacctagcggcatccccgagagattcagcggcagcaattccggcaataccgccacactgaccatcagcagagtggaagctggcgacgaggccgtgtactactgccaagtgtgggacagcagcagcgatcacgtggtgtttggcggcggaacaaagctgacagtgcttctcgagggacagcctaaggccaatcctaccgtgacactgttccctccaagcagcgaagaactccaggccaacaaggccacacttgtgtgcctgatctccgacttctaccctggggctgtgacagtggcttggaaggccgatggatctcctgtgaaagccggcgtggaaaccaccaagccatccaagcagagcaacaacaaatacgccgccagctcctacctgagcctgacacctgagcagtggaagtcccacagatcctacagctgccaagtgacccacgaaggcagcaccgtggaaaagacagtggcccctacagagtgcagccccatcaagaccgatgtgattacaatggaccccaaggacaactgctccaaggacgccaacgataccctgctgctccagctgaccaacaccagcgcctactacatgtacttgttgctgctgctgaagtccgtggtgtacttcgccatcatcacatgctgcctgctgcggagaaccgccttctgctgcaacggcgagaagtctagggccaagcgatctggatctggagcaacaaacttctcactactcaaacaagcaggtgacgtggaggagaatcccgggcctactagtatggactggatttggcgcatccttttccttgtcggcgctgctaccggcgcgcattccttcgaacaactccagctgcaagagtctggccctggcctggtcaagcctagcgaaacactgagcctgacctgtaccgtgtctggcggctctatcagctccggcagctatttctggggctggatcagacaacctcctggcaaaggactggaatggatcggctccatctactacagcggcatcacctactacaaccccagcctgaagtccagagtgaccatctccgtggacaccagcaagaaccagttctccctgaagctgagcagcgtgacagccgccgataccgccgtgtattattgtgccagacatgacggcgctgtggccggcctgtttgattattggggacagggcaccctggtcaccgtgtcatctgctacgcgtgcctctacaaagggaccctccgtgtttcctctggctcccagcagcaagtctacaagcggaggaacagccgctctgggctgcctggtcaaggattactttcccgagcctgtgaccgtgtcctggaatagcggagcactgacaagcggcgtgcacacctttccagccgtgctgcaaagcagcggcctgtactctctgagcagcgtggtcacagtgcctagctctagcctgggcacccagacctacatctgcaatgtgaaccacaagcctagcaacaccaaggtggacaagagagtggaacccaagagctgtgaagtgaaaaccgactccaccgaccacgtgaagcccaaagagacagagaacaccaagcagcccagcaagagctgccacaagcccaaggccatcgtgcacaccgagaaagtgaacatgatgagcctgaccgtgctgggcctgcggatgctgttcgccaaaaccgtggccgtgaacttcctgctgaccgccaagctgttcttcctc

SEQ ID NO: 8021 - DNA, 2295 bp, Artificial Sequence
  Synthetic Polynucloetide
atggccttaccagtgaccgccttgctcctgccgctggccttgctgctccacgccgccaggccggaagtgcagctggttgaatctggcggaggactggttcagcctggcggatctctgagactgtcttgtgccgccagcggcttcagcttcagcgacttttggatgagctgggtccgacaggcccctggcaaaggacttgaatgggtcgccacaatcagccaggccggcagcgagaaggactacgtggactctgtgaagggcagattcaccatcagccgggacaacgccaagaagtccctgtacctccagatgaacagcctgagagccgaggacaccgccgtgtactattgtgcctctggcgtgtacagcttcgactacagaggccagggcaccctggtcacagtctcttctggtaccggcggaggcggatctggcggcggaggtagcggtggcggaggatctgaattcagctacgtgctgacacagcctccatccgtgtctgtggctccaggacagaccgccagaatcacatgcggcggcaacaacctcggcagcaagagcgtgcactggtatcagcagccacctggacaggctccagtggtggtggtgtacgacgacagcgatagacctagcggcatccccgagagattcagcggcagcaattccggcaataccgccacactgaccatcagcagagtggaagctggcgacgaggccgtgtactactgccaagtgtgggacagcagcagcgatcacgtggtgtttggcggcggaacaaagctgacagtgcttctcgagggacagcctaaggccaatcctaccgtgacactgttccctccaagcagcgaagaactccaggccaacaaggccacacttgtgtgcctgatctccgacttctaccctggggctgtgacagtggcttggaaggccgatggatctcctgtgaaagccggcgtggaaaccaccaagccatccaagcagagcaacaacaaatacgccgccagctcctacctgagcctgacacctgagcagtggaagtcccacagatcctacagctgccaagtgacccacgaaggcagcaccgtggaaaagacagtggcccctacagagtgcagcggcagagccgattgcggctttaccagcgagagctaccagcagggcgtgctgagcgccaccatcctgtacgagatcctgctgggcaaggccaccctgtacgccgtgctggtgtctgccctggtgctgatggctatggtcaagcggaaggacagccggggacgcgccaagagaagcggatctggcgtgaagcagaccctgaatttcgacctgctgaagctggctggcgacgtggaatccaacccaggccctactagtatggactggatttggcgcatccttttccttgtcggcgctgctaccggcgcgcattccttcgaacaactccagctgcaagagtctggccctggcctggtcaagcctagcgaaacactgagcctgacctgtaccgtgtctggcggctctatcagctccggcagctatttctggggctggatcagacaacctcctggcaaaggactggaatggatcggctccatctactacagcggcatcacctactacaaccccagcctgaagtccagagtgaccatctccgtggacaccagcaagaaccagttctccctgaagctgagcagcgtgacagccgccgataccgccgtgtattattgtgccagacatgacggcgctgtggccggcctgtttgattattggggacagggcaccctggtcaccgtgtcatctgctacgcgtgcctctacaaagggaccctccgtgtttcctctggctcccagcagcaagtctacaagcggaggaacagccgctctgggctgcctggtcaaggattactttcccgagcctgtgaccgtgtcctggaatagcggagcactgacaagcggcgtgcacacctttccagccgtgctgcaaagcagcggcctgtactctctgagcagcgtggtcacagtgcctagctctagcctgggcacccagacctacatctgcaatgtgaaccacaagcctagcaacaccaaggtggacaagagagtggaacccaagagctgtatccccgaggacacattcttcccaagccccgagagcagctgcgacgtgaagctggtggaaaagagcttcgagacagacaccaacctgaacttccagaacctgagcgtgatcggcttcagaatcctgctgctgaaagtggccggctttaacctgctgatgaccctgcggctgtggtccagc

SEQ ID NO: 8022 - DNA, 2697 bp, Artificial Sequence
  Synthetic Polynucloetide
atggccttaccagtgaccgccttgctcctgccgctggccttgctgctccacgccgccaggccggaagtgcagctggttgaatctggcggaggactggttcagcctggcggatctctgagactgtcttgtgccgccagcggcttcagcttcagcgacttttggatgagctgggtccgacaggcccctggcaaaggacttgaatgggtcgccacaatcagccaggccggcagcgagaaggactacgtggactctgtgaagggcagattcaccatcagccgggacaacgccaagaagtccctgtacctccagatgaacagcctgagagccgaggacaccgccgtgtactattgtgcctctggcgtgtacagcttcgactacagaggccagggcaccctggtcacagtctcttctggtaccggcggaggcggatctggcggcggaggtagcggtggcggaggatctgaattcagctacgtgctgacacagcctccatccgtgtctgtggctccaggacagaccgccagaatcacatgcggcggcaacaacctcggcagcaagagcgtgcactggtatcagcagccacctggacaggctccagtggtggtggtgtacgacgacagcgatagacctagcggcatccccgagagattcagcggcagcaattccggcaataccgccacactgaccatcagcagagtggaagctggcgacgaggccgtgtactactgccaagtgtgggacagcagcagcgatcacgtggtgtttggcggcggaacaaagctgacagtgcttctcgagatccagaaccctgatcctgccgtgtaccagctgcgggatagcaagagcagcgacaagagcgtgtgtctgttcaccgacttcgacagccagaccaacgtgtcccagagcaaggactccgacgtgtacatcaccgataagtgcgtgctggacatgcggagcatggacttcaagagcaactccgccgtggcctggtccaacaagtccgatttcgcctgcgccaacgccttcaacaacagcattatccccgaggacacattcttcccaagccccgagagcagctgcgacgtgaagctggtggaaaagagcttcgagacagacaccaacctgaacttccagaacctgagcgtgatcggcttcagaatcctgctgctgaaagtggccggctttaacctgctgatgaccctgcggctgtggtccagccgcgccaagagaagcggatctggcgtgaagcagaccctgaatttcgacctgctgaagctggctggcgacgtggaatccaacccaggccctactagtatggactggatttggcgcatccttttccttgtcggcgctgctaccggcgcgcattccgggccccagctccagctgcaagagtctggacctggcctggtcaagcctagcgagacactgagcctgacctgtaccgtgtccggcgatagcatcagcagcggcgattactactggggctggatcagacagcctcctggcaaaggactggaatggatcggccacatctactacagcggcgtgacctactacaaccccagcctgaagtccagagtgaccatcagcgtggacaccagccggaaccagttctccctgaagctgtctagcgtgacagccgccgataccgccgtgtactactgcaccagagaggacagcagcaactggcggagtagaggccagggaacactggtcacagttagctctggatccggcggaggcggaagtggaggcggaggatctggcggcggaggctctttcgaacaactccagctgcaagagtctggccctggcctggtcaagcctagcgaaacactgagcctgacctgtaccgtgtctggcggctctatcagctccggcagctatttctggggctggatcagacaacctcctggcaaaggactggaatggatcggctccatctactacagcggcatcacctactacaaccccagcctgaagtccagagtgaccatctccgtggacaccagcaagaaccagttctccctgaagctgagcagcgtgacagccgccgataccgccgtgtattattgtgccagacatgacggcgctgtggccggcctgtttgattattggggacagggcaccctggtcaccgtgtcatctgctacgcgtgaggacctgaagaacgtgttcccacctgaggtggccgtgttcgagcctagcgaggccgagatcagccacacccagaaagccaccctcgtgtgcctggctaccggcttctaccccgaccatgtggaactgtcttggtgggtcaacggcaaagaggtgcacagcggcgtgtgtaccgacccccagccactgaaagaacagcccgccctgaacgacagccggtactgcctgagcagcagactgagagtgtccgccaccttctggcagaacccccggaaccacttcagatgccaggtgcagttctacggcctgagcgagaacgacgagtggacccaggacagagccaagcccgtgacccagatcgtgtctgccgaagcctggggcagagccgattgcggctttaccagcgagagctaccagcagggcgtgctgagcgccaccatcctgtacgagatcctgctgggcaaggccaccctgtacgccgtgctggtgtctgccctggtgctgatggctatggtcaagcggaaggacagccgggga

SEQ ID NO: 8023 - DNA, 3273 bp, Artificial Sequence
  Synthetic Polynucloetide
atggccttaccagtgaccgccttgctcctgccgctggccttgctgctccacgccgccaggccggaagtgcagctggttgaatctggcggaggactggttcagcctggcggatctctgagactgtcttgtgccgccagcggcttcagcttcagcgacttttggatgagctgggtccgacaggcccctggcaaaggacttgaatgggtcgccacaatcagccaggccggcagcgagaaggactacgtggactctgtgaagggcagattcaccatcagccgggacaacgccaagaagtccctgtacctccagatgaacagcctgagagccgaggacaccgccgtgtactattgtgcctctggcgtgtacagcttcgactacagaggccagggcaccctggtcacagtctcttctggtaccggcggaggcggatctggcggcggaggtagcggtggcggaggatctgaattcagctacgtgctgacacagcctccatccgtgtctgtggctccaggacagaccgccagaatcacatgcggcggcaacaacctcggcagcaagagcgtgcactggtatcagcagccacctggacaggctccagtggtggtggtgtacgacgacagcgatagacctagcggcatccccgagagattcagcggcagcaattccggcaataccgccacactgaccatcagcagagtggaagctggcgacgaggccgtgtactactgccaagtgtgggacagcagcagcgatcacgtggtgtttggcggcggaacaaagctgacagtgcttctcgaggacctgaagaacgtgttcccacctgaggtggccgtgttcgagcctagcgaggccgagatcagccacacccagaaagccaccctcgtgtgcctggctaccggcttctaccccgaccatgtggaactgtcttggtgggtcaacggcaaagaggtgcacagcggcgtgtctaccgacccccagccactgaaagaacagcccgccctgaacgacagccggtactgcctgagcagcagactgagagtgtccgccaccttctggcagaacccccggaaccacttcagatgccaggtgcagttctacggcctgagcgagaacgacgagtggacccaggacagagccaagcccgtgacccagatcgtgtctgccgaagcctggggcagagccgattgcggatcccagagcttcggcctgctggaccccaagctgtgctacctgctggatggcatcctgttcatctacggcgtgatcctgaccgccctgttcctgagagtgaagttcagcagaagcgccgacgcccctgcctaccagcagggacagaaccaactgtacaacgagctgaacctgggcagacgggaagagtacgacgtgctggacaagcggagaggcagggaccctgagatgggcggaaagccccagcggagaaagaacccccaggaaggactgtataacgaactccagaaagacaagatggccgaagcctacagcgagatcggcatgaagggcgagcggagaagaggcaagggccacgatggcctgtaccagggcctgagcaccgccaccaaggacacctatgacgccctgcacatgcaggccctgcctccaagaagggccaagcgatctggatctggagcaacaaacttctcactactcaaacaagcaggtgacgtggaggagaatcccgggcctactagtatggactggatttggcgcatccttttccttgtcggcgctgctaccggcgcgcattccgggccccagctccagctgcaagagtctggacctggcctggtcaagcctagcgagacactgagcctgacctgtaccgtgtccggcgatagcatcagcagcggcgattactactggggctggatcagacagcctcctggcaaaggactggaatggatcggccacatctactacagcggcgtgacctactacaaccccagcctgaagtccagagtgaccatcagcgtggacaccagccggaaccagttctccctgaagctgtctagcgtgacagccgccgataccgccgtgtactactgcaccagagaggacagcagcaactggcggagtagaggccagggaacactggtcacagttagctctggatccggcggaggcggaagtggaggcggaggatctggcggcggaggctctttcgaacaactccagctgcaagagtctggccctggcctggtcaagcctagcgaaacactgagcctgacctgtaccgtgtctggcggctctatcagctccggcagctatttctggggctggatcagacaacctcctggcaaaggactggaatggatcggctccatctactacagcggcatcacctactacaaccccagcctgaagtccagagtgaccatctccgtggacaccagcaagaaccagttctccctgaagctgagcagcgtgacagccgccgataccgccgtgtattattgtgccagacatgacggcgctgtggccggcctgtttgattattggggacagggcaccctggtcaccgtgtcatctgctacgcgtatccagaaccctgatcctgccgtgtaccagctgcgggatagcaagagcagcgacaagagcgtgtgtctgttcaccgacttcgacagccagaccaacgtgtcccagagcaaggactccgacgtgtacatcaccgataagaccgtgctggacatgcggagcatggacttcaagagcaactccgccgtggcctggtccaacaagtccgatttcgcctgcgccaacgccttcaacaacagcattatccccgaggacacattcttcccaagccccgagagcagctgcggtacccagagttttgggttgttggaccctaaattgtgctatctgttggacggaatcctgttcatttacggagtgatcctgaccgcattgttcctgcgggttaagttttccagatccgcagacgcacccgcttaccaacaagggcagaaccaactctacaatgaacttaatttggggcggagggaagagtacgacgttctggacaaaaggaggggacgagatcccgagatgggcggaaagcctcagcgaaggaagaatccgcaagaggggctttataacgaactccagaaagataaaatggcagaagcctatagtgagattgggatgaagggagaaaggaggaggggtaaaggtcacgatgggttgtaccaaggattgagcacagccactaaagatacctatgatgcgctccacatgcaggccctgccgccaaga

SEQ ID NO: 8024 - DNA, 2763 bp, Artificial Sequence
  Synthetic Polynucloetide
atggccttaccagtgaccgccttgctcctgccgctggccttgctgctccacgccgccaggccggaagtgcagctggttgaatctggcggaggactggttcagcctggcggatctctgagactgtcttgtgccgccagcggcttcagcttcagcgacttttggatgagctgggtccgacaggcccctggcaaaggacttgaatgggtcgccacaatcagccaggccggcagcgagaaggactacgtggactctgtgaagggcagattcaccatcagccgggacaacgccaagaagtccctgtacctccagatgaacagcctgagagccgaggacaccgccgtgtactattgtgcctctggcgtgtacagcttcgactacagaggccagggcaccctggtcacagtctcttctggtaccggcggaggcggatctggcggcggaggtagcggtggcggaggatctgaattcagctacgtgctgacacagcctccatccgtgtctgtggctccaggacagaccgccagaatcacatgcggcggcaacaacctcggcagcaagagcgtgcactggtatcagcagccacctggacaggctccagtggtggtggtgtacgacgacagcgatagacctagcggcatccccgagagattcagcggcagcaattccggcaataccgccacactgaccatcagcagagtggaagctggcgacgaggccgtgtactactgccaagtgtgggacagcagcagcgatcacgtggtgtttggcggcggaacaaagctgacagtgcttctcgagggacagcctaaggccaatcctaccgtgacactgttccctccaagcagcgaagaactccaggccaacaaggccacacttgtgtgcctgatctccgacttctaccctggggctgtgacagtggcttggaaggccgatggatctcctgtgaaagccggcgtggaaaccaccaagccatccaagcagagcaacaacaaatacgccgccagctcctacctgagcctgacacctgagcagtggaagtcccacagatcctacagctgccaagtgacccacgaaggcagcaccgtggaaaagacagtggcccctacagagtgcagccccatcaagaccgatgtgattacaatggaccccaaggacaactgctccaaggacgccaacgataccctgctgctccagctgaccaacaccagcgcctactacatgtacttgttgctgctgctgaagtccgtggtgtacttcgccatcatcacatgctgcctgctgcggagaaccgccttctgctgcaacggcgagaagtctagggccaagcgatctggatctggagcaacaaacttctcactactcaaacaagcaggtgacgtggaggagaatcccgggcctactagtatggactggatttggcgcatccttttccttgtcggcgctgctaccggcgcgcattccgggccccagctccagctgcaagagtctggacctggcctggtcaagcctagcgagacactgagcctgacctgtaccgtgtccggcgatagcatcagcagcggcgattactactggggctggatcagacagcctcctggcaaaggactggaatggatcggccacatctactacagcggcgtgacctactacaaccccagcctgaagtccagagtgaccatcagcgtggacaccagccggaaccagttctccctgaagctgtctagcgtgacagccgccgataccgccgtgtactactgcaccagagaggacagcagcaactggcggagtagaggccagggaacactggtcacagttagctctggatccggcggaggcggaagtggaggcggaggatctggcggcggaggctctttcgaacaactccagctgcaagagtctggccctggcctggtcaagcctagcgaaacactgagcctgacctgtaccgtgtctggcggctctatcagctccggcagctatttctggggctggatcagacaacctcctggcaaaggactggaatggatcggctccatctactacagcggcatcacctactacaaccccagcctgaagtccagagtgaccatctccgtggacaccagcaagaaccagttctccctgaagctgagcagcgtgacagccgccgataccgccgtgtattattgtgccagacatgacggcgctgtggccggcctgtttgattattggggacagggcaccctggtcaccgtgtcatctgctacgcgtgcctctacaaagggaccctccgtgtttcctctggctcccagcagcaagtctacaagcggaggaacagccgctctgggctgcctggtcaaggattactttcccgagcctgtgaccgtgtcctggaatagcggagcactgacaagcggcgtgcacacctttccagccgtgctgcaaagcagcggcctgtactctctgagcagcgtggtcacagtgcctagctctagcctgggcacccagacctacatctgcaatgtgaaccacaagcctagcaacaccaaggtggacaagagagtggaacccaagagctgtgaagtgaaaaccgactccaccgaccacgtgaagcccaaagagacagagaacaccaagcagcccagcaagagctgccacaagcccaaggccatcgtgcacaccgagaaagtgaacatgatgagcctgaccgtgctgggcctgcggatgctgttcgccaaaaccgtggccgtgaacttcctgctgaccgccaagctgttcttcctc

SEQ ID NO: 8025 - DNA, 2706 bp, Artificial Sequence
  Synthetic Polynucloetide
atggccttaccagtgaccgccttgctcctgccgctggccttgctgctccacgccgccaggccggaagtgcagctggttgaatctggcggaggactggttcagcctggcggatctctgagactgtcttgtgccgccagcggcttcagcttcagcgacttttggatgagctgggtccgacaggcccctggcaaaggacttgaatgggtcgccacaatcagccaggccggcagcgagaaggactacgtggactctgtgaagggcagattcaccatcagccgggacaacgccaagaagtccctgtacctccagatgaacagcctgagagccgaggacaccgccgtgtactattgtgcctctggcgtgtacagcttcgactacagaggccagggcaccctggtcacagtctcttctggtaccggcggaggcggatctggcggcggaggtagcggtggcggaggatctgaattcagctacgtgctgacacagcctccatccgtgtctgtggctccaggacagaccgccagaatcacatgcggcggcaacaacctcggcagcaagagcgtgcactggtatcagcagccacctggacaggctccagtggtggtggtgtacgacgacagcgatagacctagcggcatccccgagagattcagcggcagcaattccggcaataccgccacactgaccatcagcagagtggaagctggcgacgaggccgtgtactactgccaagtgtgggacagcagcagcgatcacgtggtgtttggcggcggaacaaagctgacagtgcttctcgagggacagcctaaggccaatcctaccgtgacactgttccctccaagcagcgaagaactccaggccaacaaggccacacttgtgtgcctgatctccgacttctaccctggggctgtgacagtggcttggaaggccgatggatctcctgtgaaagccggcgtggaaaccaccaagccatccaagcagagcaacaacaaatacgccgccagctcctacctgagcctgacacctgagcagtggaagtcccacagatcctacagctgccaagtgacccacgaaggcagcaccgtggaaaagacagtggcccctacagagtgcagcggcagagccgattgcggctttaccagcgagagctaccagcagggcgtgctgagcgccaccatcctgtacgagatcctgctgggcaaggccaccctgtacgccgtgctggtgtctgccctggtgctgatggctatggtcaagcggaaggacagccggggacgcgccaagagaagcggatctggcgtgaagcagaccctgaatttcgacctgctgaagctggctggcgacgtggaatccaacccaggccctactagtatggactggatttggcgcatccttttccttgtcggcgctgctaccggcgcgcattccgggccccagctccagctgcaagagtctggacctggcctggtcaagcctagcgagacactgagcctgacctgtaccgtgtccggcgatagcatcagcagcggcgattactactggggctggatcagacagcctcctggcaaaggactggaatggatcggccacatctactacagcggcgtgacctactacaaccccagcctgaagtccagagtgaccatcagcgtggacaccagccggaaccagttctccctgaagctgtctagcgtgacagccgccgataccgccgtgtactactgcaccagagaggacagcagcaactggcggagtagaggccagggaacactggtcacagttagctctggatccggcggaggcggaagtggaggcggaggatctggcggcggaggctctttcgaacaactccagctgcaagagtctggccctggcctggtcaagcctagcgaaacactgagcctgacctgtaccgtgtctggcggctctatcagctccggcagctatttctggggctggatcagacaacctcctggcaaaggactggaatggatcggctccatctactacagcggcatcacctactacaaccccagcctgaagtccagagtgaccatctccgtggacaccagcaagaaccagttctccctgaagctgagcagcgtgacagccgccgataccgccgtgtattattgtgccagacatgacggcgctgtggccggcctgtttgattattggggacagggcaccctggtcaccgtgtcatctgctacgcgtgcctctacaaagggaccctccgtgtttcctctggctcccagcagcaagtctacaagcggaggaacagccgctctgggctgcctggtcaaggattactttcccgagcctgtgaccgtgtcctggaatagcggagcactgacaagcggcgtgcacacctttccagccgtgctgcaaagcagcggcctgtactctctgagcagcgtggtcacagtgcctagctctagcctgggcacccagacctacatctgcaatgtgaaccacaagcctagcaacaccaaggtggacaagagagtggaacccaagagctgtatccccgaggacacattcttcccaagccccgagagcagctgcgacgtgaagctggtggaaaagagcttcgagacagacaccaacctgaacttccagaacctgagcgtgatcggcttcagaatcctgctgctgaaagtggccggctttaacctgctgatgaccctgcggctgtggtccagc

SEQ ID NO: 8026 - DNA, 2277 bp, Artificial Sequence
  Synthetic Polynucloetide
atggccttaccagtgaccgccttgctcctgccgctggccttgctgctccacgccgccaggccggaagtgcaggttttggagtctggcggaggactggttcagcctggcggatctctgagactgtcttgtgccgccagcggcttcaccttcagcaactttgccatgagctgggtccgacaggcccctggcaaaggacttgaatgggtgtccacaatcagcggcagcgccggcacaacagattacgccgattctgtgaagggcagattcaccatcagccgggacaacagcaagaaaaccctgtacctccagatgaacagcctgcgcgtggaagataccgccgtgtactactgtgccgatggcagaggccccttcttcgattatcgcggccagggcacactggtcaccgtttcttctggtaccggcggaggcggatctggcggcggaggtagcggtggcggaggatctgaattcagctacgtgctgacacagcctccatccgtgtctgtggctccaggacagaccgccagaatcacatgcggcggcaacaacctcggcagcaagagcgtgcactggtatcagcagccacctggacaggctccagtggtggtggtgtacgacgacagcgatagacctagcggcatccccgagagattcagcggcagcaattccggcaataccgccacactgaccatcagcagagtggaagctggcgacgaggccgtgtactactgccaagtgtgggacagcagcagcgatcacgtggtgtttggcggcggaacaaagctgacagtgcttctcgaggacctgaagaacgtgttcccacctgaggtggccgtgttcgagcctagcgaggccgagatcagccacacccagaaagccaccctcgtgtgcctggctaccggcttctaccccgaccatgtggaactgtcttggtgggtcaacggcaaagaggtgcacagcggcgtgtgtaccgacccccagccactgaaagaacagcccgccctgaacgacagccggtactgcctgagcagcagactgagagtgtccgccaccttctggcagaacccccggaaccacttcagatgccaggtgcagttctacggcctgagcgagaacgacgagtggacccaggacagagccaagcccgtgacccagatcgtgtctgccgaagcctggggcagagccgattgcggctttaccagcgagagctaccagcagggcgtgctgagcgccaccatcctgtacgagatcctgctgggcaaggccaccctgtacgccgtgctggtgtctgccctggtgctgatggctatggtcaagcggaaggacagccggggaagggccaagcgatctggatctggagcaacaaacttctcactactcaaacaagcaggtgacgtggaggagaatcccgggcctactagtatggactggatttggcgcatccttttccttgtcggcgctgctaccggcgcgcattccttcgaacaactccagctgcaagagtctggccctggcctggtcaagcctagcgaaacactgagcctgacctgtaccgtgtctggcggctctatcagctccggcagctatttctggggctggatcagacaacctcctggcaaaggactggaatggatcggctccatctactacagcggcatcacctactacaaccccagcctgaagtccagagtgaccatctccgtggacaccagcaagaaccagttctccctgaagctgagcagcgtgacagccgccgataccgccgtgtattattgtgccagacatgacggcgctgtggccggcctgtttgattattggggacagggcaccctggtcaccgtgtcatctgctacgcgtatccagaaccctgatcctgccgtgtaccagctgcgggatagcaagagcagcgacaagagcgtgtgtctgttcaccgacttcgacagccagaccaacgtgtcccagagcaaggactccgacgtgtacatcaccgataagtgcgtgctggacatgcggagcatggacttcaagagcaactccgccgtggcctggtccaacaagtccgatttcgcctgcgccaacgccttcaacaacagcattatccccgaggacacattcttcccaagccccgagagcagctgcgacgtgaagctggtggaaaagagcttcgagacagacaccaacctgaacttccagaacctgagcgtgatcggcttcagaatcctgctgctgaaagtggccggctttaacctgctgatgaccctgcggctgtggtccagc

SEQ ID NO: 8027 - DNA, 2280 bp, Artificial Sequence
  Synthetic Polynucloetide
atggccttaccagtgaccgccttgctcctgccgctggccttgctgctccacgccgccaggccgagctacgtgctgacacagcctccatccgtgtctgtggctccaggacagaccgccagaatcacatgcggcggcaacaacctcggcagcaagagcgtgcactggtatcagcagccacctggacaggctccagtggtggtggtgtacgacgacagcgatagacctagcggcatccccgagagattcagcggcagcaattccggcaataccgccacactgaccatcagcagagtggaagctggcgacgaggccgtgtactactgccaagtgtgggacagcagcagcgatcacgtggtgtttggcggcggaacaaagctgacagtgcttctcgaggacctgaagaacgtgttcccacctgaggtggccgtgttcgagcctagcgaggccgagatcagccacacccagaaagccaccctcgtgtgcctggctaccggcttctaccccgaccatgtggaactgtcttggtgggtcaacggcaaagaggtgcacagcggcgtgtgtaccgacccccagccactgaaagaacagcccgccctgaacgacagccggtactgcctgagcagcagactgagagtgtccgccaccttctggcagaacccccggaaccacttcagatgccaggtgcagttctacggcctgagcgagaacgacgagtggacccaggacagagccaagcccgtgacccagatcgtgtctgccgaagcctggggcagagccgattgcggctttaccagcgagagctaccagcagggcgtgctgagcgccaccatcctgtacgagatcctgctgggcaaggccaccctgtacgccgtgctggtgtctgccctggtgctgatggctatggtcaagcggaaggacagccggggaagggccaagcgatctggatctggagcaacaaacttctcactactcaaacaagcaggtgacgtggaggagaatcccgggcctactagtatggactggatttggcgcatccttttccttgtcggcgctgctaccggcgcccattccgggcccgaagtgcagctggttgaatctggcggaggactggttcaggctggcggatctctgagactgtcttgtgccgccagcggcagaacctttagcatgggctggtttagacaggcccctggcaaagagagagagttcgtcgccgccatcacatactctggcggcagcccttactacgccgactctgtgaagggcagattcaccatcagccgggacaacgccaagaacaccgtgtacctccagatgaacagcctgaagcctgaggacaccgccgtgtactactgcgccgccaatccaacatacggcagcgactggaacgccgagaattggggccagggaacccaagtgacagtgtctagcggatccggcggcggaggatctggcggaggcggatctgggggcggaggctctttcgaacaactccagctgcaagagtctggccctggcctggtcaagcctagcgaaacactgagcctgacctgtaccgtgtctggcggctctatcagctccggcagctatttctggggctggatcagacaacctcctggcaaaggactggaatggatcggctccatctactacagcggcatcacctactacaaccccagcctgaagtccagagtgaccatctccgtggacaccagcaagaaccagttctccctgaagctgagcagcgtgacagccgccgataccgccgtgtattattgtgccagacatgacggcgctgtggccggcctgtttgattattggggacagggcaccctggtcaccgtgtcatctgctacgcgtatccagaaccctgatcctgccgtgtaccagctgcgggatagcaagagcagcgacaagagcgtgtgtctgttcaccgacttcgacagccagaccaacgtgtcccagagcaaggactccgacgtgtacatcaccgataagtgcgtgctggacatgcggagcatggacttcaagagcaactccgccgtggcctggtccaacaagtccgatttcgcctgcgccaacgccttcaacaacagcattatccccgaggacacattcttcccaagccccgagagcagctgcgacgtgaagctggtggaaaagagcttcgagacagacaccaacctgaacttccagaacctgagcgtgatcggcttcagaatcctgctgctgaaagtggccggctttaacctgctgatgaccctgcggctgtggtccagc

SEQ ID NO: 8028 - DNA, 2661 bp, Artificial Sequence
  Synthetic Polynucloetide
atggccttaccagtgaccgccttgctcctgccgctggccttgctgctccacgccgccaggccgagctacgtgctgacacagcctccatccgtgtctgtggctccaggacagaccgccagaatcacatgcggcggcaacaacctcggcagcaagagcgtgcactggtatcagcagccacctggacaggctccagtggtggtggtgtacgacgacagcgatagacctagcggcatccccgagagattcagcggcagcaattccggcaataccgccacactgaccatcagcagagtggaagctggcgacgaggccgtgtactactgccaagtgtgggacagcagcagcgatcacgtggtgtttggcggcggaacaaagctgacagtgcttctcgaggacctgaagaacgtgttcccacctgaggtggccgtgttcgagcctagcgaggccgagatcagccacacccagaaagccaccctcgtgtgcctggctaccggcttctaccccgaccatgtggaactgtcttggtgggtcaacggcaaagaggtgcacagcggcgtgtgtaccgacccccagccactgaaagaacagcccgccctgaacgacagccggtactgcctgagcagcagactgagagtgtccgccaccttctggcagaacccccggaaccacttcagatgccaggtgcagttctacggcctgagcgagaacgacgagtggacccaggacagagccaagcccgtgacccagatcgtgtctgccgaagcctggggcagagccgattgcggctttaccagcgagagctaccagcagggcgtgctgagcgccaccatcctgtacgagatcctgctgggcaaggccaccctgtacgccgtgctggtgtctgccctggtgctgatggctatggtcaagcggaaggacagccggggaagggccaagcgatctggatctggagcaacaaacttctcactactcaaacaagcaggtgacgtggaggagaatcccgggcctactagtatggactggatttggcgcatccttttccttgtcggcgctgctaccggcgcccattcccaactgcaactgcaagagtctggccctggcctggtcaagccttctgaaaccctgagcctgacctgtaccgtgtccggcggctctatcagcagcggcgattactactggggctggatcagacagcctccaggcaagggactcgaatggatcggcagcatcagctacagcggctccacctactacaacccaagcctgaagtccagagtgaccatcagcgtggacaccagcagaaaccagttctccctgaagctgagcagcgtgacagccgccgatacagccgtgtattattgcaccagagaggacagcagcaactggcggagtagaggacagggcacactggtcacagtgtcctcttctggaggcggtggaagcggtggaggaggatctgaagtgcagctggttgaatctggcggaggactggttcaggctggcggatctctgagactgtcttgtgccgccagcggcagaacctttagcatgggctggtttagacaggcccctggcaaagagagagagttcgtcgccgccatcacatactctggcggcagcccttactacgccgactctgtgaagggcagattcaccatcagccgggacaacgccaagaacaccgtgtacctccagatgaacagcctgaagcctgaggacaccgccgtgtactactgcgccgccaatccaacatacggcagcgactggaacgccgagaattggggccagggaacccaagtgacagtgtctagcggatccggcggcggaggatctggcggaggcggatctgggggcggaggctctttcgaacaactccagctgcaagagtctggccctggcctggtcaagcctagcgaaacactgagcctgacctgtaccgtgtctggcggctctatcagctccggcagctatttctggggctggatcagacaacctcctggcaaaggactggaatggatcggctccatctactacagcggcatcacctactacaaccccagcctgaagtccagagtgaccatctccgtggacaccagcaagaaccagttctccctgaagctgagcagcgtgacagccgccgataccgccgtgtattattgtgccagacatgacggcgctgtggccggcctgtttgattattggggacagggcaccctggtcaccgtgtcatctgctacgcgtatccagaaccctgatcctgccgtgtaccagctgcgggatagcaagagcagcgacaagagcgtgtgtctgttcaccgacttcgacagccagaccaacgtgtcccagagcaaggactccgacgtgtacatcaccgataagtgcgtgctggacatgcggagcatggacttcaagagcaactccgccgtggcctggtccaacaagtccgatttcgcctgcgccaacgccttcaacaacagcattatccccgaggacacattcttcccaagccccgagagcagctgcgacgtgaagctggtggaaaagagcttcgagacagacaccaacctgaacttccagaacctgagcgtgatcggcttcagaatcctgctgctgaaagtggccggctttaacctgctgatgaccctgcggctgtggtccagc

SEQ ID NO: 8029 - DNA, 2688 bp, Artificial Sequence
  Synthetic Polynucloetide
atggccttaccagtgaccgccttgctcctgccgctggccttgctgctccacgccgccaggccggaagtgcaggttttggagtctggcggaggactggttcagcctggcggatctctgagactgtcttgtgccgccagcggcttcaccttcagcaactttgccatgagctgggtccgacaggcccctggcaaaggacttgaatgggtgtccacaatcagcggcagcgccggcacaacagattacgccgattctgtgaagggcagattcaccatcagccgggacaacagcaagaaaaccctgtacctccagatgaacagcctgcgcgtggaagataccgccgtgtactactgtgccgatggcagaggccccttcttcgattatcgcggccagggcacactggtcaccgtttcttctggtaccggcggaggcggatctggcggcggaggtagcggtggcggaggatctgaattcagctacgtgctgacacagcctccatccgtgtctgtggctccaggacagaccgccagaatcacatgcggcggcaacaacctcggcagcaagagcgtgcactggtatcagcagccacctggacaggctccagtggtggtggtgtacgacgacagcgatagacctagcggcatccccgagagattcagcggcagcaattccggcaataccgccacactgaccatcagcagagtggaagctggcgacgaggccgtgtactactgccaagtgtgggacagcagcagcgatcacgtggtgtttggcggcggaacaaagctgacagtgcttctcgaggacctgaagaacgtgttcccacctgaggtggccgtgttcgagcctagcgaggccgagatcagccacacccagaaagccaccctcgtgtgcctggctaccggcttctaccccgaccatgtggaactgtcttggtgggtcaacggcaaagaggtgcacagcggcgtgtgtaccgacccccagccactgaaagaacagcccgccctgaacgacagccggtactgcctgagcagcagactgagagtgtccgccaccttctggcagaacccccggaaccacttcagatgccaggtgcagttctacggcctgagcgagaacgacgagtggacccaggacagagccaagcccgtgacccagatcgtgtctgccgaagcctggggcagagccgattgcggctttaccagcgagagctaccagcagggcgtgctgagcgccaccatcctgtacgagatcctgctgggcaaggccaccctgtacgccgtgctggtgtctgccctggtgctgatggctatggtcaagcggaaggacagccggggaagggccaagcgatctggatctggagcaacaaacttctcactactcaaacaagcaggtgacgtggaggagaatcccgggcctactagtatggactggatttggcgcatccttttccttgtcggcgctgctaccggcgcccattccgggcccgaagtgcagctggttgaatctggcggaggactggttcaggctggcggatctctgagactgtcttgtgccgccagcggcagaacctttagcatgggctggtttagacaggcccctggcaaagagagagagttcgtcgccgccatcacatacagcggcggcagcccttactacgcctcttctgtcagaggccggttcaccatcagccgggacaacgccaagaacaccgtgtacctccagatgaacagcctgaagccagaggacaccgccgtgtactactgtgccgccaatccaacctacggcagcgactggaatgccgagaattggggccagggcacccaagtgacagtgtctagtggatccggcggcggaggatctggcggaggcggatctgggggcggaggctctttcgaacaactccagctgcaagagtctggccctggcctggtcaagcctagcgaaacactgagcctgacctgtaccgtgtctggcggctctatcagctccggcagctatttctggggctggatcagacaacctcctggcaaaggactggaatggatcggctccatctactacagcggcatcacctactacaaccccagcctgaagtccagagtgaccatctccgtggacaccagcaagaaccagttctccctgaagctgagcagcgtgacagccgccgataccgccgtgtattattgtgccagacatgacggcgctgtggccggcctgtttgattattggggacagggcaccctggtcaccgtgtcatctgctacgcgtatccagaaccctgatcctgccgtgtaccagctgcgggatagcaagagcagcgacaagagcgtgtgtctgttcaccgacttcgacagccagaccaacgtgtcccagagcaaggactccgacgtgtacatcaccgataagtgcgtgctggacatgcggagcatggacttcaagagcaactccgccgtggcctggtccaacaagtccgatttcgcctgcgccaacgccttcaacaacagcattatccccgaggacacattcttcccaagccccgagagcagctgcgacgtgaagctggtggaaaagagcttcgagacagacaccaacctgaacttccagaacctgagcgtgatcggcttcagaatcctgctgctgaaagtggccggctttaacctgctgatgaccctgcggctgtggtccagc

SEQ ID NO: 8030 - DNA, 2184 bp, Artificial Sequence
  Synthetic Polynucloetide
atggccttaccagtgaccgccttgctcctgccgctggccttgctgctccacgccgccaggccgagctacgtgctgacacagcctccatccgtgtctgtggctccaggacagaccgccagaatcacatgcggcggcaacaacatcggcggcaagagcgtgcactggtatcagcagccacctggacaggctccagtggtggtggtgtacgacgacagcgatagacctagcggcatccccgagagattcagcggcagcaattccggcaataccgccacactgaccatcagcagagtggaagctggcgacgaggccgtgtactactgccaagtgtgggacagcagcagcgatcacgtggtgtttggcggcggaacaaagctgacagtgcttggcggaggcggaagtggaggcggaggatctggcggcggaggctctcaactccagctgcaagagtctggccctggcctggtcaagcctagcgaaacactgagcctgacctgtaccgtgtctggcggctctatcagctccggcagctatttctggggctggatcagacaacctcctggcaaaggactggaatggatcggctccatctactacagcggcatcacctactacaaccccagcctgaagtccagagtgaccatctccgtggacaccagcaagaaccagttctccctgaagctgagcagcgtgacagccgccgataccgccgtgtattattgtgccagacatgacggcgctgtggccggcctgtttgattattggggacagggcaccctggtcaccgtgtcatctgctacgcgtgagcagaaactgatctcggaagaggatctggcgaagcccaccacgacgccagcgccgcgaccaccaacaccggcgcccaccatcgcgtcgcagcccctgtccctgcgcccagaggcgtgccggccagcggcggggggcgcagtgcacacgagggggctggacttcgcctgtgacatctacatctgggcgcccttggccgggacttgtggggtccttctcctgtcactggttatcaccctttactgcaaacggggcagaaagaaactcctgtatatattcaaacaaccatttatgagaccagtacaaactactcaagaggaagatggctgtagctgccgatttccagaagaagaagaaggaggatgtgaactgagagtgaagttcagcaggagcgcagacgcccccgcgtaccagcagggccagaaccagctctataacgagctgaatctaggacgaagagaggagtacgatgttttggacaagagacgtggccgggaccctgagatggggggaaagccgagaaggaagaaccctcaggaaggcctgtacaatgaactgcagaaagataagatggcggaggcctacagtgagattgggatgaaaggcgagcgccggaggggcaaggggcacgatggcctttaccagggtctcagtacagccaccaaggacacctacgacgcccttcacatgcaggccctgccccctcgctctagtggctccggcgagggcagaggaagtctactaacctgcggagatgtggaagaaaatcctggcccacatatgaccgagtacaagcccacggtgcgcctcgccacccgcgacgacgtccccagggccgtacgcaccctcgccgccgcgttcgccgactaccccgccacgcgccacaccgtcgatccggaccgccacatcgagcgggtcaccgagctgcaagaactcttcctcacgcgcgtcgggctcgacatcggcaaggtgtgggtcgcggacgacggcgccgcggtggcggtctggaccacgccggagagcgtcgaagcgggggcggtgttcgccgagatcggcccgcgcatggccgagttgagcggttcccggctggccgcgcagcaacagatggaaggcctcctggcgccgcaccggcccaaggagcccgcgtggttcctggccaccgtcggcgtctcgcccgaccaccagggcaagggtctgggcagcgccgtcgtgctccccggagtggaggcggccgagcgcgccggggtgcccgccttcctggagacctccgcgccccgcaacctccccttctacgagcggctcggcttcaccgtcaccgccgacgtcgaggtgcccgaaggaccgcgcacctggtgcatgacccgcaagcccggtgcctga

SEQ ID NO: 8031 - DNA, 2166 bp, Artificial Sequence
  Synthetic Polynucloetide
atggccttaccagtgaccgccttgctcctgccgctggccttgctgctccacgccgccaggccgagctacgtgctgacacagcctccatccgtgtctgtggctccaggacagaccgccagaatcacatgcggcggcaacaacatcggcggcaagagcgtgcactggtatcagcagccacctggacaggctccagtggtggtggtgtacgacgacagcgatagacctagcggcatccccgagagattcagcggcagcaattccggcaataccgccacactgaccatcagcagagtggaagctggcgacgaggccgtgtactactgccaagtgtgggacagcagcagcgatcacgtggtgtttggcggcggaacaaagctgacagtgcttggcggaggcggaagtggaggcggaggatctggcggcggaggctctcaactccagctgcaagagtctggccctggcctggtcaagcctagcgaaacactgagcctgacctgtaccgtgtctggcggctctatcagctccggcagctatttctggggctggatcagacaacctcctggcaaaggactggaatggatcggctccatctactacagcggcatcacctactacaaccccagcctgaagtccagagtgaccatctccgtggacaccagcaagaaccagttctccctgaagctgagcagcgtgacagccgccgataccgccgtgtattattgtgccagacatgacggcgctgtggccggcctgtttgattattggggacagggcaccctggtcaccgtgtcatctgctacgcgtgagcagaaactgatctcggaagaggatctgaaaattgaagttatgtatcctcctccttacctagacaatgagaagagcaatggaaccattatccatgtgaaagggaaacacctttgtccaagtcccctatttcccggaccttctaagcccttttgggtgctggtggtggttgggggagtcctggcttgctatagcttgctagtaacagtggcctttattattttctgggtgaggagtaagaggagcaggctcctgcacagtgactacatgaacatgactccacgccgccccggacccacccgcaagcattaccagccctatgccccaccacgcgacttcgcagcctatcgctccagagtgaagttcagcaggagcgcagacgcccccgcgtaccagcagggccagaaccagctctataacgagctcaatctaggacgaagagaggagtacgatgttttggacaagagacgtggccgggaccctgagatggggggaaagccgagaaggaagaaccctcaggaaggcctgtacaatgaactgcagaaagataagatggcggaggcctacagtgagattgggatgaaaggcgagcgccggaggggcaaggggcacgatggcctttaccagggtctcagtacagccaccaaggacacctacgacgcccttcacatgcaggccctgccccctcgctctagtggctccggcgagggcagaggaagtctactaacctgcggagatgtggaagaaaatcctggcccacatatgaccgagtacaagcccacggtgcgcctcgccacccgcgacgacgtccccagggccgtacgcaccctcgccgccgcgttcgccgactaccccgccacgcgccacaccgtcgatccggaccgccacatcgagcgggtcaccgagctgcaagaactcttcctcacgcgcgtcgggctcgacatcggcaaggtgtgggtcgcggacgacggcgccgcggtggcggtctggaccacgccggagagcgtcgaagcgggggcggtgttcgccgagatcggcccgcgcatggccgagttgagcggttcccggctggccgcgcagcaacagatggaaggcctcctggcgccgcaccggcccaaggagcccgcgtggttcctggccaccgtcggcgtctcgcccgaccaccagggcaagggtctgggcagcgccgtcgtgctccccggagtggaggcggccgagcgcgccggggtgcccgccttcctggagacctccgcgccccgcaacctccccttctacgagcggctcggcttcaccgtcaccgccgacgtcgaggtgcccgaaggaccgcgcacctggtgcatgacccgcaagcccggtgcctga

SEQ ID NO: 8032 - DNA, 1494 bp, Artificial Sequence
  Synthetic Polynucloetide
atggccttaccagtgaccgccttgctcctgccgctggccttgctgctccacgccgccaggccgagctacgtgctgacacagcctccatccgtgtctgtggctccaggacagaccgccagaatcacatgcggcggcaacaacatcggcggcaagagcgtgcactggtatcagcagccacctggacaggctccagtggtggtggtgtacgacgacagcgatagacctagcggcatccccgagagattcagcggcagcaattccggcaataccgccacactgaccatcagcagagtggaagctggcgacgaggccgtgtactactgccaagtgtgggacagcagcagcgatcacgtggtgtttggcggcggaacaaagctgacagtgcttggcggaggcggaagtggaggcggaggatctggcggcggaggctctcaactccagctgcaagagtctggccctggcctggtcaagcctagcgaaacactgagcctgacctgtaccgtgtctggcggctctatcagctccggcagctatttctggggctggatcagacaacctcctggcaaaggactggaatggatcggctccatctactacagcggcatcacctactacaaccccagcctgaagtccagagtgaccatctccgtggacaccagcaagaaccagttctccctgaagctgagcagcgtgacagccgccgataccgccgtgtattattgtgccagacatgacggcgctgtggccggcctgtttgattattggggacagggcaccctggtcaccgtgtcatctgctacgcgtgagcagaaactgatctcggaagaggatctgaaaattgaagttatgtatcctcctccttacctagacaatgagaagagcaatggaaccattatccatgtgaaagggaaacacctttgtccaagtcccctatttcccggaccttctaagcccttttgggtgctggtggtggttgggggagtcctggcttgctatagcttgctagtaacagtggcctttattattttctgggtgaggagtaagaggagcaggctcctgcacagtgactacatgaacatgactccacgccgccccggacccacccgcaagcattaccagccctatgccccaccacgcgacttcgcagcctatcgctccagagtgaagttcagcaggagcgcagacgcccccgcgtaccagcagggccagaaccagctctataacgagctcaatctaggacgaagagaggagtacgatgttttggacaagagacgtggccgggaccctgagatggggggaaagccgagaaggaagaaccctcaggaaggcctgtacaatgaactgcagaaagataagatggcggaggcctacagtgagattgggatgaaaggcgagcgccggaggggcaaggggcacgatggcctttaccagggtctcagtacagccaccaaggacacctacgacgcccttcacatgcaggccctgccccctcgc

SEQ ID NO: 8033 - DNA, 1515 bp, Artificial Sequence
  Synthetic Polynucloetide
atggccttaccagtgaccgccttgctcctgccgctggccttgctgctccacgccgccaggccgagctacgtgctgacacagcctccatccgtgtctgtggctccaggacagaccgccagaatcacatgcggcggcaacaacatcggcggcaagagcgtgcactggtatcagcagccacctggacaggctccagtggtggtggtgtacgacgacagcgatagacctagcggcatccccgagagattcagcggcagcaattccggcaataccgccacactgaccatcagcagagtggaagctggcgacgaggccgtgtactactgccaagtgtgggacagcagcagcgatcacgtggtgtttggcggcggaacaaagctgacagtgcttggcggaggcggaagtggaggcggaggatctggcggcggaggctctcaactccagctgcaagagtctggccctggcctggtcaagcctagcgaaacactgagcctgacctgtaccgtgtctggcggctctatcagctccggcagctatttctggggctggatcagacaacctcctggcaaaggactggaatggatcggctccatctactacagcggcatcacctactacaaccccagcctgaagtccagagtgaccatctccgtggacaccagcaagaaccagttctccctgaagctgagcagcgtgacagccgccgataccgccgtgtattattgtgccagacatgacggcgctgtggccggcctgtttgattattggggacagggcaccctggtcaccgtgtcatctgctacgcgtgagcagaaactgatctcggaagaggatctggcgaagcccaccacgacgccagcgccgcgaccaccaacaccggcgcccaccatcgcgtcgcagcccctgtccctgcgcccagaggcgtgccggccagcggcggggggcgcagtgcacacgagggggctggacttcgcctgtgacatctacatctgggcgcccttggccgggacttgtggggtccttctcctgtcactggttatcaccctttactgcaaacggggcagaaagaaactcctgtatatattcaaacaaccatttatgagaccagtacaaactactcaagaggaagatggctgtagctgccgatttccagaagaagaagaaggaggatgtgaactgagagtgaagttcagcaggagcgcagacgcccccgcgtaccagcagggccagaaccagctctataacgagctgaatctaggacgaagagaggagtacgatgttttggacaagagacgtggccgggaccctgagatggggggaaagccgagaaggaagaaccctcaggaaggcctgtacaatgaactgcagaaagataagatggcggaggcctacagtgagattgggatgaaaggcgagcgccggaggggcaaggggcacgatggcctttaccagggtctcagtacagccaccaaggacacctacgacgcccttcacatgcaggccctgccccctcgctga

SEQ ID NO: 8034 - DNA, 1515 bp, Artificial Sequence
  Synthetic Polynucloetide
atggccttaccagtgaccgccttgctcctgccgctggccttgctgctccacgccgccaggccgcaactccagctgcaagagtctggccctggcctggtcaagcctagcgaaacactgagcctgacctgtaccgtgtctggcggctctatcagctccggcagctatttctggggctggatcagacaacctcctggcaaaggactggaatggatcggctccatctactacagcggcatcacctactacaaccccagcctgaagtccagagtgaccatctccgtggacaccagcaagaaccagttctccctgaagctgagcagcgtgacagccgccgataccgccgtgtattattgtgccagacatgacggcgctgtggccggcctgtttgattattggggacagggcaccctggtcaccgtgtcatctgctggcggaggcggaagtggaggcggaggatctggcggcggaggctctagctacgtgctgacacagcctccatccgtgtctgtggctccaggacagaccgccagaatcacatgcggcggcaacaacatcggcggcaagagcgtgcactggtatcagcagccacctggacaggctccagtggtggtggtgtacgacgacagcgatagacctagcggcatccccgagagattcagcggcagcaattccggcaataccgccacactgaccatcagcagagtggaagctggcgacgaggccgtgtactactgccaagtgtgggacagcagcagcgatcacgtggtgtttggcggcggaacaaagctgacagtgcttacgcgtgagcagaaactgatctcggaagaggatctggcgaagcccaccacgacgccagcgccgcgaccaccaacaccggcgcccaccatcgcgtcgcagcccctgtccctgcgcccagaggcgtgccggccagcggcggggggcgcagtgcacacgagggggctggacttcgcctgtgacatctacatctgggcgcccttggccgggacttgtggggtccttctcctgtcactggttatcaccctttactgcaaacggggcagaaagaaactcctgtatatattcaaacaaccatttatgagaccagtacaaactactcaagaggaagatggctgtagctgccgatttccagaagaagaagaaggaggatgtgaactgagagtgaagttcagcaggagcgcagacgcccccgcgtaccagcagggccagaaccagctctataacgagctgaatctaggacgaagagaggagtacgatgttttggacaagagacgtggccgggaccctgagatggggggaaagccgagaaggaagaaccctcaggaaggcctgtacaatgaactgcagaaagataagatggcggaggcctacagtgagattgggatgaaaggcgagcgccggaggggcaaggggcacgatggcctttaccagggtctcagtacagccaccaaggacacctacgacgcccttcacatgcaggccctgccccctcgctga

SEQ ID NO: 8035 - DNA, 2754 bp, Artificial Sequence
  Synthetic Polynucloetide
atggccttaccagtgaccgccttgctcctgccgctggccttgctgctccacgccgccaggccgagctacgtgctgacacagcctccatccgtgtctgtggctccaggacagaccgccagaatcacatgcggcggcaacaacatcggcggcaagagcgtgcactggtatcagcagccacctggacaggctccagtggtggtggtgtacgacgacagcgatagacctagcggcatccccgagagattcagcggcagcaattccggcaataccgccacactgaccatcagcagagtggaagctggcgacgaggccgtgtactactgccaagtgtgggacagcagcagcgatcacgtggtgtttggcggcggaacaaagctgacagtgcttggcggaggcggaagtggaggcggaggatctggcggcggaggctctcaactccagctgcaagagtctggccctggcctggtcaagcctagcgaaacactgagcctgacctgtaccgtgtctggcggctctatcagctccggcagctatttctggggctggatcagacaacctcctggcaaaggactggaatggatcggctccatctactacagcggcatcacctactacaaccccagcctgaagtccagagtgaccatctccgtggacaccagcaagaaccagttctccctgaagctgagcagcgtgacagccgccgataccgccgtgtattattgtgccagacatgacggcgctgtggccggcctgtttgattattggggacagggcaccctggtcaccgtgtcatctgctacgcgtgagcagaaactgatctcggaagaggatctggcgaagcccaccacgacgccagcgccgcgaccaccaacaccggcgcccaccatcgcgtcgcagcccctgtccctgcgcccagaggcgtgccggccagcggcggggggcgcagtgcacacgagggggctggacttcgcctgtgacatctacatctgggcgcccttggccgggacttgtggggtccttctcctgtcactggttatcaccctttactgcgggcgcgccagagtgaagttcagcaggagcgcagacgcccccgcgtaccagcagggccagaaccagctctataacgagctgaatctaggacgaagagaggagtacgatgttttggacaagagacgtggccgggaccctgagatggggggaaagccgagaaggaagaaccctcaggaaggcctgtacaatgaactgcagaaagataagatggcggaggcctacagtgagattgggatgaaaggcgagcgccggaggggcaaggggcacgatggcctttaccagggtctcagtacagccaccaaggacacctacgacgcccttcacatgcaggccctgccccctcgctctagaggatctggagcaacaaacttctcactactcaaacaagcaggtgacgtggaggagaatcccgggcctgggatccacatggccacttacgaggttctctgtgaggtggcgcggaaactgggcacggatgacagggaagtggtattgttcctcctaaacgtgttcatacctcaacccacactggcccaattaattggagctcttagagctttaaaggaggagggcaggttaacgtttcccctgttagcggaatgtctgtttcgtgcaggtcgcagagacctcttgcgcgacctgcttcacttagacccgcgttttttagagcgccacctagcgggcacaatgagttatttcagcccttatcagctcactgttctccacgtagacggggagctgtgtgcgagggatattaggtctttgatatttttaagcaaggacactatagggtctcgcagcacaccacagacattcttacactgggtgtactgtatggaaaacttagacctactgggtcccactgacgtggatgccctaatgtcaatgcttagatctttgtcaagagtagacctacagcgccaagtgcaaaccctaatgggccttcacctttccggcccatcacactcccaacactatcgccatacaccactcgagaccgatttctacgactacaaggacgacgatgacaagactagtggctccggcgagggcagaggaagtctactaacctgcggagatgtggaagaaaatcctggcccacatatgaccgagtacaagcccacggtgcgcctcgccacccgcgacgacgtccccagggccgtacgcaccctcgccgccgcgttcgccgactaccccgccacgcgccacaccgtcgatccggaccgccacatcgagcgggtcaccgagctgcaagaactcttcctcacgcgcgtcgggctcgacatcggcaaggtgtgggtcgcggacgacggcgccgcggtggcggtctggaccacgccggagagcgtcgaagcgggggcggtgttcgccgagatcggcccgcgcatggccgagttgagcggttcccggctggccgcgcagcaacagatggaaggcctcctggcgccgcaccggcccaaggagcccgcgtggttcctggccaccgtcggcgtctcgcccgaccaccagggcaagggtctgggcagcgccgtcgtgctccccggagtggaggcggccgagcgcgccggggtgcccgccttcctggagacctccgcgccccgcaacctccccttctacgagcggctcggcttcaccgtcaccgccgacgtcgaggtgcccgaaggaccgcgcacctggtgcatgacccgcaagcccggtgcctga

SEQ ID NO: 8036 - DNA, 2574 bp, Artificial Sequence
  Synthetic Polynucloetide
atggccttaccagtgaccgccttgctcctgccgctggccttgctgctccacgccgccaggccgagctacgtgctgacacagcctccatccgtgtctgtggctccaggacagaccgccagaatcacatgcggcggcaacaacatcggcggcaagagcgtgcactggtatcagcagccacctggacaggctccagtggtggtggtgtacgacgacagcgatagacctagcggcatccccgagagattcagcggcagcaattccggcaataccgccacactgaccatcagcagagtggaagctggcgacgaggccgtgtactactgccaagtgtgggacagcagcagcgatcacgtggtgtttggcggcggaacaaagctgacagtgcttctcgagatccagaaccctgatcctgccgtgtaccagctgcgggatagcaagagcagcgacaagagcgtgtgtctgttcaccgacttcgacagccagaccaacgtgtcccagagcaaggactccgacgtgtacatcaccgataagtgcgtgctggacatgcggagcatggacttcaagagcaactccgccgtggcctggtccaacaagtccgatttcgcctgcgccaacgccttcaacaacagcattatccccgaggacacattcttcccaagcagcgacgtgccctgcgacgtgaagctggtggaaaagagcttcgagacagacaccaacctgaacttccagaacctgagcgtgatcggcttcagaatcctgctgctgaaagtggccggctttaacctgctgatgaccctgcggctgtggtccagccgcgccaagagaagcggatctggcgtgaagcagaccctgaatttcgacctgctgaagctggctggcgacgtggaatccaacccaggccctactagtatggactggatttggcgcatccttttccttgtcggcgctgctaccggcgcgcattccttcgaacaactccagctgcaagagtctggccctggcctggtcaagcctagcgaaacactgagcctgacctgtaccgtgtctggcggctctatcagctccggcagctatttctggggctggatcagacaacctcctggcaaaggactggaatggatcggctccatctactacagcggcatcacctactacaaccccagcctgaagtccagagtgaccatctccgtggacaccagcaagaaccagttctccctgaagctgagcagcgtgacagccgccgataccgccgtgtattattgtgccagacatgacggcgctgtggccggcctgtttgattattggggacagggcaccctggtcaccgtgtcatctgctacgcgtgaggacctgaagaacgtgttcccacctgaggtggccgtgttcgagcctagcaaggccgagatcgcccacacccagaaagccaccctcgtgtgcctggctaccggcttctaccccgaccatgtggaactgtcttggtgggtcaacggcaaagaggtgcacagcggcgtgtgtaccgacccccagccactgaaagaacagcccgccctgaacgacagccggtactgcctgagcagcagactgagagtgtccgccaccttctggcagaacccccggaaccacttcagatgccaggtgcagttctacggcctgagcgagaacgacgagtggacccaggacagagccaagcccgtgacccagatcgtgtctgccgaagcctggggcagagccgattgcggcatcaccagcgccagctaccaccagggcgtgctgagcgccaccatcctgtacgagatcctgctgggcaaggccaccctgtacgccgtgctggtgtctgccctggtgctgatggctatggtcaagcggaaggacagccggggaagggccaagcgatctggatctggagcaacaaacttctcactactcaaacaagcaggtgacgtggaggagaatcccgggccttctagaggccatatgaccgagtacaagcccacggtgcgcctcgccacccgcgacgacgtccccagggccgtacgcaccctcgccgccgcgttcgccgactaccccgccacgcgccacaccgtcgatccggaccgccacatcgagcgggtcaccgagctgcaagaactcttcctcacgcgcgtcgggctcgacatcggcaaggtgtgggtcgcggacgacggcgccgcggtggcggtctggaccacgccggagagcgtcgaagcgggggcggtgttcgccgagatcggcccgcgcatggccgagttgagcggttcccggctggccgcgcagcaacagatggaaggcctcctggcgccgcaccggcccaaggagcccgcgtggttcctggccaccgtcggcgtctcgcccgaccaccagggcaagggtctgggcagcgccgtcgtgctccccggagtggaggcggccgagcgcgccggggtgcccgccttcctggagacctccgcgccccgcaacctccccttctacgagcggctcggcttcaccgtcaccgccgacgtcgaggtgcccgaaggaccgcgcacctggtgcatgacccgcaagcccggtgcctga

SEQ ID NO: 8037 - DNA, 2571 bp, Artificial Sequence
  Synthetic Polynucloetide
atggccttaccagtgaccgccttgctcctgccgctggccttgctgctccacgccgccaggccgagctacgtgctgacacagcctccatccgtgtctgtggctccaggacagaccgccagaatcacatgcggcggcaacaacatcggcggcaagagcgtgcactggtatcagcagccacctggacaggctccagtggtggtggtgtacgacgacagcgatagacctagcggcatccccgagagattcagcggcagcaattccggcaataccgccacactgaccatcagcagagtggaagctggcgacgaggccgtgtactactgccaagtgtgggacagcagcagcgatcacgtggtgtttggcggcggaacaaagctgacagtgcttctcgaggacctgaagaacgtgttcccacctgaggtggccgtgttcgagcctagcaaggccgagatcgcccacacccagaaagccaccctcgtgtgcctggctaccggcttctaccccgaccatgtggaactgtcttggtgggtcaacggcaaagaggtgcacagcggcgtgtgtaccgacccccagccactgaaagaacagcccgccctgaacgacagccggtactgcctgagcagcagactgagagtgtccgccaccttctggcagaacccccggaaccacttcagatgccaggtgcagttctacggcctgagcgagaacgacgagtggacccaggacagagccaagcccgtgacccagatcgtgtctgccgaagcctggggcagagccgattgcggcatcaccagcgccagctaccaccagggcgtgctgagcgccaccatcctgtacgagatcctgctgggcaaggccaccctgtacgccgtgctggtgtctgccctggtgctgatggctatggtcaagcggaaggacagccggggaagggccaagcgatctggatctggagcaacaaacttctcactactcaaacaagcaggtgacgtggaggagaatcccgggcctactagtatggactggatttggcgcatccttttccttgtcggcgctgctaccggcgcgcattccttcgaacaactccagctgcaagagtctggccctggcctggtcaagcctagcgaaacactgagcctgacctgtaccgtgtctggcggctctatcagctccggcagctatttctggggctggatcagacaacctcctggcaaaggactggaatggatcggctccatctactacagcggcatcacctactacaaccccagcctgaagtccagagtgaccatctccgtggacaccagcaagaaccagttctccctgaagctgagcagcgtgacagccgccgataccgccgtgtattattgtgccagacatgacggcgctgtggccggcctgtttgattattggggacagggcaccctggtcaccgtgtcatctgctacgcgtatccagaaccctgatcctgccgtgtaccagctgcgggatagcaagagcagcgacaagagcgtgtgtctgttcaccgacttcgacagccagaccaacgtgtcccagagcaaggactccgacgtgtacatcaccgataagtgcgtgctggacatgcggagcatggacttcaagagcaactccgccgtggcctggtccaacaagtccgatttcgcctgcgccaacgccttcaacaacagcattatccccgaggacacattcttcccaagcagcgacgtgccctgcgacgtgaagctggtggaaaagagcttcgagacagacaccaacctgaacttccagaacctgagcgtgatcggcttcagaatcctgctgctgaaagtggccggctttaacctgctgatgaccctgcggctgtggtccagccgcgccaagagaagcggatctggcgtgaagcagaccctgaatttcgacctgctgaagctggctggcgacgtggaatccaacccaggcccttctagaggccatatgaccgagtacaagcccacggtgcgcctcgccacccgcgacgacgtccccagggccgtacgcaccctcgccgccgcgttcgccgactaccccgccacgcgccacaccgtcgatccggaccgccacatcgagcgggtcaccgagctgcaagaactcttcctcacgcgcgtcgggctcgacatcggcaaggtgtgggtcgcggacgacggcgccgcggtggcggtctggaccacgccggagagcgtcgaagcgggggcggtgttcgccgagatcggcccgcgcatggccgagttgagcggttcccggctggccgcgcagcaacagatggaaggcctcctggcgccgcaccggcccaaggagcccgcgtggttcctggccaccgtcggcgtctcgcccgaccaccagggcaagggtctgggcagcgccgtcgtgctccccggagtggaggcggccgagcgcgccggggtgcccgccttcctggagacctccgcgccccgcaacctccccttctacgagcggctcggcttcaccgtcaccgccgacgtcgaggtgcccgaaggaccgcgcacctggtgcatgacccgcaagcccggtgcctga

SEQ ID NO: 8038 - DNA, 1869 bp, Artificial Sequence
  Synthetic Polynucloetide
atggccttaccagtgaccgccttgctcctgccgctggccttgctgctccacgccgccaggccgagctacgtgctgacacagcctccatccgtgtctgtggctccaggacagaccgccagaatcacatgcggcggcaacaacatcggcggcaagagcgtgcactggtatcagcagccacctggacaggctccagtggtggtggtgtacgacgacagcgatagacctagcggcatccccgagagattcagcggcagcaattccggcaataccgccacactgaccatcagcagagtggaagctggcgacgaggccgtgtactactgccaagtgtgggacagcagcagcgatcacgtggtgtttggcggcggaacaaagctgacagtgcttctcgaggacctgaagaacgtgttcccacctgaggtggccgtgttcgagcctagcgaggccgagatcagccacacccagaaagccaccctcgtgtgcctggctaccggcttctaccccgaccatgtggaactgtcttggtgggtcaacggcaaagaggtgcacagcggcgtgtgtaccgacccccagccactgaaagaacagcccgccctgaacgacagccggtactgcctgagcagcagactgagagtgtccgccaccttctggcagaacccccggaaccacttcagatgccaggtgcagttctacggcctgagcgagaacgacgagtggacccaggacagagccaagcccgtgacccagatcgtgtctgccgaagcctggggcagagccgattgcggctttaccagcgagagctaccagcagggcgtgctgagcgccaccatcctgtacgagatcctgctgggcaaggccaccctgtacgccgtgctggtgtctgccctggtgctgatggctatggtcaagcggaaggacagccggggaagggccaagcgatctggatctggagcaacaaacttctcactactcaaacaagcaggtgacgtggaggagaatcccgggcctactagtatggactggatttggcgcatccttttccttgtcggcgctgctaccggcgcgcattccttcgaacaactccagctgcaagagtctggccctggcctggtcaagcctagcgaaacactgagcctgacctgtaccgtgtctggcggctctatcagctccggcagctatttctggggctggatcagacaacctcctggcaaaggactggaatggatcggctccatctactacagcggcatcacctactacaaccccagcctgaagtccagagtgaccatctccgtggacaccagcaagaaccagttctccctgaagctgagcagcgtgacagccgccgataccgccgtgtattattgtgccagacatgacggcgctgtggccggcctgtttgattattggggacagggcaccctggtcaccgtgtcatctgctacgcgtatccagaaccctgatcctgccgtgtaccagctgcgggatagcaagagcagcgacaagagcgtgtgtctgttcaccgacttcgacagccagaccaacgtgtcccagagcaaggactccgacgtgtacatcaccgataagtgcgtgctggacatgcggagcatggacttcaagagcaactccgccgtggcctggtccaacaagtccgatttcgcctgcgccaacgccttcaacaacagcattatccccgaggacacattcttcccaagccccgagagcagctgcgacgtgaagctggtggaaaagagcttcgagacagacaccaacctgaacttccagaacctgagcgtgatcggcttcagaatcctgctgctgaaagtggccggctttaacctgctgatgaccctgcggctgtggtccagc

SEQ ID NO: 8039 - DNA, 2544 bp, Artificial Sequence
  Synthetic Polynucloetide
atggccttaccagtgaccgccttgctcctgccgctggccttgctgctccacgccgccaggccgagctacgtgctgacacagcctccatccgtgtctgtggctccaggacagaccgccagaatcacatgcggcggcaacaacatcggcggcaagagcgtgcactggtatcagcagccacctggacaggctccagtggtggtggtgtacgacgacagcgatagacctagcggcatccccgagagattcagcggcagcaattccggcaataccgccacactgaccatcagcagagtggaagctggcgacgaggccgtgtactactgccaagtgtgggacagcagcagcgatcacgtggtgtttggcggcggaacaaagctgacagtgcttctcgaggacctgaagaacgtgttcccacctgaggtggccgtgttcgagcctagcgaggccgagatcagccacacccagaaagccaccctcgtgtgcctggctaccggcttctaccccgaccatgtggaactgtcttggtgggtcaacggcaaagaggtgcacagcggcgtgtgtaccgacccccagccactgaaagaacagcccgccctgaacgacagccggtactgcctgagcagcagactgagagtgtccgccaccttctggcagaacccccggaaccacttcagatgccaggtgcagttctacggcctgagcgagaacgacgagtggacccaggacagagccaagcccgtgacccagatcgtgtctgccgaagcctggggcagagccgattgcggctttaccagcgagagctaccagcagggcgtgctgagcgccaccatcctgtacgagatcctgctgggcaaggccaccctgtacgccgtgctggtgtctgccctggtgctgatggctatggtcaagcggaaggacagccggggaagggccaagcgatctggatctggagcaacaaacttctcactactcaaacaagcaggtgacgtggaggagaatcccgggcctactagtatggactggatttggcgcatccttttccttgtcggcgctgctaccggcgcgcattccttcgaacaactccagctgcaagagtctggccctggcctggtcaagcctagcgaaacactgagcctgacctgtaccgtgtctggcggctctatcagctccggcagctatttctggggctggatcagacaacctcctggcaaaggactggaatggatcggctccatctactacagcggcatcacctactacaaccccagcctgaagtccagagtgaccatctccgtggacaccagcaagaaccagttctccctgaagctgagcagcgtgacagccgccgataccgccgtgtattattgtgccagacatgacggcgctgtggccggcctgtttgattattggggacagggcaccctggtcaccgtgtcatctgctacgcgtatccagaaccctgatcctgccgtgtaccagctgcgggatagcaagagcagcgacaagagcgtgtgtctgttcaccgacttcgacagccagaccaacgtgtcccagagcaaggactccgacgtgtacatcaccgataagtgcgtgctggacatgcggagcatggacttcaagagcaactccgccgtggcctggtccaacaagtccgatttcgcctgcgccaacgccttcaacaacagcattatccccgaggacacattcttcccaagccccgagagcagctgcgacgtgaagctggtggaaaagagcttcgagacagacaccaacctgaacttccagaacctgagcgtgatcggcttcagaatcctgctgctgaaagtggccggctttaacctgctgatgaccctgcggctgtggtccagccgcgccaagagaagcggatctggcgtgaagcagaccctgaatttcgacctgctgaagctggctggcgacgtggaatccaacccaggcccttctagaggcgggatccacaccatggctacctacgaggtgctgtgcgaggtggcaagaaagctgggcaccgacgacagagaagtggtgctgttcctgctgaacgtgttcatccctcagcctacactggcccagctgatcggtgcactgagagccctgaaagaggaaggccggctgacctttcctctgctggccgaatgcctgttcagagccggaagaagggatctgctgcgggacctgctgcatctggaccccagatttctggaaagacacctggccggcaccatgagctacttcagcccttaccagctgaccgtgctgcacgttgacggcgaactgtgcgccagagatattcggagcctgatcttcctgagcaaggacaccatcggcagccggtctacccctcagacatttctgcactgggtgtactgcatggaaaacctggacctgctcggccccacagatgtggatgccctgatgtccatgctgagaagcctgagcagagtggacctccagagacaggtgcagacactgatgggactgcacctgagcggacctagccacagccagcactacagacacacccct

SEQ ID NO: 8040 - DNA, 1881 bp, Artificial Sequence
  Synthetic Polynucloetide
atggccttaccagtgaccgccttgctcctgccgctggccttgctgctccacgccgccaggccgagctacgtgctgacacagcctccatccgtgtctgtggctccaggacagaccgccagaatcacatgcggcggcaacaacatcggcggcaagagcgtgcactggtatcagcagccacctggacaggctccagtggtggtggtgtacgacgacagcgatagacctagcggcatccccgagagattcagcggcagcaattccggcaataccgccacactgaccatcagcagagtggaagctggcgacgaggccgtgtactactgccaagtgtgggacagcagcagcgatcacgtggtgtttggcggcggaacaaagctgacagtgcttctcgagatccagaaccctgatcctgccgtgtaccagctgcgggatagcaagagcagcgacaagagcgtgtgtctgttcaccgacttcgacagccagaccaacgtgtcccagagcaaggactccgacgtgtacatcaccgataagtgcgtgctggacatgcggagcatggacttcaagagcaactccgccgtggcctggtccaacaagtccgatttcgcctgcgccaacgccttcaacaacagcattatccccgaggacacattcttcccaagccccgagagcagctgcgacgtgaagctggtggaaaagagcttcgagacagacaccaacctgaacttccagaacctgagcgtgatcggcttcagaatcctgctgctgaaagtggccggctttaacctgctgatgaccctgcggctgtggtccagccgcgccaagagaagcggatctggcgtgaagcagaccctgaatttcgacctgctgaagctggctggcgacgtggaatccaacccaggccctactagtatggactggatttggcgcatccttttccttgtcggcgctgctaccggcgcgcattccttcgaacaactccagctgcaagagtctggccctggcctggtcaagcctagcgaaacactgagcctgacctgtaccgtgtctggcggctctatcagctccggcagctatttctggggctggatcagacaacctcctggcaaaggactggaatggatcggctccatctactacagcggcatcacctactacaaccccagcctgaagtccagagtgaccatctccgtggacaccagcaagaaccagttctccctgaagctgagcagcgtgacagccgccgataccgccgtgtattattgtgccagacatgacggcgctgtggccggcctgtttgattattggggacagggcaccctggtcaccgtgtcatctgctacgcgtgaggacctgaagaacgtgttcccacctgaggtggccgtgttcgagcctagcgaggccgagatcagccacacccagaaagccaccctcgtgtgcctggctaccggcttctaccccgaccatgtggaactgtcttggtgggtcaacggcaaagaggtgcacagcggcgtgtgtaccgacccccagccactgaaagaacagcccgccctgaacgacagccggtactgcctgagcagcagactgagagtgtccgccaccttctggcagaacccccggaaccacttcagatgccaggtgcagttctacggcctgagcgagaacgacgagtggacccaggacagagccaagcccgtgacccagatcgtgtctgccgaagcctggggcagagccgattgcggctttaccagcgagagctaccagcagggcgtgctgagcgccaccatcctgtacgagatcctgctgggcaaggccaccctgtacgccgtgctggtgtctgccctggtgctgatggctatggtcaagcggaaggacagccgggga

SEQ ID NO: 8041 - DNA, 2547 bp, Artificial Sequence
  Synthetic Polynucloetide
atggccttaccagtgaccgccttgctcctgccgctggccttgctgctccacgccgccaggccgagctacgtgctgacacagcctccatccgtgtctgtggctccaggacagaccgccagaatcacatgcggcggcaacaacatcggcggcaagagcgtgcactggtatcagcagccacctggacaggctccagtggtggtggtgtacgacgacagcgatagacctagcggcatccccgagagattcagcggcagcaattccggcaataccgccacactgaccatcagcagagtggaagctggcgacgaggccgtgtactactgccaagtgtgggacagcagcagcgatcacgtggtgtttggcggcggaacaaagctgacagtgcttctcgagatccagaaccctgatcctgccgtgtaccagctgcgggatagcaagagcagcgacaagagcgtgtgtctgttcaccgacttcgacagccagaccaacgtgtcccagagcaaggactccgacgtgtacatcaccgataagtgcgtgctggacatgcggagcatggacttcaagagcaactccgccgtggcctggtccaacaagtccgatttcgcctgcgccaacgccttcaacaacagcattatccccgaggacacattcttcccaagccccgagagcagctgcgacgtgaagctggtggaaaagagcttcgagacagacaccaacctgaacttccagaacctgagcgtgatcggcttcagaatcctgctgctgaaagtggccggctttaacctgctgatgaccctgcggctgtggtccagccgcgccaagagaagcggatctggcgtgaagcagaccctgaatttcgacctgctgaagctggctggcgacgtggaatccaacccaggccctactagtatggactggatttggcgcatccttttccttgtcggcgctgctaccggcgcgcattccttcgaacaactccagctgcaagagtctggccctggcctggtcaagcctagcgaaacactgagcctgacctgtaccgtgtctggcggctctatcagctccggcagctatttctggggctggatcagacaacctcctggcaaaggactggaatggatcggctccatctactacagcggcatcacctactacaaccccagcctgaagtccagagtgaccatctccgtggacaccagcaagaaccagttctccctgaagctgagcagcgtgacagccgccgataccgccgtgtattattgtgccagacatgacggcgctgtggccggcctgtttgattattggggacagggcaccctggtcaccgtgtcatctgctacgcgtgaggacctgaagaacgtgttcccacctgaggtggccgtgttcgagcctagcgaggccgagatcagccacacccagaaagccaccctcgtgtgcctggctaccggcttctaccccgaccatgtggaactgtcttggtgggtcaacggcaaagaggtgcacagcggcgtgtgtaccgacccccagccactgaaagaacagcccgccctgaacgacagccggtactgcctgagcagcagactgagagtgtccgccaccttctggcagaacccccggaaccacttcagatgccaggtgcagttctacggcctgagcgagaacgacgagtggacccaggacagagccaagcccgtgacccagatcgtgtctgccgaagcctggggcagagccgattgcggctttaccagcgagagctaccagcagggcgtgctgagcgccaccatcctgtacgagatcctgctgggcaaggccaccctgtacgccgtgctggtgtctgccctggtgctgatggctatggtcaagcggaaggacagccggggaagggccaagcgatctggatctggagcaacaaacttctcactactcaaacaagcaggtgacgtggaggagaatcccgggccttctagaggcgggatccacaccatggctacctacgaggtgctgtgcgaggtggcaagaaagctgggcaccgacgacagagaagtggtgctgttcctgctgaacgtgttcatccctcagcctacactggcccagctgatcggtgcactgagagccctgaaagaggaaggccggctgacctttcctctgctggccgaatgcctgttcagagccggaagaagggatctgctgcgggacctgctgcatctggaccccagatttctggaaagacacctggccggcaccatgagctacttcagcccttaccagctgaccgtgctgcacgttgacggcgaactgtgcgccagagatattcggagcctgatcttcctgagcaaggacaccatcggcagccggtctacccctcagacatttctgcactgggtgtactgcatggaaaacctggacctgctcggccccacagatgtggatgccctgatgtccatgctgagaagcctgagcagagtggacctccagagacaggtgcagacactgatgggactgcacctgagcggacctagccacagccagcactacagacacacccct

SEQ ID NO: 8042 - DNA, 2706 bp, Artificial Sequence
  Synthetic Polynucloetide
atggccttaccagtgaccgccttgctcctgccgctggccttgctgctccacgccgccaggccgctcgaggggaaaccaattcccaaccctcttctgggactggattcaaccggcagcggcgaggacctgaagaacgtgttcccacctgaggtggccgtgttcgagcctagcaaggccgagatcgcccacacccagaaagccaccctcgtgtgcctggctaccggcttctaccccgaccatgtggaactgtcttggtgggtcaacggcaaagaggtgcacagcggcgtgtgtaccgacccccagccactgaaagaacagcccgccctgaacgacagccggtactgcctgagcagcagactgagagtgtccgccaccttctggcagaacccccggaaccacttcagatgccaggtgcagttctacggcctgagcgagaacgacgagtggacccaggacagagccaagcccgtgacccagatcgtgtctgccgaagcctggggcagagccgattgcggcatcaccagcgccagctaccaccagggcgtgctgagcgccaccatcctgtacgagatcctgctgggcaaggccaccctgtacgccgtgctggtgtctgccctggtgctgatggctatggtcaagcggaaggacagccggggaagggccaagcgatctggatctggagcaacaaacttctcactactcaaacaagcaggtgacgtggaggagaatcccgggcctactagcatggccttaccagtgaccgccttgctcctgccgctggccttgctgctccacgccgccaggccgagctacgtgctgacacagcctccatccgtgtctgtggctccaggacagaccgccagaatcacatgcggcggcaacaacatcggcggcaagagcgtgcactggtatcagcagccacctggacaggctccagtggtggtggtgtacgacgacagcgatagacctagcggcatccccgagagattcagcggcagcaattccggcaataccgccacactgaccatcagcagagtggaagctggcgacgaggccgtgtactactgccaagtgtgggacagcagcagcgatcacgtggtgtttggcggcggaacaaagctgacagtgcttggcggaggcggaagtggaggcggaggatctggcggcggaggctctcaactccagctgcaagagtctggccctggcctggtcaagcctagcgaaacactgagcctgacctgtaccgtgtctggcggctctatcagctccggcagctatttctggggctggatcagacaacctcctggcaaaggactggaatggatcggctccatctactacagcggcatcacctactacaaccccagcctgaagtccagagtgaccatctccgtggacaccagcaagaaccagttctccctgaagctgagcagcgtgacagccgccgataccgccgtgtattattgtgccagacatgacggcgctgtggccggcctgtttgattattggggacagggcaccctggtcaccgtgtcatctgctacgcgtgagcagaaactgatctcggaagaggatgggagcggcatccagaaccctgatcctgccgtgtaccagctgcgggatagcaagagcagcgacaagagcgtgtgtctgttcaccgacttcgacagccagaccaacgtgtcccagagcaaggactccgacgtgtacatcaccgataagtgcgtgctggacatgcggagcatggacttcaagagcaactccgccgtggcctggtccaacaagtccgatttcgcctgcgccaacgccttcaacaacagcattatccccgaggacacattcttcccaagcagcgacgtgccctgcgacgtgaagctggtggaaaagagcttcgagacagacaccaacctgaacttccagaacctgagcgtgatcggcttcagaatcctgctgctgaaagtggccggctttaacctgctgatgaccctgcggctgtggtccagccgcgccaagagaagcggatctggcgtgaagcagaccctgaatttcgacctgctgaagctggctggcgacgtggaatccaacccaggcccttctagaggccatatgaccgagtacaagcccacggtgcgcctcgccacccgcgacgacgtccccagggccgtacgcaccctcgccgccgcgttcgccgactaccccgccacgcgccacaccgtcgatccggaccgccacatcgagcgggtcaccgagctgcaagaactcttcctcacgcgcgtcgggctcgacatcggcaaggtgtgggtcgcggacgacggcgccgcggtggcggtctggaccacgccggagagcgtcgaagcgggggcggtgttcgccgagatcggcccgcgcatggccgagttgagcggttcccggctggccgcgcagcaacagatggaaggcctcctggcgccgcaccggcccaaggagcccgcgtggttcctggccaccgtcggcgtctcgcccgaccaccagggcaagggtctgggcagcgccgtcgtgctccccggagtggaggcggccgagcgcgccggggtgcccgccttcctggagacctccgcgccccgcaacctccccttctacgagcggctcggcttcaccgtcaccgccgacgtcgaggtgcccgaaggaccgcgcacctggtgcatgacccgcaagcccggtgcctga

SEQ ID NO: 8043 - DNA, 2709 bp, Artificial Sequence
  Synthetic Polynucloetide
atggccttaccagtgaccgccttgctcctgccgctggccttgctgctccacgccgccaggccgctcgagcagaaactgatctcggaagaggatctgggctccggcgatcgccctgatcctgccgtgtaccagctgcgggatagcaagagcagcgacaagagcgtgtgtctgttcaccgacttcgacagccagaccaacgtgtcccagagcaaggactccgacgtgtacatcaccgataagtgcgtgctggacatgcggagcatggacttcaagagcaactccgccgtggcctggtccaacaagtccgatttcgcctgcgccaacgccttcaacaacagcattatccccgaggacacattcttcccaagccccgagagcagctgcgacgtgaagctggtggaaaagagcttcgagacagacaccaacctgaacttccagaacctgagcgtgatcggcttcagaatcctgctgctgaaagtggccggctttaacctgctgatgaccctgcggctgtggtccagctctagtcgcgccaagagaagcggatctggcgtgaagcagaccctgaatttcgacctgctgaagctggctggcgacgtggaatccaacccaggccccactagcatggccttaccagtgaccgccttgctcctgccgctggccttgctgctccacgccgccaggccgagctacgtgctgacacagcctccatccgtgtctgtggctccaggacagaccgccagaatcacatgcggcggcaacaacatcggcggcaagagcgtgcactggtatcagcagccacctggacaggctccagtggtggtggtgtacgacgacagcgatagacctagcggcatccccgagagattcagcggcagcaattccggcaataccgccacactgaccatcagcagagtggaagctggcgacgaggccgtgtactactgccaagtgtgggacagcagcagcgatcacgtggtgtttggcggcggaacaaagctgacagtgcttggcggaggcggaagtggaggcggaggatctggcggcggaggctctcaactccagctgcaagagtctggccctggcctggtcaagcctagcgaaacactgagcctgacctgtaccgtgtctggcggctctatcagctccggcagctatttctggggctggatcagacaacctcctggcaaaggactggaatggatcggctccatctactacagcggcatcacctactacaaccccagcctgaagtccagagtgaccatctccgtggacaccagcaagaaccagttctccctgaagctgagcagcgtgacagccgccgataccgccgtgtattattgtgccagacatgacggcgctgtggccggcctgtttgattattggggacagggcaccctggtcaccgtgtcatctgctacgcgtgggaaaccaattcccaaccctcttctgggactggattcaaccggcagcggcgaggacctgaagaacgtgttcccacctgaggtggccgtgttcgagcctagcgaggccgagatcagccacacccagaaagccaccctcgtgtgcctggctaccggcttctaccccgaccatgtggaactgtcttggtgggtcaacggcaaagaggtgcacagcggcgtgtgtaccgacccccagccactgaaagaacagcccgccctgaacgacagccggtactgcctgagcagcagactgagagtgtccgccaccttctggcagaacccccggaaccacttcagatgccaggtgcagttctacggcctgagcgagaacgacgagtggacccaggacagagccaagcccgtgacccagatcgtgtctgccgaagcctggggcagagccgattgcggctttaccagcgagagctaccagcagggcgtgctgagcgccaccatcctgtacgagatcctgctgggcaaggccaccctgtacgccgtgctggtgtctgccctggtgctgatggctatggtcaagcggaaggacagccggggaagggccaagcgatctggatctggagcaacaaacttctcactactcaaacaagcaggtgacgtggaggagaatcccgggccttctagaggccatatgaccgagtacaagcccacggtgcgcctcgccacccgcgacgacgtccccagggccgtacgcaccctcgccgccgcgttcgccgactaccccgccacgcgccacaccgtcgatccggaccgccacatcgagcgggtcaccgagctgcaagaactcttcctcacgcgcgtcgggctcgacatcggcaaggtgtgggtcgcggacgacggcgccgcggtggcggtctggaccacgccggagagcgtcgaagcgggggcggtgttcgccgagatcggcccgcgcatggccgagttgagcggttcccggctggccgcgcagcaacagatggaaggcctcctggcgccgcaccggcccaaggagcccgcgtggttcctggccaccgtcggcgtctcgcccgaccaccagggcaagggtctgggcagcgccgtcgtgctccccggagtggaggcggccgagcgcgccggggtgcccgccttcctggagacctccgcgccccgcaacctccccttctacgagcggctcggcttcaccgtcaccgccgacgtcgaggtgcccgaaggaccgcgcacctggtgcatgacccgcaagcccggtgcctga

SEQ ID NO: 8044 - DNA, 2571 bp, Artificial Sequence
  Synthetic Polynucloetide
atggccttaccagtgaccgccttgctcctgccgctggccttgctgctccacgccgccaggccgagctacgtgctgacacagcctccatccgtgtctgtggctccaggacagaccgccagaatcacatgcggcggcaacaacatcggcggcaagagcgtgcactggtatcagcagccacctggacaggctccagtggtggtggtgtacgacgacagcgatagacctagcggcatccccgagagattcagcggcagcaattccggcaataccgccacactgaccatcagcagagtggaagctggcgacgaggccgtgtactactgccaagtgtgggacagcagcagcgatcacgtggtgtttggcggcggaacaaagctgacagtgcttctcgaggacctgaagaacgtgttcccacctgaggtggccgtgttcgagcctagcgaggccgagatcagccacacccagaaagccaccctcgtgtgcctggctaccggcttctaccccgaccatgtggaactgtcttggtgggtcaacggcaaagaggtgcacagcggcgtgtctaccgacccccagccactgaaagaacagcccgccctgaacgacagccggtactgcctgagcagcagactgagagtgtccgccaccttctggcagaacccccggaaccacttcagatgccaggtgcagttctacggcctgagcgagaacgacgagtggacccaggacagagccaagcccgtgacccagatcgtgtctgccgaagcctggggcagagccgattgcggctttaccagcgagagctaccagcagggcgtgctgagcgccaccatcctgtacgagatcctgctgggcaaggccaccctgtacgccgtgctggtgtctgccctggtgctgatggctatggtcaagcggaaggacagccggggaagggccaagcgatctggatctggagcaacaaacttctcactactcaaacaagcaggtgacgtggaggagaatcccgggcctactagtatggactggatttggcgcatccttttccttgtcggcgctgctaccggcgcgcattccttcgaacaactccagctgcaagagtctggccctggcctggtcaagcctagcgaaacactgagcctgacctgtaccgtgtctggcggctctatcagctccggcagctatttctggggctggatcagacaacctcctggcaaaggactggaatggatcggctccatctactacagcggcatcacctactacaaccccagcctgaagtccagagtgaccatctccgtggacaccagcaagaaccagttctccctgaagctgagcagcgtgacagccgccgataccgccgtgtattattgtgccagacatgacggcgctgtggccggcctgtttgattattggggacagggcaccctggtcaccgtgtcatctgctacgcgtatccagaaccctgatcctgccgtgtaccagctgcgggatagcaagagcagcgacaagagcgtgtgtctgttcaccgacttcgacagccagaccaacgtgtcccagagcaaggactccgacgtgtacatcaccgataagaccgtgctggacatgcggagcatggacttcaagagcaactccgccgtggcctggtccaacaagtccgatttcgcctgcgccaacgccttcaacaacagcattatccccgaggacacattcttcccaagccccgagagcagctgcgacgtgaagctggtggaaaagagcttcgagacagacaccaacctgaacttccagaacctgagcgtgatcggcttcagaatcctgctgctgaaagtggccggctttaacctgctgatgaccctgcggctgtggtccagccgcgccaagagaagcggatctggcgtgaagcagaccctgaatttcgacctgctgaagctggctggcgacgtggaatccaacccaggcccttctagaggccatatgaccgagtacaagcccacggtgcgcctcgccacccgcgacgacgtccccagggccgtacgcaccctcgccgccgcgttcgccgactaccccgccacgcgccacaccgtcgatccggaccgccacatcgagcgggtcaccgagctgcaagaactcttcctcacgcgcgtcgggctcgacatcggcaaggtgtgggtcgcggacgacggcgccgcggtggcggtctggaccacgccggagagcgtcgaagcgggggcggtgttcgccgagatcggcccgcgcatggccgagttgagcggttcccggctggccgcgcagcaacagatggaaggcctcctggcgccgcaccggcccaaggagcccgcgtggttcctggccaccgtcggcgtctcgcccgaccaccagggcaagggtctgggcagcgccgtcgtgctccccggagtggaggcggccgagcgcgccggggtgcccgccttcctggagacctccgcgccccgcaacctccccttctacgagcggctcggcttcaccgtcaccgccgacgtcgaggtgcccgaaggaccgcgcacctggtgcatgacccgcaagcccggtgcctga

SEQ ID NO: 8045 - DNA, 2817 bp, Artificial Sequence
  Synthetic Polynucloetide
atggccttaccagtgaccgccttgctcctgccgctggccttgctgctccacgccgccaggccgagctacgtgctgacacagcctccatccgtgtctgtggctccaggacagaccgccagaatcacatgcggcggcaacaacatcggcggcaagagcgtgcactggtatcagcagccacctggacaggctccagtggtggtggtgtacgacgacagcgatagacctagcggcatccccgagagattcagcggcagcaattccggcaataccgccacactgaccatcagcagagtggaagctggcgacgaggccgtgtactactgccaagtgtgggacagcagcagcgatcacgtggtgtttggcggcggaacaaagctgacagtgcttctcgaggacctgaagaacgtgttcccacctgaggtggccgtgttcgagcctagcgaggccgagatcagccacacccagaaagccaccctcgtgtgcctggctaccggcttctaccccgaccatgtggaactgtcttggtgggtcaacggcaaagaggtgcacagcggcgtgtctaccgacccccagccactgaaagaacagcccgccctgaacgacagccggtactgcctgagcagcagactgagagtgtccgccaccttctggcagaacccccggaaccacttcagatgccaggtgcagttctacggcctgagcgagaacgacgagtggacccaggacagagccaagcccgtgacccagatcgtgtctgccgaagcctggggcagagccgattgcggctttaccagcgagagctaccagcagggcgtgctgagcgccaccatcctgtacgagatcctgctgggcaaggccaccctgtacgccgtgctggtgtctgccctggtgctgatggctatggtcaagcggaaggacagccggggaagggccaagcgatctggatctggagcaacaaacttctcactactcaaacaagcaggtgacgtggaggagaatcccgggcctactagtatggactggatttggcgcatccttttccttgtcggcgctgctaccggcgcgcattccttcgaacaactccagctgcaagagtctggccctggcctggtcaagcctagcgaaacactgagcctgacctgtaccgtgtctggcggctctatcagctccggcagctatttctggggctggatcagacaacctcctggcaaaggactggaatggatcggctccatctactacagcggcatcacctactacaaccccagcctgaagtccagagtgaccatctccgtggacaccagcaagaaccagttctccctgaagctgagcagcgtgacagccgccgataccgccgtgtattattgtgccagacatgacggcgctgtggccggcctgtttgattattggggacagggcaccctggtcaccgtgtcatctgctacgcgtgagcagaaactgatctcggaagaggatgggagcggcaccccattcccttctctggcccctcccatcatgctgctggtggacggcaagcagcagatggtggtcgtgtgcctggtgctggatgtggccccacctggactggacagccccatctggtttagcgccggcaatggctctgccctggacgcctttacctacggcccaagccctgccaccgatggcacctggacaaatctggcccacctgagcctgcccagcgaggaactggcttcttgggagcctctcgtgtgccacacaggacctggcgctgagggacacagcagatccacccagcctatgcacctgtctggcgaggccagcaccgccagaacctgtcctcaggaacctctgagaggcacccctggcggagcactgtggctgggagtgctgagactgctgctgttcaagctgctgctgtttgacctgctgctgacctgctcctgtctgtgcgatcctgccggccctctgccttctcctgccaccaccacaagactgagagccctgggcagccacagactgcaccctgccacagagacaggcggcagagaggccacaagcagccctagaccccagcccagagacagaagatggggcgataccccccctggcagaaagcctggatctccagtccgcgccaagagaagcggatctggcgtgaagcagaccctgaatttcgacctgctgaagctggctggcgacgtggaatccaacccaggcccttctagaggccatatgaccgagtacaagcccacggtgcgcctcgccacccgcgacgacgtccccagggccgtacgcaccctcgccgccgcgttcgccgactaccccgccacgcgccacaccgtcgatccggaccgccacatcgagcgggtcaccgagctgcaagaactcttcctcacgcgcgtcgggctcgacatcggcaaggtgtgggtcgcggacgacggcgccgcggtggcggtctggaccacgccggagagcgtcgaagcgggggcggtgttcgccgagatcggcccgcgcatggccgagttgagcggttcccggctggccgcgcagcaacagatggaaggcctcctggcgccgcaccggcccaaggagcccgcgtggttcctggccaccgtcggcgtctcgcccgaccaccagggcaagggtctgggcagcgccgtcgtgctccccggagtggaggcggccgagcgcgccggggtgcccgccttcctggagacctccgcgccccgcaacctccccttctacgagcggctcggcttcaccgtcaccgccgacgtcgaggtgcccgaaggaccgcgcacctggtgcatgacccgcaagcccggtgcctga

SEQ ID NO: 8046 - DNA, 2871 bp, Artificial Sequence
  Synthetic Polynucloetide
atggccttaccagtgaccgccttgctcctgccgctggccttgctgctccacgccgccaggccgctcgaggacctgaagaacgtgttcccacctgaggtggccgtgttcgagcctagcgaggccgagatcagccacacccagaaagccaccctcgtgtgcctggctaccggcttctaccccgaccatgtggaactgtcttggtgggtcaacggcaaagaggtgcacagcggcgtgtctaccgacccccagccactgaaagaacagcccgccctgaacgacagccggtactgcctgagcagcagactgagagtgtccgccaccttctggcagaacccccggaaccacttcagatgccaggtgcagttctacggcctgagcgagaacgacgagtggacccaggacagagccaagcccgtgacccagatcgtgtctgccgaagcctggggcagagccgattgcggctttaccagcgagagctaccagcagggcgtgctgagcgccaccatcctgtacgagatcctgctgggcaaggccaccctgtacgccgtgctggtgtctgccctggtgctgatggctatggtcaagcggaaggacagccggggaagggccaagcgatctggatctggagcaacaaacttctcactactcaaacaagcaggtgacgtggaggagaatcccgggcctactagcatggccttaccagtgaccgccttgctcctgccgctggccttgctgctccacgccgccaggccgagctacgtgctgacacagcctccatccgtgtctgtggctccaggacagaccgccagaatcacatgcggcggcaacaacatcggcggcaagagcgtgcactggtatcagcagccacctggacaggctccagtggtggtggtgtacgacgacagcgatagacctagcggcatccccgagagattcagcggcagcaattccggcaataccgccacactgaccatcagcagagtggaagctggcgacgaggccgtgtactactgccaagtgtgggacagcagcagcgatcacgtggtgtttggcggcggaacaaagctgacagtgcttggcggaggcggaagtggaggcggaggatctggcggcggaggctctcaactccagctgcaagagtctggccctggcctggtcaagcctagcgaaacactgagcctgacctgtaccgtgtctggcggctctatcagctccggcagctatttctggggctggatcagacaacctcctggcaaaggactggaatggatcggctccatctactacagcggcatcacctactacaaccccagcctgaagtccagagtgaccatctccgtggacaccagcaagaaccagttctccctgaagctgagcagcgtgacagccgccgataccgccgtgtattattgtgccagacatgacggcgctgtggccggcctgtttgattattggggacagggcaccctggtcaccgtgtcatctgctacgcgtgagcagaaactgatctcggaagaggatctggggagcggcaccccattcccttctctggcccctcccatcatgctgctggtggacggcaagcagcagatggtggtcgtgtgcctggtgctggatgtggccccacctggactggacagccccatctggtttagcgccggcaatggctctgccctggacgcctttacctacggcccaagccctgccaccgatggcacctggacaaatctggcccacctgagcctgcccagcgaggaactggcttcttgggagcctctcgtgtgccacacaggacctggcgctgagggacacagcagatccacccagcctatgcacctgtctggcgaggccagcaccgccagaacctgtcctcaggaacctctgagaggcacccctggcggagcactgtggctgggagtgctgagactgctgctgttcaagctgctgctgtttgacctgctgctgacctgctcctgtctgtgcgatcctgccggccctctgccttctcctgccaccaccacaagactgagagccctgggcagccacagactgcaccctgccacagagacaggcggcagagaggccacaagcagccctagaccccagcccagagacagaagatggggcgataccccccctggcagaaagcctggatctccagtccgcgccaagagaagcggatctggcgtgaagcagaccctgaatttcgacctgctgaagctggctggcgacgtggaatccaacccaggcccttctagatctagaggccatatgaccgagtacaagcccacggtgcgcctcgccacccgcgacgacgtccccagggccgtacgcaccctcgccgccgcgttcgccgactaccccgccacgcgccacaccgtcgatccggaccgccacatcgagcgggtcaccgagctgcaagaactcttcctcacgcgcgtcgggctcgacatcggcaaggtgtgggtcgcggacgacggcgccgcggtggcggtctggaccacgccggagagcgtcgaagcgggggcggtgttcgccgagatcggcccgcgcatggccgagttgagcggttcccggctggccgcgcagcaacagatggaaggcctcctggcgccgcaccggcccaaggagcccgcgtggttcctggccaccgtcggcgtctcgcccgaccaccagggcaagggtctgggcagcgccgtcgtgctccccggagtggaggcggccgagcgcgccggggtgcccgccttcctggagacctccgcgccccgcaacctccccttctacgagcggctcggcttcaccgtcaccgccgacgtcgaggtgcccgaaggaccgcgcacctggtgcatgacccgcaagcccggtgcctga

SEQ ID NO: 8047 - DNA, 2682 bp, Artificial Sequence
  Synthetic Polynucloetide
atggccttaccagtgaccgccttgctcctgccgctggccttgctgctccacgccgccaggccgagctacgtgctgacacagcctccatccgtgtctgtggctccaggacagaccgccagaatcacatgcggcggcaacaacatcggcggcaagagcgtgcactggtatcagcagccacctggacaggctccagtggtggtggtgtacgacgacagcgatagacctagcggcatccccgagagattcagcggcagcaattccggcaataccgccacactgaccatcagcagagtggaagctggcgacgaggccgtgtactactgccaagtgtgggacagcagcagcgatcacgtggtgtttggcggcggaacaaagctgacagtgcttctcgaggggaaaccaattcccaaccctcttctgggactggattcaaccggcagcggcgacaagcagctggacgccgacgtgtcccccaagcctaccatcttcctgccctctatcgccgagacaaagctccagaaggccggcacctacctgtgcctgctggaaaagttcttcccagatgtgattaagatccactggcaggaaaagaagtccaacaccatcctgggcagccaggaaggcaacaccatgaagaccaacgacacctacatgaagttcagctggctgaccgtgcccgagaagtccctggacaaagaacacagatgcatcgtgcggcacgaaaacaacaagaacggcgtggaccaggaaatcatcttcccacccatcaagaccgatgtgattacaatggaccccaaggacaactgctccaaggacgccaacgataccctgctgctccagctgaccaacaccagcgcctactacatgtacttgttgctgctgctgaagtccgtggtgtacttcgccatcatcacatgctgcctgctgcggagaaccgccttctgctgcaacggcgagaagtctagggccaagcgatctggatctggagcaacaaacttctcactactcaaacaagcaggtgacgtggaggagaatcccgggcctactagtatggactggatttggcgcatccttttccttgtcggcgctgctaccggcgcgcattccttcgaacaactccagctgcaagagtctggccctggcctggtcaagcctagcgaaacactgagcctgacctgtaccgtgtctggcggctctatcagctccggcagctatttctggggctggatcagacaacctcctggcaaaggactggaatggatcggctccatctactacagcggcatcacctactacaaccccagcctgaagtccagagtgaccatctccgtggacaccagcaagaaccagttctccctgaagctgagcagcgtgacagccgccgataccgccgtgtattattgtgccagacatgacggcgctgtggccggcctgtttgattattggggacagggcaccctggtcaccgtgtcatctgctacgcgtgagcagaaactgatctcggaagaggatgggagcggcagccagcctcacaccaagcccagcgtgttcgtgatgaagaacggcaccaacgtggcctgcctcgtgaaagagttctaccccaaggacatcaggatcaacctggtgtccagcaagaagatcaccgagttcgaccccgccatcgtgatctcccccagcggcaagtacaacgccgtgaagctggggaagtacgaggacagcaacagcgtgacctgctccgtgcagcacgacaacaagaccgtgcacagcaccgactttgaagtgaaaaccgactccaccgaccacgtgaagcccaaagagacagagaacaccaagcagcccagcaagagctgccacaagcccaaggccatcgtgcacaccgagaaagtgaacatgatgagcctgaccgtgctgggcctgcggatgctgttcgccaaaaccgtggccgtgaacttcctgctgaccgccaagctgttcttcctccgcgccaagagaagcggatctggcgtgaagcagaccctgaatttcgacctgctgaagctggctggcgacgtggaatccaacccaggcccttctagaggccatatgaccgagtacaagcccacggtgcgcctcgccacccgcgacgacgtccccagggccgtacgcaccctcgccgccgcgttcgccgactaccccgccacgcgccacaccgtcgatccggaccgccacatcgagcgggtcaccgagctgcaagaactcttcctcacgcgcgtcgggctcgacatcggcaaggtgtgggtcgcggacgacggcgccgcggtggcggtctggaccacgccggagagcgtcgaagcgggggcggtgttcgccgagatcggcccgcgcatggccgagttgagcggttcccggctggccgcgcagcaacagatggaaggcctcctggcgccgcaccggcccaaggagcccgcgtggttcctggccaccgtcggcgtctcgcccgaccaccagggcaagggtctgggcagcgccgtcgtgctccccggagtggaggcggccgagcgcgccggggtgcccgccttcctggagacctccgcgccccgcaacctccccttctacgagcggctcggcttcaccgtcaccgccgacgtcgaggtgcccgaaggaccgcgcacctggtgcatgacccgcaagcccggtgcctga

SEQ ID NO: 8048 - DNA, 1893 bp, Artificial Sequence
  Synthetic Polynucloetide
atggccttaccagtgaccgccttgctcctgccgctggccttgctgctccacgccgccaggccgagctacgtgctgacacagcctccatccgtgtctgtggctccaggacagaccgccagaatcacatgcggcggcaacaacatcggcggcaagagcgtgcactggtatcagcagccacctggacaggctccagtggtggtggtgtacgacgacagcgatagacctagcggcatccccgagagattcagcggcagcaattccggcaataccgccacactgaccatcagcagagtggaagctggcgacgaggccgtgtactactgccaagtgtgggacagcagcagcgatcacgtggtgtttggcggcggaacaaagctgacagtgcttctcgagagccagcctcacaccaagcccagcgtgttcgtgatgaagaacggcaccaacgtggcctgcctcgtgaaagagttctaccccaaggacatcaggatcaacctggtgtccagcaagaagatcaccgagttcgaccccgccatcgtgatctcccccagcggcaagtacaacgccgtgaagctggggaagtacgaggacagcaacagcgtgacctgctccgtgcagcacgacaacaagaccgtgcacagcaccgactttgaagtgaaaaccgactccaccgaccacgtgaagcccaaagagacagagaacaccaagcagcccagcaagagctgccacaagcccaaggccatcgtgcacaccgagaaagtgaacatgatgagcctgaccgtgctgggcctgcggatgctgttcgccaaaaccgtggccgtgaacttcctgctgaccgccaagctgttcttcctcagggccaagcgatctggatctggagcaacaaacttctcactactcaaacaagcaggtgacgtggaggagaatcccgggcctactagtatggactggatttggcgcatccttttccttgtcggcgctgctaccggcgcgcattccttcgaacaactccagctgcaagagtctggccctggcctggtcaagcctagcgaaacactgagcctgacctgtaccgtgtctggcggctctatcagctccggcagctatttctggggctggatcagacaacctcctggcaaaggactggaatggatcggctccatctactacagcggcatcacctactacaaccccagcctgaagtccagagtgaccatctccgtggacaccagcaagaaccagttctccctgaagctgagcagcgtgacagccgccgataccgccgtgtattattgtgccagacatgacggcgctgtggccggcctgtttgattattggggacagggcaccctggtcaccgtgtcatctgctacgcgtgacaagcagctggacgccgacgtgtcccccaagcctaccatcttcctgccctctatcgccgagacaaagctccagaaggccggcacctacctgtgcctgctggaaaagttcttcccagatgtgattaagatccactggcaggaaaagaagtccaacaccatcctgggcagccaggaaggcaacaccatgaagaccaacgacacctacatgaagttcagctggctgaccgtgcccgagaagtccctggacaaagaacacagatgcatcgtgcggcacgaaaacaacaagaacggcgtggaccaggaaatcatcttcccacccatcaagaccgatgtgattacaatggaccccaaggacaactgctccaaggacgccaacgataccctgctgctccagctgaccaacaccagcgcctactacatgtacttgttgctgctgctgaagtccgtggtgtacttcgccatcatcacatgctgcctgctgcggagaaccgccttctgctgcaacggcgagaagtct

SEQ ID NO: 8049 - DNA, 2727 bp, Artificial Sequence
  Synthetic Polynucloetide
atggccttaccagtgaccgccttgctcctgccgctggccttgctgctccacgccgccaggccgctcgaggggaaaccaattcccaaccctcttctgggactggattcaaccggcagcggcgacaagcagctggacgccgacgtgtcccccaagcctaccatcttcctgccctctatcgccgagacaaagctccagaaggccggcacctacctgtgcctgctggaaaagttcttcccagatgtgattaagatccactggcaggaaaagaagtccaacaccatcctgggcagccaggaaggcaacaccatgaagaccaacgacacctacatgaagttcagctggctgaccgtgcccgagaagtccctggacaaagaacacagatgcatcgtgcggcacgaaaacaacaagaacggcgtggaccaggaaatcatcttcccacccatcaagaccgatgtgattacaatggaccccaaggacaactgctccaaggacgccaacgataccctgctgctccagctgaccaacaccagcgcctactacatgtacttgttgctgctgctgaagtccgtggtgtacttcgccatcatcacatgctgcctgctgcggagaaccgccttctgctgcaacggcgagaagtctagggccaagcgatctggatctggagcaacaaacttctcactactcaaacaagcaggtgacgtggaggagaatcccgggcctactagcatggccttaccagtgaccgccttgctcctgccgctggccttgctgctccacgccgccaggccgagctacgtgctgacacagcctccatccgtgtctgtggctccaggacagaccgccagaatcacatgcggcggcaacaacatcggcggcaagagcgtgcactggtatcagcagccacctggacaggctccagtggtggtggtgtacgacgacagcgatagacctagcggcatccccgagagattcagcggcagcaattccggcaataccgccacactgaccatcagcagagtggaagctggcgacgaggccgtgtactactgccaagtgtgggacagcagcagcgatcacgtggtgtttggcggcggaacaaagctgacagtgcttggcggaggcggaagtggaggcggaggatctggcggcggaggctctcaactccagctgcaagagtctggccctggcctggtcaagcctagcgaaacactgagcctgacctgtaccgtgtctggcggctctatcagctccggcagctatttctggggctggatcagacaacctcctggcaaaggactggaatggatcggctccatctactacagcggcatcacctactacaaccccagcctgaagtccagagtgaccatctccgtggacaccagcaagaaccagttctccctgaagctgagcagcgtgacagccgccgataccgccgtgtattattgtgccagacatgacggcgctgtggccggcctgtttgattattggggacagggcaccctggtcaccgtgtcatctgctacgcgtgagcagaaactgatctcggaagaggatgggagcggcagccagcctcacaccaagcccagcgtgttcgtgatgaagaacggcaccaacgtggcctgcctcgtgaaagagttctaccccaaggacatcaggatcaacctggtgtccagcaagaagatcaccgagttcgaccccgccatcgtgatctcccccagcggcaagtacaacgccgtgaagctggggaagtacgaggacagcaacagcgtgacctgctccgtgcagcacgacaacaagaccgtgcacagcaccgactttgaagtgaaaaccgactccaccgaccacgtgaagcccaaagagacagagaacaccaagcagcccagcaagagctgccacaagcccaaggccatcgtgcacaccgagaaagtgaacatgatgagcctgaccgtgctgggcctgcggatgctgttcgccaaaaccgtggccgtgaacttcctgctgaccgccaagctgttcttcctccgcgccaagagaagcggatctggcgtgaagcagaccctgaatttcgacctgctgaagctggctggcgacgtggaatccaacccaggcccttctagaggccatatgaccgagtacaagcccacggtgcgcctcgccacccgcgacgacgtccccagggccgtacgcaccctcgccgccgcgttcgccgactaccccgccacgcgccacaccgtcgatccggaccgccacatcgagcgggtcaccgagctgcaagaactcttcctcacgcgcgtcgggctcgacatcggcaaggtgtgggtcgcggacgacggcgccgcggtggcggtctggaccacgccggagagcgtcgaagcgggggcggtgttcgccgagatcggcccgcgcatggccgagttgagcggttcccggctggccgcgcagcaacagatggaaggcctcctggcgccgcaccggcccaaggagcccgcgtggttcctggccaccgtcggcgtctcgcccgaccaccagggcaagggtctgggcagcgccgtcgtgctccccggagtggaggcggccgagcgcgccggggtgcccgccttcctggagacctccgcgccccgcaacctccccttctacgagcggctcggcttcaccgtcaccgccgacgtcgaggtgcccgaaggaccgcgcacctggtgcatgacccgcaagcccggtgcctga

SEQ ID NO: 8050 - DNA, 3102 bp, Artificial Sequence
  Synthetic Polynucloetide
atggccttaccagtgaccgccttgctcctgccgctggccttgctgctccacgccgccaggccgagctacgtgctgacacagcctccatccgtgtctgtggctccaggacagaccgccagaatcacatgcggcggcaacaacatcggcggcaagagcgtgcactggtatcagcagccacctggacaggctccagtggtggtggtgtacgacgacagcgatagacctagcggcatccccgagagattcagcggcagcaattccggcaataccgccacactgaccatcagcagagtggaagctggcgacgaggccgtgtactactgccaagtgtgggacagcagcagcgatcacgtggtgtttggcggcggaacaaagctgacagtgcttggacagcctaaggccaatcctaccgtgacactgttccctccaagcagcgaagaactccaggccaacaaggccacacttgtgtgcctgatctccgacttctaccctggggctgtgacagtggcttggaaggccgatggatctcctgtgaaagccggcgtggaaaccaccaagccatccaagcagagcaacaacaaatacgccgccagctcctacctgagcctgacacctgagcagtggaagtcccacagatcctacagctgccaagtgacccacgaaggcagcaccgtggaaaagacagtggcccctacagagtgcagcggatcccagagcttcggcctgctggaccccaagctgtgctacctgctggatggcatcctgttcatctacggcgtgatcctgaccgccctgttcctgagagtgaagttcagcagaagcgccgacgcccctgcctaccagcagggacagaaccaactgtacaacgagctgaacctgggcagacgggaagagtacgacgtgctggacaagcggagaggcagggaccctgagatgggcggaaagccccagcggagaaagaacccccaggaaggactgtataacgaactccagaaagacaagatggccgaagcctacagcgagatcggcatgaagggcgagcggagaagaggcaagggccacgatggcctgtaccagggcctgagcaccgccaccaaggacacctatgacgccctgcacatgcaggccctgcctccaagaagggccaagcgatctggatctggagcaacaaacttctcactactcaaacaagcaggtgacgtggaggagaatcccgggcctactagtatggactggatttggcgcatccttttccttgtcggcgctgctaccggcgcgcattccttcgaacaactccagctgcaagagtctggccctggcctggtcaagcctagcgaaacactgagcctgacctgtaccgtgtctggcggctctatcagctccggcagctatttctggggctggatcagacaacctcctggcaaaggactggaatggatcggctccatctactacagcggcatcacctactacaaccccagcctgaagtccagagtgaccatctccgtggacaccagcaagaaccagttctccctgaagctgagcagcgtgacagccgccgataccgccgtgtattattgtgccagacatgacggcgctgtggccggcctgtttgattattggggacagggcaccctggtcaccgtgtcatctgctgcctctacaaagggaccctccgtgtttcctctggctcccagcagcaagtctacaagcggaggaacagccgctctgggctgcctggtcaaggattactttcccgagcctgtgaccgtgtcctggaatagcggagcactgacaagcggcgtgcacacctttccagccgtgctgcaaagcagcggcctgtactctctgagcagcgtggtcacagtgcctagctctagcctgggcacccagacctacatctgcaatgtgaaccacaagcctagcaacaccaaggtggacaagagagtggaacccaagagctgtggtacccagagttttgggttgttggaccctaaattgtgctatctgttggacggaatcctgttcatttacggagtgatcctgaccgcattgttcctgcgggttaagttttccagatccgcagacgcacccgcttaccaacaagggcagaaccaactctacaatgaacttaatttggggcggagggaagagtacgacgttctggacaaaaggaggggacgagatcccgagatgggcggaaagcctcagcgaaggaagaatccgcaagaggggctttataacgaactccagaaagataaaatggcagaagcctatagtgagattgggatgaagggagaaaggaggaggggtaaaggtcacgatgggttgtaccaaggattgagcacagccactaaagatacctatgatgcgctccacatgcaggccctgccgccaagacgcgccaagagaagcggatctggcgtgaagcagaccctgaatttcgacctgctgaagctggctggcgacgtggaatccaacccaggcccttctagaggccatatgaccgagtacaagcccacggtgcgcctcgccacccgcgacgacgtccccagggccgtacgcaccctcgccgccgcgttcgccgactaccccgccacgcgccacaccgtcgatccggaccgccacatcgagcgggtcaccgagctgcaagaactcttcctcacgcgcgtcgggctcgacatcggcaaggtgtgggtcgcggacgacggcgccgcggtggcggtctggaccacgccggagagcgtcgaagcgggggcggtgttcgccgagatcggcccgcgcatggccgagttgagcggttcccggctggccgcgcagcaacagatggaaggcctcctggcgccgcaccggcccaaggagcccgcgtggttcctggccaccgtcggcgtctcgcccgaccaccagggcaagggtctgggcagcgccgtcgtgctccccggagtggaggcggccgagcgcgccggggtgcccgccttcctggagacctccgcgccccgcaacctccccttctacgagcggctcggcttcaccgtcaccgccgacgtcgaggtgcccgaaggaccgcgcacctggtgcatgacccgcaagcccggtgcctga

SEQ ID NO: 8051 - DNA, 2457 bp, Artificial Sequence
  Synthetic Polynucloetide
atggccttaccagtgaccgccttgctcctgccgctggccttgctgctccacgccgccaggccgagctacgtgctgacacagcctccatccgtgtctgtggctccaggacagaccgccagaatcacatgcggcggcaacaacatcggcggcaagagcgtgcactggtatcagcagccacctggacaggctccagtggtggtggtgtacgacgacagcgatagacctagcggcatccccgagagattcagcggcagcaattccggcaataccgccacactgaccatcagcagagtggaagctggcgacgaggccgtgtactactgccaagtgtgggacagcagcagcgatcacgtggtgtttggcggcggaacaaagctgacagtgcttctcgaggacctgaagaacgtgttcccacctgaggtggccgtgttcgagcctagcgaggccgagatcagccacacccagaaagccaccctcgtgtgcctggctaccggcttctaccccgaccatgtggaactgtcttggtgggtcaacggcaaagaggtgcacagcggcgtgtctaccgacccccagccactgaaagaacagcccgccctgaacgacagccggtactgcctgagcagcagactgagagtgtccgccaccttctggcagaacccccggaaccacttcagatgccaggtgcagttctacggcctgagcgagaacgacgagtggacccaggacagagccaagcccgtgacccagatcgtgtctgccgaagcctggggcagagccgattgcggatcccagagcttcggcctgctggaccccaagctgtgctacctgctggatggcatcctgttcatctacggcgtgatcctgaccgccctgttcctgagagtgaagttcagcagaagcgccgacgcccctgcctaccagcagggacagaaccaactgtacaacgagctgaacctgggcagacgggaagagtacgacgtgctggacaagcggagaggcagggaccctgagatgggcggaaagccccagcggagaaagaacccccaggaaggactgtataacgaactccagaaagacaagatggccgaagcctacagcgagatcggcatgaagggcgagcggagaagaggcaagggccacgatggcctgtaccagggcctgagcaccgccaccaaggacacctatgacgccctgcacatgcaggccctgcctccaagaagggccaagcgatctggatctggagcaacaaacttctcactactcaaacaagcaggtgacgtggaggagaatcccgggcctactagtatggactggatttggcgcatccttttccttgtcggcgctgctaccggcgcgcattccttcgaacaactccagctgcaagagtctggccctggcctggtcaagcctagcgaaacactgagcctgacctgtaccgtgtctggcggctctatcagctccggcagctatttctggggctggatcagacaacctcctggcaaaggactggaatggatcggctccatctactacagcggcatcacctactacaaccccagcctgaagtccagagtgaccatctccgtggacaccagcaagaaccagttctccctgaagctgagcagcgtgacagccgccgataccgccgtgtattattgtgccagacatgacggcgctgtggccggcctgtttgattattggggacagggcaccctggtcaccgtgtcatctgctacgcgtatccagaaccctgatcctgccgtgtaccagctgcgggatagcaagagcagcgacaagagcgtgtgtctgttcaccgacttcgacagccagaccaacgtgtcccagagcaaggactccgacgtgtacatcaccgataagaccgtgctggacatgcggagcatggacttcaagagcaactccgccgtggcctggtccaacaagtccgatttcgcctgcgccaacgccttcaacaacagcattatccccgaggacacattcttcccaagccccgagagcagctgcggtacccagagttttgggttgttggaccctaaattgtgctatctgttggacggaatcctgttcatttacggagtgatcctgaccgcattgttcctgcgggttaagttttccagatccgcagacgcacccgcttaccaacaagggcagaaccaactctacaatgaacttaatttggggcggagggaagagtacgacgttctggacaaaaggaggggacgagatcccgagatgggcggaaagcctcagcgaaggaagaatccgcaagaggggctttataacgaactccagaaagataaaatggcagaagcctatagtgagattgggatgaagggagaaaggaggaggggtaaaggtcacgatgggttgtaccaaggattgagcacagccactaaagatacctatgatgcgctccacatgcaggccctgccgccaaga

SEQ ID NO: 8052 - DNA, 2457 bp, Artificial Sequence
  Synthetic Polynucloetide
atggccttaccagtgaccgccttgctcctgccgctggccttgctgctccacgccgccaggccgagctacgtgctgacacagcctccatccgtgtctgtggctccaggacagaccgccagaatcacatgcggcggcaacaacatcggcggcaagagcgtgcactggtatcagcagccacctggacaggctccagtggtggtggtgtacgacgacagcgatagacctagcggcatccccgagagattcagcggcagcaattccggcaataccgccacactgaccatcagcagagtggaagctggcgacgaggccgtgtactactgccaagtgtgggacagcagcagcgatcacgtggtgtttggcggcggaacaaagctgacagtgcttctcgaggacctgaagaacgtgttcccacctgaggtggccgtgttcgagcctagcaaggccgagatcgcccacacccagaaagccaccctcgtgtgcctggctaccggcttctaccccgaccatgtggaactgtcttggtgggtcaacggcaaagaggtgcacagcggcgtgtgtaccgacccccagccactgaaagaacagcccgccctgaacgacagccggtactgcctgagcagcagactgagagtgtccgccaccttctggcagaacccccggaaccacttcagatgccaggtgcagttctacggcctgagcgagaacgacgagtggacccaggacagagccaagcccgtgacccagatcgtgtctgccgaagcctggggcagagccgattgcggatcccagagcttcggcctgctggaccccaagctgtgctacctgctggatggcatcctgttcatctacggcgtgatcctgaccgccctgttcctgagagtgaagttcagcagaagcgccgacgcccctgcctaccagcagggacagaaccaactgtacaacgagctgaacctgggcagacgggaagagtacgacgtgctggacaagcggagaggcagggaccctgagatgggcggaaagccccagcggagaaagaacccccaggaaggactgtataacgaactccagaaagacaagatggccgaagcctacagcgagatcggcatgaagggcgagcggagaagaggcaagggccacgatggcctgtaccagggcctgagcaccgccaccaaggacacctatgacgccctgcacatgcaggccctgcctccaagaagggccaagcgatctggatctggagcaacaaacttctcactactcaaacaagcaggtgacgtggaggagaatcccgggcctactagtatggactggatttggcgcatccttttccttgtcggcgctgctaccggcgcgcattccttcgaacaactccagctgcaagagtctggccctggcctggtcaagcctagcgaaacactgagcctgacctgtaccgtgtctggcggctctatcagctccggcagctatttctggggctggatcagacaacctcctggcaaaggactggaatggatcggctccatctactacagcggcatcacctactacaaccccagcctgaagtccagagtgaccatctccgtggacaccagcaagaaccagttctccctgaagctgagcagcgtgacagccgccgataccgccgtgtattattgtgccagacatgacggcgctgtggccggcctgtttgattattggggacagggcaccctggtcaccgtgtcatctgctacgcgtatccagaaccctgatcctgccgtgtaccagctgcgggatagcaagagcagcgacaagagcgtgtgtctgttcaccgacttcgacagccagaccaacgtgtcccagagcaaggactccgacgtgtacatcaccgataagtgcgtgctggacatgcggagcatggacttcaagagcaactccgccgtggcctggtccaacaagtccgatttcgcctgcgccaacgccttcaacaacagcattatccccgaggacacattcttcccaagcagcgacgtgccctgcggtacccagagttttgggttgttggaccctaaattgtgctatctgttggacggaatcctgttcatttacggagtgatcctgaccgcattgttcctgcgggttaagttttccagatccgcagacgcacccgcttaccaacaagggcagaaccaactctacaatgaacttaatttggggcggagggaagagtacgacgttctggacaaaaggaggggacgagatcccgagatgggcggaaagcctcagcgaaggaagaatccgcaagaggggctttataacgaactccagaaagataaaatggcagaagcctatagtgagattgggatgaagggagaaaggaggaggggtaaaggtcacgatgggttgtaccaaggattgagcacagccactaaagatacctatgatgcgctccacatgcaggccctgccgccaaga

SEQ ID NO: 8053 - DNA, 2670 bp, Artificial Sequence
  Synthetic Polynucloetide
atggccttaccagtgaccgccttgctcctgccgctggccttgctgctccacgccgccaggccgagctacgtgctgacacagcctccatccgtgtctgtggctccaggacagaccgccagaatcacatgcggcggcaacaacatcggcggcaagagcgtgcactggtatcagcagccacctggacaggctccagtggtggtggtgtacgacgacagcgatagacctagcggcatccccgagagattcagcggcagcaattccggcaataccgccacactgaccatcagcagagtggaagctggcgacgaggccgtgtactactgccaagtgtgggacagcagcagcgatcacgtggtgtttggcggcggaacaaagctgacagtgcttctcgaggggaaaccaattcccaaccctcttctgggactggattcaaccggcagcggcgaggacctgaagaacgtgttcccacctgaggtggccgtgttcgagcctagcgaggccgagatcagccacacccagaaagccaccctcgtgtgcctggctaccggcttctaccccgaccatgtggaactgtcttggtgggtcaacggcaaagaggtgcacagcggcgtgtctaccgacccccagccactgaaagaacagcccgccctgaacgacagccggtactgcctgagcagcagactgagagtgtccgccaccttctggcagaacccccggaaccacttcagatgccaggtgcagttctacggcctgagcgagaacgacgagtggacccaggacagagccaagcccgtgacccagatcgtgtctgccgaagcctggggcagagccgattgcggatcccagagcttcggcctgctggaccccaagctgtgctacctgctggatggcatcctgttcatctacggcgtgatcctgaccgccctgttcctgagagtgaagttcagcagaagcgccgacgcccctgcctaccagcagggacagaaccaactgtacaacgagctgaacctgggcagacgggaagagtacgacgtgctggacaagcggagaggcagggaccctgagatgggcggaaagccccagcggagaaagaacccccaggaaggactgtataacgaactccagaaagacaagatggccgaagcctacagcgagatcggcatgaagggcgagcggagaagaggcaagggccacgatggcctgtaccagggcctgagcaccgccaccaaggacacctatgacgccctgcacatgcaggccctgcctccaagaagggccaagcgatctggatctggagcaacaaacttctcactactcaaacaagcaggtgacgtggaggagaatcccgggcctactagtatggactggatttggcgcatccttttccttgtcggcgctgctaccggcgcgcattccttcgaacaactccagctgcaagagtctggccctggcctggtcaagcctagcgaaacactgagcctgacctgtaccgtgtctggcggctctatcagctccggcagctatttctggggctggatcagacaacctcctggcaaaggactggaatggatcggctccatctactacagcggcatcacctactacaaccccagcctgaagtccagagtgaccatctccgtggacaccagcaagaaccagttctccctgaagctgagcagcgtgacagccgccgataccgccgtgtattattgtgccagacatgacggcgctgtggccggcctgtttgattattggggacagggcaccctggtcaccgtgtcatctgctacgcgtgagcagaaactgatctcggaagaggatgggagcggcatccagaaccctgatcctgccgtgtaccagctgcgggatagcaagagcagcgacaagagcgtgtgtctgttcaccgacttcgacagccagaccaacgtgtcccagagcaaggactccgacgtgtacatcaccgataagaccgtgctggacatgcggagcatggacttcaagagcaactccgccgtggcctggtccaacaagtccgatttcgcctgcgccaacgccttcaacaacagcattatccccgaggacacattcttcccaagccccgagagcagctgcggtacccagagttttgggttgttggaccctaaattgtgctatctgttggacggaatcctgttcatttacggagtgatcctgaccgcattgttcctgaggagcaagcggtcacggctgctccacagcgattacatgaatatgacaccacgaagaccgggtcctactcgcaaacactaccaaccctacgcacctccccgcgactttgcagcgtaccgatctcgggttaagttttccagatccgcagacgcacccgcttaccaacaagggcagaaccaactctacaatgaacttaatttggggcggagggaagagtacgacgttctggacaaaaggaggggacgagatcccgagatgggcggaaagcctcagcgaaggaagaatccgcaagaggggctttataacgaactccagaaagataaaatggcagaagcctatagtgagattgggatgaagggagaaaggaggaggggtaaaggtcacgatgggttgtaccaaggattgagcacagccactaaagatacctatgatgcgctccacatgcaggccctgccgccaaga

SEQ ID NO: 8054 - DNA, 2793 bp, Artificial Sequence
  Synthetic Polynucloetide
atggccttaccagtgaccgccttgctcctgccgctggccttgctgctccacgccgccaggccgagctacgtgctgacacagcctccatccgtgtctgtggctccaggacagaccgccagaatcacatgcggcggcaacaacatcggcggcaagagcgtgcactggtatcagcagccacctggacaggctccagtggtggtggtgtacgacgacagcgatagacctagcggcatccccgagagattcagcggcagcaattccggcaataccgccacactgaccatcagcagagtggaagctggcgacgaggccgtgtactactgccaagtgtgggacagcagcagcgatcacgtggtgtttggcggcggaacaaagctgacagtgcttctcgaggggaaaccaattcccaaccctcttctgggactggattcaaccggcagcggcgaggacctgaagaacgtgttcccacctgaggtggccgtgttcgagcctagcgaggccgagatcagccacacccagaaagccaccctcgtgtgcctggctaccggcttctaccccgaccatgtggaactgtcttggtgggtcaacggcaaagaggtgcacagcggcgtgtctaccgacccccagccactgaaagaacagcccgccctgaacgacagccggtactgcctgagcagcagactgagagtgtccgccaccttctggcagaacccccggaaccacttcagatgccaggtgcagttctacggcctgagcgagaacgacgagtggacccaggacagagccaagcccgtgacccagatcgtgtctgccgaagcctggggcagagccgattgcggatcccagagcttcggcctgctggaccccaagctgtgctacctgctggatggcatcctgttcatctacggcgtgatcctgaccgccctgttcctgaggagtaagaggagcaggctcctgcacagtgactacatgaacatgactccacgccgccccggacccacccgcaagcattaccagccctatgccccaccacgcgacttcgcagcctatcgctccagagtgaagttcagcagaagcgccgacgcccctgcctaccagcagggacagaaccaactgtacaacgagctgaacctgggcagacgggaagagtacgacgtgctggacaagcggagaggcagggaccctgagatgggcggaaagccccagcggagaaagaacccccaggaaggactgtataacgaactccagaaagacaagatggccgaagcctacagcgagatcggcatgaagggcgagcggagaagaggcaagggccacgatggcctgtaccagggcctgagcaccgccaccaaggacacctatgacgccctgcacatgcaggccctgcctccaagaagggccaagcgatctggatctggagcaacaaacttctcactactcaaacaagcaggtgacgtggaggagaatcccgggcctactagtatggactggatttggcgcatccttttccttgtcggcgctgctaccggcgcgcattccttcgaacaactccagctgcaagagtctggccctggcctggtcaagcctagcgaaacactgagcctgacctgtaccgtgtctggcggctctatcagctccggcagctatttctggggctggatcagacaacctcctggcaaaggactggaatggatcggctccatctactacagcggcatcacctactacaaccccagcctgaagtccagagtgaccatctccgtggacaccagcaagaaccagttctccctgaagctgagcagcgtgacagccgccgataccgccgtgtattattgtgccagacatgacggcgctgtggccggcctgtttgattattggggacagggcaccctggtcaccgtgtcatctgctacgcgtgagcagaaactgatctcggaagaggatgggagcggcatccagaaccctgatcctgccgtgtaccagctgcgggatagcaagagcagcgacaagagcgtgtgtctgttcaccgacttcgacagccagaccaacgtgtcccagagcaaggactccgacgtgtacatcaccgataagaccgtgctggacatgcggagcatggacttcaagagcaactccgccgtggcctggtccaacaagtccgatttcgcctgcgccaacgccttcaacaacagcattatccccgaggacacattcttcccaagccccgagagcagctgcggtacccagagttttgggttgttggaccctaaattgtgctatctgttggacggaatcctgttcatttacggagtgatcctgaccgcattgttcctgaggagcaagcggtcacggctgctccacagcgattacatgaatatgacaccacgaagaccgggtcctactcgcaaacactaccaaccctacgcacctccccgcgactttgcagcgtaccgatctcgggttaagttttccagatccgcagacgcacccgcttaccaacaagggcagaaccaactctacaatgaacttaatttggggcggagggaagagtacgacgttctggacaaaaggaggggacgagatcccgagatgggcggaaagcctcagcgaaggaagaatccgcaagaggggctttataacgaactccagaaagataaaatggcagaagcctatagtgagattgggatgaagggagaaaggaggaggggtaaaggtcacgatgggttgtaccaaggattgagcacagccactaaagatacctatgatgcgctccacatgcaggccctgccgccaaga

SEQ ID NO: 8055 - DNA, 2676 bp, Artificial Sequence
  Synthetic Polynucloetide
atggccttaccagtgaccgccttgctcctgccgctggccttgctgctccacgccgccaggccgagctacgtgctgacacagcctccatccgtgtctgtggctccaggacagaccgccagaatcacatgcggcggcaacaacatcggcggcaagagcgtgcactggtatcagcagccacctggacaggctccagtggtggtggtgtacgacgacagcgatagacctagcggcatccccgagagattcagcggcagcaattccggcaataccgccacactgaccatcagcagagtggaagctggcgacgaggccgtgtactactgccaagtgtgggacagcagcagcgatcacgtggtgtttggcggcggaacaaagctgacagtgcttctcgaggggaaaccaattcccaaccctcttctgggactggattcaaccggcagcggcgaggacctgaagaacgtgttcccacctgaggtggccgtgttcgagcctagcgaggccgagatcagccacacccagaaagccaccctcgtgtgcctggctaccggcttctaccccgaccatgtggaactgtcttggtgggtcaacggcaaagaggtgcacagcggcgtgtctaccgacccccagccactgaaagaacagcccgccctgaacgacagccggtactgcctgagcagcagactgagagtgtccgccaccttctggcagaacccccggaaccacttcagatgccaggtgcagttctacggcctgagcgagaacgacgagtggacccaggacagagccaagcccgtgacccagatcgtgtctgccgaagcctggggcagagccgattgcggatcccagagcttcggcctgctggaccccaagctgtgctacctgctggatggcatcctgttcatctacggcgtgatcctgaccgccctgttcctgagagtgaagttcagcagaagcgccgacgcccctgcctaccagcagggacagaaccaactgtacaacgagctgaacctgggcagacgggaagagtacgacgtgctggacaagcggagaggcagggaccctgagatgggcggaaagccccagcggagaaagaacccccaggaaggactgtataacgaactccagaaagacaagatggccgaagcctacagcgagatcggcatgaagggcgagcggagaagaggcaagggccacgatggcctgtaccagggcctgagcaccgccaccaaggacacctatgacgccctgcacatgcaggccctgcctccaagaagggccaagcgatctggatctggagcaacaaacttctcactactcaaacaagcaggtgacgtggaggagaatcccgggcctactagtatggactggatttggcgcatccttttccttgtcggcgctgctaccggcgcgcattccttcgaacaactccagctgcaagagtctggccctggcctggtcaagcctagcgaaacactgagcctgacctgtaccgtgtctggcggctctatcagctccggcagctatttctggggctggatcagacaacctcctggcaaaggactggaatggatcggctccatctactacagcggcatcacctactacaaccccagcctgaagtccagagtgaccatctccgtggacaccagcaagaaccagttctccctgaagctgagcagcgtgacagccgccgataccgccgtgtattattgtgccagacatgacggcgctgtggccggcctgtttgattattggggacagggcaccctggtcaccgtgtcatctgctacgcgtgagcagaaactgatctcggaagaggatctggggagcggcatccagaaccctgatcctgccgtgtaccagctgcgggatagcaagagcagcgacaagagcgtgtgtctgttcaccgacttcgacagccagaccaacgtgtcccagagcaaggactccgacgtgtacatcaccgataagaccgtgctggacatgcggagcatggacttcaagagcaactccgccgtggcctggtccaacaagtccgatttcgcctgcgccaacgccttcaacaacagcattatccccgaggacacattcttcccaagccccgagagcagctgcggtacccagagttttgggttgttggaccctaaattgtgctatctgttggacggaatcctgttcatttacggagtgatcctgaccgcattgttcctgaagagaggccggaagaagctgctgtacatcttcaagcagcctttcatgcggcccgtgcagaccacccaggaagaggacggctgctcctgccggttccccgaggaagaagaaggcggctgcgagctgcgggttaagttttccagatccgcagacgcacccgcttaccaacaagggcagaaccaactctacaatgaacttaatttggggcggagggaagagtacgacgttctggacaaaaggaggggacgagatcccgagatgggcggaaagcctcagcgaaggaagaatccgcaagaggggctttataacgaactccagaaagataaaatggcagaagcctatagtgagattgggatgaagggagaaaggaggaggggtaaaggtcacgatgggttgtaccaaggattgagcacagccactaaagatacctatgatgcgctccacatgcaggccctgccgccaaga

SEQ ID NO: 8056 - DNA, 2802 bp, Artificial Sequence
  Synthetic Polynucloetide
atggccttaccagtgaccgccttgctcctgccgctggccttgctgctccacgccgccaggccgagctacgtgctgacacagcctccatccgtgtctgtggctccaggacagaccgccagaatcacatgcggcggcaacaacatcggcggcaagagcgtgcactggtatcagcagccacctggacaggctccagtggtggtggtgtacgacgacagcgatagacctagcggcatccccgagagattcagcggcagcaattccggcaataccgccacactgaccatcagcagagtggaagctggcgacgaggccgtgtactactgccaagtgtgggacagcagcagcgatcacgtggtgtttggcggcggaacaaagctgacagtgcttctcgaggggaaaccaattcccaaccctcttctgggactggattcaaccggcagcggcgaggacctgaagaacgtgttcccacctgaggtggccgtgttcgagcctagcgaggccgagatcagccacacccagaaagccaccctcgtgtgcctggctaccggcttctaccccgaccatgtggaactgtcttggtgggtcaacggcaaagaggtgcacagcggcgtgtctaccgacccccagccactgaaagaacagcccgccctgaacgacagccggtactgcctgagcagcagactgagagtgtccgccaccttctggcagaacccccggaaccacttcagatgccaggtgcagttctacggcctgagcgagaacgacgagtggacccaggacagagccaagcccgtgacccagatcgtgtctgccgaagcctggggcagagccgattgcggatcccagagcttcggcctgctggaccccaagctgtgctacctgctggatggcatcctgttcatctacggcgtgatcctgaccgccctgttcctgaaacggggcagaaagaaactcctgtatatattcaaacaaccatttatgagaccagtacaaactactcaagaggaagatggctgtagctgccgatttccagaagaagaagaaggaggatgtgaactgagagtgaagttcagcagaagcgccgacgcccctgcctaccagcagggacagaaccaactgtacaacgagctgaacctgggcagacgggaagagtacgacgtgctggacaagcggagaggcagggaccctgagatgggcggaaagccccagcggagaaagaacccccaggaaggactgtataacgaactccagaaagacaagatggccgaagcctacagcgagatcggcatgaagggcgagcggagaagaggcaagggccacgatggcctgtaccagggcctgagcaccgccaccaaggacacctatgacgccctgcacatgcaggccctgcctccaagaagggccaagcgatctggatctggagcaacaaacttctcactactcaaacaagcaggtgacgtggaggagaatcccgggcctactagtatggactggatttggcgcatccttttccttgtcggcgctgctaccggcgcgcattccttcgaacaactccagctgcaagagtctggccctggcctggtcaagcctagcgaaacactgagcctgacctgtaccgtgtctggcggctctatcagctccggcagctatttctggggctggatcagacaacctcctggcaaaggactggaatggatcggctccatctactacagcggcatcacctactacaaccccagcctgaagtccagagtgaccatctccgtggacaccagcaagaaccagttctccctgaagctgagcagcgtgacagccgccgataccgccgtgtattattgtgccagacatgacggcgctgtggccggcctgtttgattattggggacagggcaccctggtcaccgtgtcatctgctacgcgtgagcagaaactgatctcggaagaggatctggggagcggcatccagaaccctgatcctgccgtgtaccagctgcgggatagcaagagcagcgacaagagcgtgtgtctgttcaccgacttcgacagccagaccaacgtgtcccagagcaaggactccgacgtgtacatcaccgataagaccgtgctggacatgcggagcatggacttcaagagcaactccgccgtggcctggtccaacaagtccgatttcgcctgcgccaacgccttcaacaacagcattatccccgaggacacattcttcccaagccccgagagcagctgcggtacccagagttttgggttgttggaccctaaattgtgctatctgttggacggaatcctgttcatttacggagtgatcctgaccgcattgttcctgaagagaggccggaagaagctgctgtacatcttcaagcagcctttcatgcggcccgtgcagaccacccaggaagaggacggctgctcctgccggttccccgaggaagaagaaggcggctgcgagctgcgggttaagttttccagatccgcagacgcacccgcttaccaacaagggcagaaccaactctacaatgaacttaatttggggcggagggaagagtacgacgttctggacaaaaggaggggacgagatcccgagatgggcggaaagcctcagcgaaggaagaatccgcaagaggggctttataacgaactccagaaagataaaatggcagaagcctatagtgagattgggatgaagggagaaaggaggaggggtaaaggtcacgatgggttgtaccaaggattgagcacagccactaaagatacctatgatgcgctccacatgcaggccctgccgccaaga

SEQ ID NO: 8057 - DNA, 2475 bp, Artificial Sequence
  Synthetic Polynucloetide
atggccttaccagtgaccgccttgctcctgccgctggccttgctgctccacgccgccaggccgagctacgtgctgacacagcctccatccgtgtctgtggctccaggacagaccgccagaatcacatgcggcggcaacaacatcggcggcaagagcgtgcactggtatcagcagccacctggacaggctccagtggtggtggtgtacgacgacagcgatagacctagcggcatccccgagagattcagcggcagcaattccggcaataccgccacactgaccatcagcagagtggaagctggcgacgaggccgtgtactactgccaagtgtgggacagcagcagcgatcacgtggtgtttggcggcggaacaaagctgacagtgcttctcgagcagagcttcggcctgctggaccccaagctgtgctacctgctggatggcatcctgttcatctacggcgtgatcctgaccgccctgttcctgagagtgaagttcagcagaagcgccgacgcccctgcctaccagcagggacagaaccaactgtacaacgagctgaacctgggcagacgggaagagtacgacgtgctggacaagcggagaggcagggaccctgagatgggcggaaagccccagcggagaaagaacccccaggaaggactgtataacgaactccagaaagacaagatggccgaagcctacagcgagatcggcatgaagggcgagcggagaagaggcaagggccacgatggcctgtaccagggcctgagcaccgccaccaaggacacctatgacgccctgcacatgcaggccctgcctccaagaagggccaagcgatctggatctggagcaacaaacttctcactactcaaacaagcaggtgacgtggaggagaatcccgggcctactagtatggactggatttggcgcatccttttccttgtcggcgctgctaccggcgcgcattccttcgaacaactccagctgcaagagtctggccctggcctggtcaagcctagcgaaacactgagcctgacctgtaccgtgtctggcggctctatcagctccggcagctatttctggggctggatcagacaacctcctggcaaaggactggaatggatcggctccatctactacagcggcatcacctactacaaccccagcctgaagtccagagtgaccatctccgtggacaccagcaagaaccagttctccctgaagctgagcagcgtgacagccgccgataccgccgtgtattattgtgccagacatgacggcgctgtggccggcctgtttgattattggggacagggcaccctggtcaccgtgtcatctgctacgcgtcagagttttgggttgttggaccctaaattgtgctatctgttggacggaatcctgttcatttacggagtgatcctgaccgcattgttcctgcgggttaagttttccagatccgcagacgcacccgcttaccaacaagggcagaaccaactctacaatgaacttaatttggggcggagggaagagtacgacgttctggacaaaaggaggggacgagatcccgagatgggcggaaagcctcagcgaaggaagaatccgcaagaggggctttataacgaactccagaaagataaaatggcagaagcctatagtgagattgggatgaagggagaaaggaggaggggtaaaggtcacgatgggttgtaccaaggattgagcacagccactaaagatacctatgatgcgctccacatgcaggccctgccgccaagacgcgccaagagaagcggatctggcgtgaagcagaccctgaatttcgacctgctgaagctggctggcgacgtggaatccaacccaggcccttctagaggccatatgaccgagtacaagcccacggtgcgcctcgccacccgcgacgacgtccccagggccgtacgcaccctcgccgccgcgttcgccgactaccccgccacgcgccacaccgtcgatccggaccgccacatcgagcgggtcaccgagctgcaagaactcttcctcacgcgcgtcgggctcgacatcggcaaggtgtgggtcgcggacgacggcgccgcggtggcggtctggaccacgccggagagcgtcgaagcgggggcggtgttcgccgagatcggcccgcgcatggccgagttgagcggttcccggctggccgcgcagcaacagatggaaggcctcctggcgccgcaccggcccaaggagcccgcgtggttcctggccaccgtcggcgtctcgcccgaccaccagggcaagggtctgggcagcgccgtcgtgctccccggagtggaggcggccgagcgcgccggggtgcccgccttcctggagacctccgcgccccgcaacctccccttctacgagcggctcggcttcaccgtcaccgccgacgtcgaggtgcccgaaggaccgcgcacctggtgcatgacccgcaagcccggtgcctga

SEQ ID NO: 8058 - DNA, 1947 bp, Artificial Sequence
  Synthetic Polynucloetide
atggccttaccagtgaccgccttgctcctgccgctggccttgctgctccacgccgccaggccgagctacgtgctgacacagcctccatccgtgtctgtggctccaggacagaccgccagaatcacatgcggcggcaacaacatcggcggcaagagcgtgcactggtatcagcagccacctggacaggctccagtggtggtggtgtacgacgacagcgatagacctagcggcatccccgagagattcagcggcagcaattccggcaataccgccacactgaccatcagcagagtggaagctggcgacgaggccgtgtactactgccaagtgtgggacagcagcagcgatcacgtggtgtttggcggcggaacaaagctgacagtgcttctcgagggacagcctaaggccaatcctaccgtgacactgttccctccaagcagcgaagaactccaggccaacaaggccacacttgtgtgcctgatctccgacttctaccctggggctgtgacagtggcttggaaggccgatggatctcctgtgaaagccggcgtggaaaccaccaagccatccaagcagagcaacaacaaatacgccgccagctcctacctgagcctgacacctgagcagtggaagtcccacagatcctacagctgccaagtgacccacgaaggcagcaccgtggaaaagacagtggcccctacagagtgcagccccatcaagaccgatgtgattacaatggaccccaaggacaactgctccaaggacgccaacgataccctgctgctccagctgaccaacaccagcgcctactacatgtacttgttgctgctgctgaagtccgtggtgtacttcgccatcatcacatgctgcctgctgcggagaaccgccttctgctgcaacggcgagaagtctagggccaagcgatctggatctggagcaacaaacttctcactactcaaacaagcaggtgacgtggaggagaatcccgggcctactagtatggactggatttggcgcatccttttccttgtcggcgctgctaccggcgcgcattccttcgaacaactccagctgcaagagtctggccctggcctggtcaagcctagcgaaacactgagcctgacctgtaccgtgtctggcggctctatcagctccggcagctatttctggggctggatcagacaacctcctggcaaaggactggaatggatcggctccatctactacagcggcatcacctactacaaccccagcctgaagtccagagtgaccatctccgtggacaccagcaagaaccagttctccctgaagctgagcagcgtgacagccgccgataccgccgtgtattattgtgccagacatgacggcgctgtggccggcctgtttgattattggggacagggcaccctggtcaccgtgtcatctgctacgcgtgcctctacaaagggaccctccgtgtttcctctggctcccagcagcaagtctacaagcggaggaacagccgctctgggctgcctggtcaaggattactttcccgagcctgtgaccgtgtcctggaatagcggagcactgacaagcggcgtgcacacctttccagccgtgctgcaaagcagcggcctgtactctctgagcagcgtggtcacagtgcctagctctagcctgggcacccagacctacatctgcaatgtgaaccacaagcctagcaacaccaaggtggacaagagagtggaacccaagagctgtgaagtgaaaaccgactccaccgaccacgtgaagcccaaagagacagagaacaccaagcagcccagcaagagctgccacaagcccaaggccatcgtgcacaccgagaaagtgaacatgatgagcctgaccgtgctgggcctgcggatgctgttcgccaaaaccgtggccgtgaacttcctgctgaccgccaagctgttcttcctc

SEQ ID NO: 8059 - DNA, 1881 bp, Artificial Sequence
  Synthetic Polynucloetide
atggccttaccagtgaccgccttgctcctgccgctggccttgctgctccacgccgccaggccgagctacgtgctgacacagcctccatccgtgtctgtggctccaggacagaccgccagaatcacatgcggcggcaacaacatcggcggcaagagcgtgcactggtatcagcagccacctggacaggctccagtggtggtggtgtacgacgacagcgatagacctagcggcatccccgagagattcagcggcagcaattccggcaataccgccacactgaccatcagcagagtggaagctggcgacgaggccgtgtactactgccaagtgtgggacagcagcagcgatcacgtggtgtttggcggcggaacaaagctgacagtgcttctcgagggacagcctaaggccaatcctaccgtgacactgttccctccaagcagcgaagaactccaggccaacaaggccacacttgtgtgcctgatctccgacttctaccctggggctgtgacagtggcttggaaggccgatggatctcctgtgaaagccggcgtggaaaccaccaagccatccaagcagagcaacaacaaatacgccgccagctcctacctgagcctgacacctgagcagtggaagtcccacagatcctacagctgccaagtgacccacgaaggcagcaccgtggaaaagacagtggcccctacagagtgcagcggcagagccgattgcggcatcaccagcgccagctaccaccagggcgtgctgagcgccaccatcctgtacgagatcctgctgggcaaggccaccctgtacgccgtgctggtgtctgccctggtgctgatggctatggtcaagcggaaggacagccggggaagggccaagcgatctggatctggagcaacaaacttctcactactcaaacaagcaggtgacgtggaggagaatcccgggcctactagtatggactggatttggcgcatccttttccttgtcggcgctgctaccggcgcgcattccttcgaacaactccagctgcaagagtctggccctggcctggtcaagcctagcgaaacactgagcctgacctgtaccgtgtctggcggctctatcagctccggcagctatttctggggctggatcagacaacctcctggcaaaggactggaatggatcggctccatctactacagcggcatcacctactacaaccccagcctgaagtccagagtgaccatctccgtggacaccagcaagaaccagttctccctgaagctgagcagcgtgacagccgccgataccgccgtgtattattgtgccagacatgacggcgctgtggccggcctgtttgattattggggacagggcaccctggtcaccgtgtcatctgctacgcgtgcctctacaaagggaccctccgtgtttcctctggctcccagcagcaagtctacaagcggaggaacagccgctctgggctgcctggtcaaggattactttcccgagcctgtgaccgtgtcctggaatagcggagcactgacaagcggcgtgcacacctttccagccgtgctgcaaagcagcggcctgtactctctgagcagcgtggtcacagtgcctagctctagcctgggcacccagacctacatctgcaatgtgaaccacaagcctagcaacaccaaggtggacaagagagtggaacccaagagctgtatccccgaggacacattcttcccaagcagcgacgtgccctgcgacgtgaagctggtggaaaagagcttcgagacagacaccaacctgaacttccagaacctgagcgtgatcggcttcagaatcctgctgctgaaagtggccggctttaacctgctgatgaccctgcggctgtggtccagc

SEQ ID NO: 8060 - DNA, 1881 bp, Artificial Sequence
  Synthetic Polynucloetide
atggccttaccagtgaccgccttgctcctgccgctggccttgctgctccacgccgccaggccgagctacgtgctgacacagcctccatccgtgtctgtggctccaggacagaccgccagaatcacatgcggcggcaacaacatcggcggcaagagcgtgcactggtatcagcagccacctggacaggctccagtggtggtggtgtacgacgacagcgatagacctagcggcatccccgagagattcagcggcagcaattccggcaataccgccacactgaccatcagcagagtggaagctggcgacgaggccgtgtactactgccaagtgtgggacagcagcagcgatcacgtggtgtttggcggcggaacaaagctgacagtgcttctcgagggacagcctaaggccaatcctaccgtgacactgttccctccaagcagcgaagaactccaggccaacaaggccacacttgtgtgcctgatctccgacttctaccctggggctgtgacagtggcttggaaggccgatggatctcctgtgaaagccggcgtggaaaccaccaagccatccaagcagagcaacaacaaatacgccgccagctcctacctgagcctgacacctgagcagtggaagtcccacagatcctacagctgccaagtgacccacgaaggcagcaccgtggaaaagacagtggcccctacagagtgcagcggcagagccgattgcggctttaccagcgagagctaccagcagggcgtgctgagcgccaccatcctgtacgagatcctgctgggcaaggccaccctgtacgccgtgctggtgtctgccctggtgctgatggctatggtcaagcggaaggacagccggggaagggccaagcgatctggatctggagcaacaaacttctcactactcaaacaagcaggtgacgtggaggagaatcccgggcctactagtatggactggatttggcgcatccttttccttgtcggcgctgctaccggcgcgcattccttcgaacaactccagctgcaagagtctggccctggcctggtcaagcctagcgaaacactgagcctgacctgtaccgtgtctggcggctctatcagctccggcagctatttctggggctggatcagacaacctcctggcaaaggactggaatggatcggctccatctactacagcggcatcacctactacaaccccagcctgaagtccagagtgaccatctccgtggacaccagcaagaaccagttctccctgaagctgagcagcgtgacagccgccgataccgccgtgtattattgtgccagacatgacggcgctgtggccggcctgtttgattattggggacagggcaccctggtcaccgtgtcatctgctacgcgtgcctctacaaagggaccctccgtgtttcctctggctcccagcagcaagtctacaagcggaggaacagccgctctgggctgcctggtcaaggattactttcccgagcctgtgaccgtgtcctggaatagcggagcactgacaagcggcgtgcacacctttccagccgtgctgcaaagcagcggcctgtactctctgagcagcgtggtcacagtgcctagctctagcctgggcacccagacctacatctgcaatgtgaaccacaagcctagcaacaccaaggtggacaagagagtggaacccaagagctgtatccccgaggacacattcttcccaagccccgagagcagctgcgacgtgaagctggtggaaaagagcttcgagacagacaccaacctgaacttccagaacctgagcgtgatcggcttcagaatcctgctgctgaaagtggccggctttaacctgctgatgaccctgcggctgtggtccagc

SEQ ID NO: 8061 - DNA, 1359 bp, Artificial Sequence
  Synthetic Polynucloetide
atggccttaccagtgaccgccttgctcctgccgctggccttgctgctccacgccgccaggccgagctacgtgctgacacagcctccatccgtgtctgtggctccaggacagaccgccagaatcacatgcggcggcaacaacatcggcggcaagagcgtgcactggtatcagcagccacctggacaggctccagtggtggtggtgtacgacgacagcgatagacctagcggcatccccgagagattcagcggcagcaattccggcaataccgccacactgaccatcagcagagtggaagctggcgacgaggccgtgtactactgccaagtgtgggacagcagcagcgatcacgtggtgtttggcggcggaacaaagctgacagtgcttggcggaggcggaagtggaggcggaggatctggcggcggaggctctcaactccagctgcaagagtctggccctggcctggtcaagcctagcgaaacactgagcctgacctgtaccgtgtctggcggctctatcagctccggcagctatttctggggctggatcagacaacctcctggcaaaggactggaatggatcggctccatctactacagcggcatcacctactacaaccccagcctgaagtccagagtgaccatctccgtggacaccagcaagaaccagttctccctgaagctgagcagcgtgacagccgccgataccgccgtgtattattgtgccagacatgacggcgctgtggccggcctgtttgattattggggacagggcaccctggtcaccgtgtcatctgctacgcgtgacggtaacgaggagatgggaggaatcactcaaaccccttacaaagtctcaatttcaggaacaactgttatccttacatgtccccagtatcctggcagcgagatcctttggcagcataacgacaagaatatagggggagatgaagacgataagaatatcggatctgacgaggatcacttgagcctgaaagagttctccgagcttgaacaaagcggatattatgtgtgctatccgcgcgggtcaaagccggaagacgctaacttttacctttatctccgagccagagtgtgcgaaaattgcatggaaatggacgttatgtccgttgctacaatagttatcgtagatatatgcatcacgggtggactgcttctgctggtttattattggtccaagaatagaaaggccaaagctaaacccgtgaccagaggcgctggcgcaggcggaaggcaaaggggacaaaacaaagaacggccaccaccagtgccaaatccagattatgagcctattcggaaaggacagagggacctgtactctggcctgaatcagagaagaatc

SEQ ID NO: 8062 - DNA, 1254 bp, Artificial Sequence
  Synthetic Polynucloetide
atggccttaccagtgaccgccttgctcctgccgctggccttgctgctccacgccgccaggccgagctacgtgctgacacagcctccatccgtgtctgtggctccaggacagaccgccagaatcacatgcggcggcaacaacatcggcggcaagagcgtgcactggtatcagcagccacctggacaggctccagtggtggtggtgtacgacgacagcgatagacctagcggcatccccgagagattcagcggcagcaattccggcaataccgccacactgaccatcagcagagtggaagctggcgacgaggccgtgtactactgccaagtgtgggacagcagcagcgatcacgtggtgtttggcggcggaacaaagctgacagtgcttggcggaggcggaagtggaggcggaggatctggcggcggaggctctcaactccagctgcaagagtctggccctggcctggtcaagcctagcgaaacactgagcctgacctgtaccgtgtctggcggctctatcagctccggcagctatttctggggctggatcagacaacctcctggcaaaggactggaatggatcggctccatctactacagcggcatcacctactacaaccccagcctgaagtccagagtgaccatctccgtggacaccagcaagaaccagttctccctgaagctgagcagcgtgacagccgccgataccgccgtgtattattgtgccagacatgacggcgctgtggccggcctgtttgattattggggacagggcaccctggtcaccgtgtcatctgctacgcgtttcaagatccccatcgaggaactggaagatcgggtgttcgtgaactgcaacacctctatcacctgggtggaaggcaccgtgggaacactgctgagcgacatcaccagactggacctcggcaagcggattctggaccctcggggcatctacagatgcaacggcaccgacatctacaaggacaaagaaagcaccgtgcaggtccactacagaatgtgccagtcctgcgtggaactggaccctgctacagtggccggcatcatcgtgaccgatgtgatcgctactctgctgctggctctgggagtgttctgcttcgccggacacgaaacaggcagactgtctggcgctgccgatacacaggccctgctgagaaacgaccaagtgtatcagcccctgcgcgacagagatgatgcccagtattctcacctcggcggcaactgggctagaaacaag

SEQ ID NO: 8063 - DNA, 1284 bp, Artificial Sequence
  Synthetic Polynucloetide
atggccttaccagtgaccgccttgctcctgccgctggccttgctgctccacgccgccaggccgagctacgtgctgacacagcctccatccgtgtctgtggctccaggacagaccgccagaatcacatgcggcggcaacaacatcggcggcaagagcgtgcactggtatcagcagccacctggacaggctccagtggtggtggtgtacgacgacagcgatagacctagcggcatccccgagagattcagcggcagcaattccggcaataccgccacactgaccatcagcagagtggaagctggcgacgaggccgtgtactactgccaagtgtgggacagcagcagcgatcacgtggtgtttggcggcggaacaaagctgacagtgcttggcggaggcggaagtggaggcggaggatctggcggcggaggctctcaactccagctgcaagagtctggccctggcctggtcaagcctagcgaaacactgagcctgacctgtaccgtgtctggcggctctatcagctccggcagctatttctggggctggatcagacaacctcctggcaaaggactggaatggatcggctccatctactacagcggcatcacctactacaaccccagcctgaagtccagagtgaccatctccgtggacaccagcaagaaccagttctccctgaagctgagcagcgtgacagccgccgataccgccgtgtattattgtgccagacatgacggcgctgtggccggcctgtttgattattggggacagggcaccctggtcaccgtgtcatctgctacgcgtcagagcatcaagggcaaccacctggtcaaggtgtacgactaccaagaggacggcagcgtgctgctgacatgtgatgccgaggccaagaacatcacctggtttaaggacggcaagatgatcggcttcctgaccgaggacaagaagaagtggaacctgggcagcaacgctaaggaccccagaggcatgtatcagtgcaagggcagccagaacaagagcaagcccctccaggtgtactaccggatgtgccagaactgcatcgagctgaacgccgctaccatcagcggctttctgttcgccgagatcgtgtccatcttcgtgctggccgtgggcgtgtactttatcgctggacaggatggcgtgcggcagagcagagcttccgataagcaaaccctgctgcctaacgaccagctgtaccagcctctgaaggacagagaggacgaccagtacagccacctccagggcaatcagctgagaagaaac

SEQ ID NO: 8064 - DNA, 1233 bp, Artificial Sequence
  Synthetic Polynucloetide
atggccttaccagtgaccgccttgctcctgccgctggccttgctgctccacgccgccaggccgagctacgtgctgacacagcctccatccgtgtctgtggctccaggacagaccgccagaatcacatgcggcggcaacaacatcggcggcaagagcgtgcactggtatcagcagccacctggacaggctccagtggtggtggtgtacgacgacagcgatagacctagcggcatccccgagagattcagcggcagcaattccggcaataccgccacactgaccatcagcagagtggaagctggcgacgaggccgtgtactactgccaagtgtgggacagcagcagcgatcacgtggtgtttggcggcggaacaaagctgacagtgcttggcggaggcggaagtggaggcggaggatctggcggcggaggctctcaactccagctgcaagagtctggccctggcctggtcaagcctagcgaaacactgagcctgacctgtaccgtgtctggcggctctatcagctccggcagctatttctggggctggatcagacaacctcctggcaaaggactggaatggatcggctccatctactacagcggcatcacctactacaaccccagcctgaagtccagagtgaccatctccgtggacaccagcaagaaccagttctccctgaagctgagcagcgtgacagccgccgataccgccgtgtattattgtgccagacatgacggcgctgtggccggcctgtttgattattggggacagggcaccctggtcaccgtgtcatctgctacgcgtcagagttttgggttgttggaccctaaattgtgctatctgttggacggaatcctgttcatttacggagtgatcctgaccgcattgttcctgcgggttaagttttccagatccgcagacgcacccgcttaccaacaagggcagaaccaactctacaatgaacttaatttggggcggagggaagagtacgacgttctggacaaaaggaggggacgagatcccgagatgggcggaaagcctcagcgaaggaagaatccgcaagaggggctttataacgaactccagaaagataaaatggcagaagcctatagtgagattgggatgaagggagaaaggaggaggggtaaaggtcacgatgggttgtaccaaggattgagcacagccactaaagatacctatgatgcgctccacatgcaggccctgccgccaaga

SEQ ID NO: 8065 - DNA, 1359 bp, Artificial Sequence
  Synthetic Polynucloetide
atggccttaccagtgaccgccttgctcctgccgctggccttgctgctccacgccgccaggccgcaactccagctgcaagagtctggccctggcctggtcaagcctagcgaaacactgagcctgacctgtaccgtgtctggcggctctatcagctccggcagctatttctggggctggatcagacaacctcctggcaaaggactggaatggatcggctccatctactacagcggcatcacctactacaaccccagcctgaagtccagagtgaccatctccgtggacaccagcaagaaccagttctccctgaagctgagcagcgtgacagccgccgataccgccgtgtattattgtgccagacatgacggcgctgtggccggcctgtttgattattggggacagggcaccctggtcaccgtgtcatctgctggcggaggcggaagtggaggcggaggatctggcggcggaggctctagctacgtgctgacacagcctccatccgtgtctgtggctccaggacagaccgccagaatcacatgcggcggcaacaacatcggcggcaagagcgtgcactggtatcagcagccacctggacaggctccagtggtggtggtgtacgacgacagcgatagacctagcggcatccccgagagattcagcggcagcaattccggcaataccgccacactgaccatcagcagagtggaagctggcgacgaggccgtgtactactgccaagtgtgggacagcagcagcgatcacgtggtgtttggcggcggaacaaagctgacagtgcttacgcgtgacggtaacgaggagatgggaggaatcactcaaaccccttacaaagtctcaatttcaggaacaactgttatccttacatgtccccagtatcctggcagcgagatcctttggcagcataacgacaagaatatagggggagatgaagacgataagaatatcggatctgacgaggatcacttgagcctgaaagagttctccgagcttgaacaaagcggatattatgtgtgctatccgcgcgggtcaaagccggaagacgctaacttttacctttatctccgagccagagtgtgcgaaaattgcatggaaatggacgttatgtccgttgctacaatagttatcgtagatatatgcatcacgggtggactgcttctgctggtttattattggtccaagaatagaaaggccaaagctaaacccgtgaccagaggcgctggcgcaggcggaaggcaaaggggacaaaacaaagaacggccaccaccagtgccaaatccagattatgagcctattcggaaaggacagagggacctgtactctggcctgaatcagagaagaatc

SEQ ID NO: 8066 - DNA, 1254 bp, Artificial Sequence
  Synthetic Polynucloetide
atggccttaccagtgaccgccttgctcctgccgctggccttgctgctccacgccgccaggccgcaactccagctgcaagagtctggccctggcctggtcaagcctagcgaaacactgagcctgacctgtaccgtgtctggcggctctatcagctccggcagctatttctggggctggatcagacaacctcctggcaaaggactggaatggatcggctccatctactacagcggcatcacctactacaaccccagcctgaagtccagagtgaccatctccgtggacaccagcaagaaccagttctccctgaagctgagcagcgtgacagccgccgataccgccgtgtattattgtgccagacatgacggcgctgtggccggcctgtttgattattggggacagggcaccctggtcaccgtgtcatctgctggcggaggcggaagtggaggcggaggatctggcggcggaggctctagctacgtgctgacacagcctccatccgtgtctgtggctccaggacagaccgccagaatcacatgcggcggcaacaacatcggcggcaagagcgtgcactggtatcagcagccacctggacaggctccagtggtggtggtgtacgacgacagcgatagacctagcggcatccccgagagattcagcggcagcaattccggcaataccgccacactgaccatcagcagagtggaagctggcgacgaggccgtgtactactgccaagtgtgggacagcagcagcgatcacgtggtgtttggcggcggaacaaagctgacagtgcttacgcgtttcaagatccccatcgaggaactggaagatcgggtgttcgtgaactgcaacacctctatcacctgggtggaaggcaccgtgggaacactgctgagcgacatcaccagactggacctcggcaagcggattctggaccctcggggcatctacagatgcaacggcaccgacatctacaaggacaaagaaagcaccgtgcaggtccactacagaatgtgccagtcctgcgtggaactggaccctgctacagtggccggcatcatcgtgaccgatgtgatcgctactctgctgctggctctgggagtgttctgcttcgccggacacgaaacaggcagactgtctggcgctgccgatacacaggccctgctgagaaacgaccaagtgtatcagcccctgcgcgacagagatgatgcccagtattctcacctcggcggcaactgggctagaaacaag

SEQ ID NO: 8067 - DNA, 1284 bp, Artificial Sequence
  Synthetic Polynucloetide
atggccttaccagtgaccgccttgctcctgccgctggccttgctgctccacgccgccaggccgcaactccagctgcaagagtctggccctggcctggtcaagcctagcgaaacactgagcctgacctgtaccgtgtctggcggctctatcagctccggcagctatttctggggctggatcagacaacctcctggcaaaggactggaatggatcggctccatctactacagcggcatcacctactacaaccccagcctgaagtccagagtgaccatctccgtggacaccagcaagaaccagttctccctgaagctgagcagcgtgacagccgccgataccgccgtgtattattgtgccagacatgacggcgctgtggccggcctgtttgattattggggacagggcaccctggtcaccgtgtcatctgctggcggaggcggaagtggaggcggaggatctggcggcggaggctctagctacgtgctgacacagcctccatccgtgtctgtggctccaggacagaccgccagaatcacatgcggcggcaacaacatcggcggcaagagcgtgcactggtatcagcagccacctggacaggctccagtggtggtggtgtacgacgacagcgatagacctagcggcatccccgagagattcagcggcagcaattccggcaataccgccacactgaccatcagcagagtggaagctggcgacgaggccgtgtactactgccaagtgtgggacagcagcagcgatcacgtggtgtttggcggcggaacaaagctgacagtgcttacgcgtcagagcatcaagggcaaccacctggtcaaggtgtacgactaccaagaggacggcagcgtgctgctgacatgtgatgccgaggccaagaacatcacctggtttaaggacggcaagatgatcggcttcctgaccgaggacaagaagaagtggaacctgggcagcaacgctaaggaccccagaggcatgtatcagtgcaagggcagccagaacaagagcaagcccctccaggtgtactaccggatgtgccagaactgcatcgagctgaacgccgctaccatcagcggctttctgttcgccgagatcgtgtccatcttcgtgctggccgtgggcgtgtactttatcgctggacaggatggcgtgcggcagagcagagcttccgataagcaaaccctgctgcctaacgaccagctgtaccagcctctgaaggacagagaggacgaccagtacagccacctccagggcaatcagctgagaagaaac

SEQ ID NO: 8068 - DNA, 1233 bp, Artificial Sequence
  Synthetic Polynucloetide
atggccttaccagtgaccgccttgctcctgccgctggccttgctgctccacgccgccaggccgcaactccagctgcaagagtctggccctggcctggtcaagcctagcgaaacactgagcctgacctgtaccgtgtctggcggctctatcagctccggcagctatttctggggctggatcagacaacctcctggcaaaggactggaatggatcggctccatctactacagcggcatcacctactacaaccccagcctgaagtccagagtgaccatctccgtggacaccagcaagaaccagttctccctgaagctgagcagcgtgacagccgccgataccgccgtgtattattgtgccagacatgacggcgctgtggccggcctgtttgattattggggacagggcaccctggtcaccgtgtcatctgctggcggaggcggaagtggaggcggaggatctggcggcggaggctctagctacgtgctgacacagcctccatccgtgtctgtggctccaggacagaccgccagaatcacatgcggcggcaacaacatcggcggcaagagcgtgcactggtatcagcagccacctggacaggctccagtggtggtggtgtacgacgacagcgatagacctagcggcatccccgagagattcagcggcagcaattccggcaataccgccacactgaccatcagcagagtggaagctggcgacgaggccgtgtactactgccaagtgtgggacagcagcagcgatcacgtggtgtttggcggcggaacaaagctgacagtgcttacgcgtcagagttttgggttgttggaccctaaattgtgctatctgttggacggaatcctgttcatttacggagtgatcctgaccgcattgttcctgcgggttaagttttccagatccgcagacgcacccgcttaccaacaagggcagaaccaactctacaatgaacttaatttggggcggagggaagagtacgacgttctggacaaaaggaggggacgagatcccgagatgggcggaaagcctcagcgaaggaagaatccgcaagaggggctttataacgaactccagaaagataaaatggcagaagcctatagtgagattgggatgaagggagaaaggaggaggggtaaaggtcacgatgggttgtaccaaggattgagcacagccactaaagatacctatgatgcgctccacatgcaggccctgccgccaaga

SEQ ID NO: 8069 - DNA, 1935 bp, Artificial Sequence
  Synthetic Polynucloetide
atggccttaccagtgaccgccttgctcctgccgctggccttgctgctccacgccgccaggccgagctacgtgctgacacagcctccatccgtgtctgtggctccaggacagaccgccagaatcacatgcggcggcaacaacatcggcggcaagagcgtgcactggtatcagcagccacctggacaggctccagtggtggtggtgtacgacgacagcgatagacctagcggcatccccgagagattcagcggcagcaattccggcaataccgccacactgaccatcagcagagtggaagctggcgacgaggccgtgtactactgccaagtgtgggacagcagcagcgatcacgtggtgtttggcggcggaacaaagctgacagtgcttggcggaggcggaagtggaggcggaggatctggcggcggaggctctcaactccagctgcaagagtctggccctggcctggtcaagcctagcgaaacactgagcctgacctgtaccgtgtctggcggctctatcagctccggcagctatttctggggctggatcagacaacctcctggcaaaggactggaatggatcggctccatctactacagcggcatcacctactacaaccccagcctgaagtccagagtgaccatctccgtggacaccagcaagaaccagttctccctgaagctgagcagcgtgacagccgccgataccgccgtgtattattgtgccagacatgacggcgctgtggccggcctgtttgattattggggacagggcaccctggtcaccgtgtcatctgctacgcgtgggagcggcatccagaaccctgatcctgccgtgtaccagctgcgggatagcaagagcagcgacaagagcgtgtgtctgttcaccgacttcgacagccagaccaacgtgtcccagagcaaggactccgacgtgtacatcaccgataagaccgtgctggacatgcggagcatggacttcaagagcaactccgccgtggcctggtccaacaagtccgatttcgcctgcgccaacgccttcaacaacagcattatccccgaggacacattcttcccaagccccgagagcagctgcgacgtgaagctggtggaaaagagcttcgagacagacaccaacctgaacttccagaacctgagcgtgatcggcttcagaatcctgctgctgaaagtggccggctttaacctgctgatgaccctgcggctgtggtccagccgcgccaagagaagcggatctggcgtgaagcagaccctgaatttcgacctgctgaagctggctggcgacgtggaatccaacccaggcccttctagaggccatatgaccgagtacaagcccacggtgcgcctcgccacccgcgacgacgtccccagggccgtacgcaccctcgccgccgcgttcgccgactaccccgccacgcgccacaccgtcgatccggaccgccacatcgagcgggtcaccgagctgcaagaactcttcctcacgcgcgtcgggctcgacatcggcaaggtgtgggtcgcggacgacggcgccgcggtggcggtctggaccacgccggagagcgtcgaagcgggggcggtgttcgccgagatcggcccgcgcatggccgagttgagcggttcccggctggccgcgcagcaacagatggaaggcctcctggcgccgcaccggcccaaggagcccgcgtggttcctggccaccgtcggcgtctcgcccgaccaccagggcaagggtctgggcagcgccgtcgtgctccccggagtggaggcggccgagcgcgccggggtgcccgccttcctggagacctccgcgccccgcaacctccccttctacgagcggctcggcttcaccgtcaccgccgacgtcgaggtgcccgaaggaccgcgcacctggtgcatgacccgcaagcccggtgcctga

SEQ ID NO: 8070 - DNA, 2031 bp, Artificial Sequence
  Synthetic Polynucloetide
atggccttaccagtgaccgccttgctcctgccgctggccttgctgctccacgccgccaggccgagctacgtgctgacacagcctccatccgtgtctgtggctccaggacagaccgccagaatcacatgcggcggcaacaacatcggcggcaagagcgtgcactggtatcagcagccacctggacaggctccagtggtggtggtgtacgacgacagcgatagacctagcggcatccccgagagattcagcggcagcaattccggcaataccgccacactgaccatcagcagagtggaagctggcgacgaggccgtgtactactgccaagtgtgggacagcagcagcgatcacgtggtgtttggcggcggaacaaagctgacagtgcttggcggaggcggaagtggaggcggaggatctggcggcggaggctctcaactccagctgcaagagtctggccctggcctggtcaagcctagcgaaacactgagcctgacctgtaccgtgtctggcggctctatcagctccggcagctatttctggggctggatcagacaacctcctggcaaaggactggaatggatcggctccatctactacagcggcatcacctactacaaccccagcctgaagtccagagtgaccatctccgtggacaccagcaagaaccagttctccctgaagctgagcagcgtgacagccgccgataccgccgtgtattattgtgccagacatgacggcgctgtggccggcctgtttgattattggggacagggcaccctggtcaccgtgtcatctgctctcgaggacctgaagaacgtgttcccacctgaggtggccgtgttcgagcctagcgaggccgagatcagccacacccagaaagccaccctcgtgtgcctggctaccggcttctaccccgaccatgtggaactgtcttggtgggtcaacggcaaagaggtgcacagcggcgtgtctaccgacccccagccactgaaagaacagcccgccctgaacgacagccggtactgcctgagcagcagactgagagtgtccgccaccttctggcagaacccccggaaccacttcagatgccaggtgcagttctacggcctgagcgagaacgacgagtggacccaggacagagccaagcccgtgacccagatcgtgtctgccgaagcctggggcagagccgattgcggctttaccagcgagagctaccagcagggcgtgctgagcgccaccatcctgtacgagatcctgctgggcaaggccaccctgtacgccgtgctggtgtctgccctggtgctgatggctatggtcaagcggaaggacagccggggaagggccaagcgatctggatctggagcaacaaacttctcactactcaaacaagcaggtgacgtggaggagaatcccgggcctactagaggccatatgaccgagtacaagcccacggtgcgcctcgccacccgcgacgacgtccccagggccgtacgcaccctcgccgccgcgttcgccgactaccccgccacgcgccacaccgtcgatccggaccgccacatcgagcgggtcaccgagctgcaagaactcttcctcacgcgcgtcgggctcgacatcggcaaggtgtgggtcgcggacgacggcgccgcggtggcggtctggaccacgccggagagcgtcgaagcgggggcggtgttcgccgagatcggcccgcgcatggccgagttgagcggttcccggctggccgcgcagcaacagatggaaggcctcctggcgccgcaccggcccaaggagcccgcgtggttcctggccaccgtcggcgtctcgcccgaccaccagggcaagggtctgggcagcgccgtcgtgctccccggagtggaggcggccgagcgcgccggggtgcccgccttcctggagacctccgcgccccgcaacctccccttctacgagcggctcggcttcaccgtcaccgccgacgtcgaggtgcccgaaggaccgcgcacctggtgcatgacccgcaagcccggtgcctga

SEQ ID NO: 8071 - DNA, 2181 bp, Artificial Sequence
  Synthetic Polynucloetide
atggccttaccagtgaccgccttgctcctgccgctggccttgctgctccacgccgccaggccgagctacgtgctgacacagcctccatccgtgtctgtggctccaggacagaccgccagaatcacatgcggcggcaacaacatcggcggcaagagcgtgcactggtatcagcagccacctggacaggctccagtggtggtggtgtacgacgacagcgatagacctagcggcatccccgagagattcagcggcagcaattccggcaataccgccacactgaccatcagcagagtggaagctggcgacgaggccgtgtactactgccaagtgtgggacagcagcagcgatcacgtggtgtttggcggcggaacaaagctgacagtgcttggcggaggcggaagtggaggcggaggatctggcggcggaggctctcaactccagctgcaagagtctggccctggcctggtcaagcctagcgaaacactgagcctgacctgtaccgtgtctggcggctctatcagctccggcagctatttctggggctggatcagacaacctcctggcaaaggactggaatggatcggctccatctactacagcggcatcacctactacaaccccagcctgaagtccagagtgaccatctccgtggacaccagcaagaaccagttctccctgaagctgagcagcgtgacagccgccgataccgccgtgtattattgtgccagacatgacggcgctgtggccggcctgtttgattattggggacagggcaccctggtcaccgtgtcatctgctacgcgtgagcagaaactgatctcggaagaggatctggggagcggcaccccattcccttctctggcccctcccatcatgctgctggtggacggcaagcagcagatggtggtcgtgtgcctggtgctggatgtggccccacctggactggacagccccatctggtttagcgccggcaatggctctgccctggacgcctttacctacggcccaagccctgccaccgatggcacctggacaaatctggcccacctgagcctgcccagcgaggaactggcttcttgggagcctctcgtgtgccacacaggacctggcgctgagggacacagcagatccacccagcctatgcacctgtctggcgaggccagcaccgccagaacctgtcctcaggaacctctgagaggcacccctggcggagcactgtggctgggagtgctgagactgctgctgttcaagctgctgctgtttgacctgctgctgacctgctcctgtctgtgcgatcctgccggccctctgccttctcctgccaccaccacaagactgagagccctgggcagccacagactgcaccctgccacagagacaggcggcagagaggccacaagcagccctagaccccagcccagagacagaagatggggcgataccccccctggcagaaagcctggatctccagtccgcgccaagagaagcggatctggcgtgaagcagaccctgaatttcgacctgctgaagctggctggcgacgtggaatccaacccaggcccttctagatctagaggccatatgaccgagtacaagcccacggtgcgcctcgccacccgcgacgacgtccccagggccgtacgcaccctcgccgccgcgttcgccgactaccccgccacgcgccacaccgtcgatccggaccgccacatcgagcgggtcaccgagctgcaagaactcttcctcacgcgcgtcgggctcgacatcggcaaggtgtgggtcgcggacgacggcgccgcggtggcggtctggaccacgccggagagcgtcgaagcgggggcggtgttcgccgagatcggcccgcgcatggccgagttgagcggttcccggctggccgcgcagcaacagatggaaggcctcctggcgccgcaccggcccaaggagcccgcgtggttcctggccaccgtcggcgtctcgcccgaccaccagggcaagggtctgggcagcgccgtcgtgctccccggagtggaggcggccgagcgcgccggggtgcccgccttcctggagacctccgcgccccgcaacctccccttctacgagcggctcggcttcaccgtcaccgccgacgtcgaggtgcccgaaggaccgcgcacctggtgcatgacccgcaagcccggtgcctga

SEQ ID NO: 8072 - DNA, 1620 bp, Artificial Sequence
  Synthetic Polynucloetide
atggccttaccagtgaccgccttgctcctgccgctggccttgctgctccacgccgccaggccgagctacgtgctgacacagcctccatccgtgtctgtggctccaggacagaccgccagaatcacatgcggcggcaacaacatcggcggcaagagcgtgcactggtatcagcagccacctggacaggctccagtggtggtggtgtacgacgacagcgatagacctagcggcatccccgagagattcagcggcagcaattccggcaataccgccacactgaccatcagcagagtggaagctggcgacgaggccgtgtactactgccaagtgtgggacagcagcagcgatcacgtggtgtttggcggcggaacaaagctgacagtgcttctcgaggacctgaagaacgtgttcccacctgaggtggccgtgttcgagcctagcgaggccgagatcagccacacccagaaagccaccctcgtgtgcctggctaccggcttctaccccgaccatgtggaactgtcttggtgggtcaacggcaaagaggtgcacagcggcgtgtctaccgacccccagccactgaaagaacagcccgccctgaacgacagccggtactgcctgagcagcagactgagagtgtccgccaccttctggcagaacccccggaaccacttcagatgccaggtgcagttctacggcctgagcgagaacgacgagtggacccaggacagagccaagcccgtgacccagatcgtgtctgccgaagcctggggcagagccgattgcggctttaccagcgagagctaccagcagggcgtgctgagcgccaccatcctgtacgagatcctgctgggcaaggccaccctgtacgccgtgctggtgtctgccctggtgctgatggctatggtcaagcggaaggacagccggggaagggccaagcgatctggatctggagcaacaaacttctcactactcaaacaagcaggtgacgtggaggagaatcccgggcctactagaggccatatgaccgagtacaagcccacggtgcgcctcgccacccgcgacgacgtccccagggccgtacgcaccctcgccgccgcgttcgccgactaccccgccacgcgccacaccgtcgatccggaccgccacatcgagcgggtcaccgagctgcaagaactcttcctcacgcgcgtcgggctcgacatcggcaaggtgtgggtcgcggacgacggcgccgcggtggcggtctggaccacgccggagagcgtcgaagcgggggcggtgttcgccgagatcggcccgcgcatggccgagttgagcggttcccggctggccgcgcagcaacagatggaaggcctcctggcgccgcaccggcccaaggagcccgcgtggttcctggccaccgtcggcgtctcgcccgaccaccagggcaagggtctgggcagcgccgtcgtgctccccggagtggaggcggccgagcgcgccggggtgcccgccttcctggagacctccgcgccccgcaacctccccttctacgagcggctcggcttcaccgtcaccgccgacgtcgaggtgcccgaaggaccgcgcacctggtgcatgacccgcaagcccggtgcctga

SEQ ID NO: 8073 - DNA, 927 bp, Artificial Sequence
  Synthetic Polynucloetide
atggccttaccagtgaccgccttgctcctgccgctggccttgctgctccacgccgccaggccgagctacgtgctgacacagcctccatccgtgtctgtggctccaggacagaccgccagaatcacatgcggcggcaacaacatcggcggcaagagcgtgcactggtatcagcagccacctggacaggctccagtggtggtggtgtacgacgacagcgatagacctagcggcatccccgagagattcagcggcagcaattccggcaataccgccacactgaccatcagcagagtggaagctggcgacgaggccgtgtactactgccaagtgtgggacagcagcagcgatcacgtggtgtttggcggcggaacaaagctgacagtgcttctcgaggacctgaagaacgtgttcccacctgaggtggccgtgttcgagcctagcgaggccgagatcagccacacccagaaagccaccctcgtgtgcctggctaccggcttctaccccgaccatgtggaactgtcttggtgggtcaacggcaaagaggtgcacagcggcgtgtctaccgacccccagccactgaaagaacagcccgccctgaacgacagccggtactgcctgagcagcagactgagagtgtccgccaccttctggcagaacccccggaaccacttcagatgccaggtgcagttctacggcctgagcgagaacgacgagtggacccaggacagagccaagcccgtgacccagatcgtgtctgccgaagcctggggcagagccgattgcggctttaccagcgagagctaccagcagggcgtgctgagcgccaccatcctgtacgagatcctgctgggcaaggccaccctgtacgccgtgctggtgtctgccctggtgctgatggctatggtcaagcggaaggacagccgggga

SEQ ID NO: 8074 - DNA, 1356 bp, Artificial Sequence; identical to SEQ ID NO: 7936
  Synthetic Polynucloetide

SEQ ID NO: 8075 - DNA, 855 bp, Artificial Sequence; identical to SEQ ID NO: 7937
  Synthetic Polynucloetide

SEQ ID NO: 8076 - DNA, 1674 bp, Artificial Sequence
  Synthetic Polynucloetide
atggccttaccagtgaccgccttgctcctgccgctggccttgctgctccacgccgccaggccgagctacgtgctgacacagcctccatccgtgtctgtggctccaggacagaccgccagaatcacatgcggcggcaacaacatcggcggcaagagcgtgcactggtatcagcagccacctggacaggctccagtggtggtggtgtacgacgacagcgatagacctagcggcatccccgagagattcagcggcagcaattccggcaataccgccacactgaccatcagcagagtggaagctggcgacgaggccgtgtactactgccaagtgtgggacagcagcagcgatcacgtggtgtttggcggcggaacaaagctgacagtgcttctcgaggggaaaccaattcccaaccctcttctgggactggattcaaccggcagcggcgaggacctgaagaacgtgttcccacctgaggtggccgtgttcgagcctagcgaggccgagatcagccacacccagaaagccaccctcgtgtgcctggctaccggcttctaccccgaccatgtggaactgtcttggtgggtcaacggcaaagaggtgcacagcggcgtgtgtaccgacccccagccactgaaagaacagcccgccctgaacgacagccggtactgcctgagcagcagactgagagtgtccgccaccttctggcagaacccccggaaccacttcagatgccaggtgcagttctacggcctgagcgagaacgacgagtggacccaggacagagccaagcccgtgacccagatcgtgtctgccgaagcctggggcagagccgattgcggctttaccagcgagagctaccagcagggcgtgctgagcgccaccatcctgtacgagatcctgctgggcaaggccaccctgtacgccgtgctggtgtctgccctggtgctgatggctatggtcaagcggaaggacagccggggaagggccaagcgatctggatctggagcaacaaacttctcactactcaaacaagcaggtgacgtggaggagaatcccgggcctactagaggccatatgaccgagtacaagcccacggtgcgcctcgccacccgcgacgacgtccccagggccgtacgcaccctcgccgccgcgttcgccgactaccccgccacgcgccacaccgtcgatccggaccgccacatcgagcgggtcaccgagctgcaagaactcttcctcacgcgcgtcgggctcgacatcggcaaggtgtgggtcgcggacgacggcgccgcggtggcggtctggaccacgccggagagcgtcgaagcgggggcggtgttcgccgagatcggcccgcgcatggccgagttgagcggttcccggctggccgcgcagcaacagatggaaggcctcctggcgccgcaccggcccaaggagcccgcgtggttcctggccaccgtcggcgtctcgcccgaccaccagggcaagggtctgggcagcgccgtcgtgctccccggagtggaggcggccgagcgcgccggggtgcccgccttcctggagacctccgcgccccgcaacctccccttctacgagcggctcggcttcaccgtcaccgccgacgtcgaggtgcccgaaggaccgcgcacctggtgcatgacccgcaagcccggtgcctga

SEQ ID NO: 8077 - DNA, 984 bp, Artificial Sequence
  Synthetic Polynucloetide
atggccttaccagtgaccgccttgctcctgccgctggccttgctgctccacgccgccaggccgagctacgtgctgacacagcctccatccgtgtctgtggctccaggacagaccgccagaatcacatgcggcggcaacaacatcggcggcaagagcgtgcactggtatcagcagccacctggacaggctccagtggtggtggtgtacgacgacagcgatagacctagcggcatccccgagagattcagcggcagcaattccggcaataccgccacactgaccatcagcagagtggaagctggcgacgaggccgtgtactactgccaagtgtgggacagcagcagcgatcacgtggtgtttggcggcggaacaaagctgacagtgcttctcgaggggaaaccaattcccaaccctcttctgggactggattcaaccggcagcggcgaggacctgaagaacgtgttcccacctgaggtggccgtgttcgagcctagcgaggccgagatcagccacacccagaaagccaccctcgtgtgcctggctaccggcttctaccccgaccatgtggaactgtcttggtgggtcaacggcaaagaggtgcacagcggcgtgtgtaccgacccccagccactgaaagaacagcccgccctgaacgacagccggtactgcctgagcagcagactgagagtgtccgccaccttctggcagaacccccggaaccacttcagatgccaggtgcagttctacggcctgagcgagaacgacgagtggacccaggacagagccaagcccgtgacccagatcgtgtctgccgaagcctggggcagagccgattgcggctttaccagcgagagctaccagcagggcgtgctgagcgccaccatcctgtacgagatcctgctgggcaaggccaccctgtacgccgtgctggtgtctgccctggtgctgatggctatggtcaagcggaaggacagccggggatga

SEQ ID NO: 8078 - DNA, 1392 bp, Artificial Sequence; identical to SEQ ID NO: 7940
  Synthetic Polynucloetide

SEQ ID NO: 8079 - DNA, 894 bp, Artificial Sequence; identical to SEQ ID NO: 7941
  Synthetic Polynucloetide

SEQ ID NO: 8080 - DNA, 1935 bp, Artificial Sequence
  Synthetic Polynucloetide
atggccttaccagtgaccgccttgctcctgccgctggccttgctgctccacgccgccaggccgagctacgtgctgacacagcctccatccgtgtctgtggctccaggacagaccgccagaatcacatgcggcggcaacaacatcggcggcaagagcgtgcactggtatcagcagccacctggacaggctccagtggtggtggtgtacgacgacagcgatagacctagcggcatccccgagagattcagcggcagcaattccggcaataccgccacactgaccatcagcagagtggaagctggcgacgaggccgtgtactactgccaagtgtgggacagcagcagcgatcacgtggtgtttggcggcggaacaaagctgacagtgcttggcggaggcggaagtggaggcggaggatctggcggcggaggctctcaactccagctgcaagagtctggccctggcctggtcaagcctagcgaaacactgagcctgacctgtaccgtgtctggcggctctatcagctccggcagctatttctggggctggatcagacaacctcctggcaaaggactggaatggatcggctccatctactacagcggcatcacctactacaaccccagcctgaagtccagagtgaccatctccgtggacaccagcaagaaccagttctccctgaagctgagcagcgtgacagccgccgataccgccgtgtattattgtgccagacatgacggcgctgtggccggcctgtttgattattggggacagggcaccctggtcaccgtgtcatctgctacgcgtgggagcggcatccagaaccctgatcctgccgtgtaccagctgcgggatagcaagagcagcgacaagagcgtgtgtctgttcaccgacttcgacagccagaccaacgtgtcccagagcaaggactccgacgtgtacatcaccgataagaccgtgctggacatgcggagcatggacttcaagagcaactccgccgtggcctggtccaacaagtccgatttcgcctgcgccaacgccttcaacaacagcattatccccgaggacacattcttcccaagcagcgacgtgccctgcgacgtgaagctggtggaaaagagcttcgagacagacaccaacctgaacttccagaacctgagcgtgatcggcttcagaatcctgctgctgaaagtggccggctttaacctgctgatgaccctgcggctgtggtccagccgcgccaagagaagcggatctggcgtgaagcagaccctgaatttcgacctgctgaagctggctggcgacgtggaatccaacccaggcccttctagaggccatatgaccgagtacaagcccacggtgcgcctcgccacccgcgacgacgtccccagggccgtacgcaccctcgccgccgcgttcgccgactaccccgccacgcgccacaccgtcgatccggaccgccacatcgagcgggtcaccgagctgcaagaactcttcctcacgcgcgtcgggctcgacatcggcaaggtgtgggtcgcggacgacggcgccgcggtggcggtctggaccacgccggagagcgtcgaagcgggggcggtgttcgccgagatcggcccgcgcatggccgagttgagcggttcccggctggccgcgcagcaacagatggaaggcctcctggcgccgcaccggcccaaggagcccgcgtggttcctggccaccgtcggcgtctcgcccgaccaccagggcaagggtctgggcagcgccgtcgtgctccccggagtggaggcggccgagcgcgccggggtgcccgccttcctggagacctccgcgccccgcaacctccccttctacgagcggctcggcttcaccgtcaccgccgacgtcgaggtgcccgaaggaccgcgcacctggtgcatgacccgcaagcccggtgcctga

SEQ ID NO: 8081 - DNA, 2031 bp, Artificial Sequence
  Synthetic Polynucloetide
atggccttaccagtgaccgccttgctcctgccgctggccttgctgctccacgccgccaggccgagctacgtgctgacacagcctccatccgtgtctgtggctccaggacagaccgccagaatcacatgcggcggcaacaacatcggcggcaagagcgtgcactggtatcagcagccacctggacaggctccagtggtggtggtgtacgacgacagcgatagacctagcggcatccccgagagattcagcggcagcaattccggcaataccgccacactgaccatcagcagagtggaagctggcgacgaggccgtgtactactgccaagtgtgggacagcagcagcgatcacgtggtgtttggcggcggaacaaagctgacagtgcttggcggaggcggaagtggaggcggaggatctggcggcggaggctctcaactccagctgcaagagtctggccctggcctggtcaagcctagcgaaacactgagcctgacctgtaccgtgtctggcggctctatcagctccggcagctatttctggggctggatcagacaacctcctggcaaaggactggaatggatcggctccatctactacagcggcatcacctactacaaccccagcctgaagtccagagtgaccatctccgtggacaccagcaagaaccagttctccctgaagctgagcagcgtgacagccgccgataccgccgtgtattattgtgccagacatgacggcgctgtggccggcctgtttgattattggggacagggcaccctggtcaccgtgtcatctgctctcgaggacctgaagaacgtgttcccacctgaggtggccgtgttcgagcctagcaaggccgagatcgcccacacccagaaagccaccctcgtgtgcctggctaccggcttctaccccgaccatgtggaactgtcttggtgggtcaacggcaaagaggtgcacagcggcgtgtctaccgacccccagccactgaaagaacagcccgccctgaacgacagccggtactgcctgagcagcagactgagagtgtccgccaccttctggcagaacccccggaaccacttcagatgccaggtgcagttctacggcctgagcgagaacgacgagtggacccaggacagagccaagcccgtgacccagatcgtgtctgccgaagcctggggcagagccgattgcggcatcaccagcgccagctaccaccagggcgtgctgagcgccaccatcctgtacgagatcctgctgggcaaggccaccctgtacgccgtgctggtgtctgccctggtgctgatggctatggtcaagcggaaggacagccggggaagggccaagcgatctggatctggagcaacaaacttctcactactcaaacaagcaggtgacgtggaggagaatcccgggcctactagaggccatatgaccgagtacaagcccacggtgcgcctcgccacccgcgacgacgtccccagggccgtacgcaccctcgccgccgcgttcgccgactaccccgccacgcgccacaccgtcgatccggaccgccacatcgagcgggtcaccgagctgcaagaactcttcctcacgcgcgtcgggctcgacatcggcaaggtgtgggtcgcggacgacggcgccgcggtggcggtctggaccacgccggagagcgtcgaagcgggggcggtgttcgccgagatcggcccgcgcatggccgagttgagcggttcccggctggccgcgcagcaacagatggaaggcctcctggcgccgcaccggcccaaggagcccgcgtggttcctggccaccgtcggcgtctcgcccgaccaccagggcaagggtctgggcagcgccgtcgtgctccccggagtggaggcggccgagcgcgccggggtgcccgccttcctggagacctccgcgccccgcaacctccccttctacgagcggctcggcttcaccgtcaccgccgacgtcgaggtgcccgaaggaccgcgcacctggtgcatgacccgcaagcccggtgcctga

SEQ ID NO: 8082 - DNA, 2100 bp, Artificial Sequence
  Synthetic Polynucloetide
atggccttaccagtgaccgccttgctcctgccgctggccttgctgctccacgccgccaggccgagctacgtgctgacacagcctccatccgtgtctgtggctccaggacagaccgccagaatcacatgcggcggcaacaacatcggcggcaagagcgtgcactggtatcagcagccacctggacaggctccagtggtggtggtgtacgacgacagcgatagacctagcggcatccccgagagattcagcggcagcaattccggcaataccgccacactgaccatcagcagagtggaagctggcgacgaggccgtgtactactgccaagtgtgggacagcagcagcgatcacgtggtgtttggcggcggaacaaagctgacagtgcttggcggaggcggaagtggaggcggaggatctggcggcggaggctctcaactccagctgcaagagtctggccctggcctggtcaagcctagcgaaacactgagcctgacctgtaccgtgtctggcggctctatcagctccggcagctatttctggggctggatcagacaacctcctggcaaaggactggaatggatcggctccatctactacagcggcatcacctactacaaccccagcctgaagtccagagtgaccatctccgtggacaccagcaagaaccagttctccctgaagctgagcagcgtgacagccgccgataccgccgtgtattattgtgccagacatgacggcgctgtggccggcctgtttgattattggggacagggcaccctggtcaccgtgtcatctgctacgcgtgggtctggaggcggaggcagcggcggaggcgggagcggcgacggtaacgaggagatgggaggaatcactcaaaccccttacaaagtctcaatttcaggaacaactgttatccttacatgtccccagtatcctggcagcgagatcctttggcagcataacgacaagaatatagggggagatgaagacgataagaatatcggatctgacgaggatcacttgagcctgaaagagttctccgagcttgaacaaagcggatattatgtgtgctatccgcgcgggtcaaagccggaagacgctaacttttacctttatctccgagccagagtgtgcgaaaattgcatggaaatggacgttatgtccgttgctacaatagttatcgtagatatatgcatcacgggtggactgcttctgctggtttattattggtccaagaatagaaaggccaaagctaaacccgtgaccagaggcgctggcgcaggcggaaggcaaaggggacaaaacaaagaacggccaccaccagtgccaaatccagattatgagcctattcggaaaggacagagggacctgtactctggcctgaatcagagaagaatccgcgccaagagaagcggatctggcgtgaagcagaccctgaatttcgacctgctgaagctggctggcgacgtggaatccaacccaggcccttctagaggccatatgaccgagtacaagcccacggtgcgcctcgccacccgcgacgacgtccccagggccgtacgcaccctcgccgccgcgttcgccgactaccccgccacgcgccacaccgtcgatccggaccgccacatcgagcgggtcaccgagctgcaagaactcttcctcacgcgcgtcgggctcgacatcggcaaggtgtgggtcgcggacgacggcgccgcggtggcggtctggaccacgccggagagcgtcgaagcgggggcggtgttcgccgagatcggcccgcgcatggccgagttgagcggttcccggctggccgcgcagcaacagatggaaggcctcctggcgccgcaccggcccaaggagcccgcgtggttcctggccaccgtcggcgtctcgcccgaccaccagggcaagggtctgggcagcgccgtcgtgctccccggagtggaggcggccgagcgcgccggggtgcccgccttcctggagacctccgcgccccgcaacctccccttctacgagcggctcggcttcaccgtcaccgccgacgtcgaggtgcccgaaggaccgcgcacctggtgcatgacccgcaagcccggtgcctga

SEQ ID NO: 8083 - DNA, 1995 bp, Artificial Sequence
  Synthetic Polynucloetide
atggccttaccagtgaccgccttgctcctgccgctggccttgctgctccacgccgccaggccgagctacgtgctgacacagcctccatccgtgtctgtggctccaggacagaccgccagaatcacatgcggcggcaacaacatcggcggcaagagcgtgcactggtatcagcagccacctggacaggctccagtggtggtggtgtacgacgacagcgatagacctagcggcatccccgagagattcagcggcagcaattccggcaataccgccacactgaccatcagcagagtggaagctggcgacgaggccgtgtactactgccaagtgtgggacagcagcagcgatcacgtggtgtttggcggcggaacaaagctgacagtgcttggcggaggcggaagtggaggcggaggatctggcggcggaggctctcaactccagctgcaagagtctggccctggcctggtcaagcctagcgaaacactgagcctgacctgtaccgtgtctggcggctctatcagctccggcagctatttctggggctggatcagacaacctcctggcaaaggactggaatggatcggctccatctactacagcggcatcacctactacaaccccagcctgaagtccagagtgaccatctccgtggacaccagcaagaaccagttctccctgaagctgagcagcgtgacagccgccgataccgccgtgtattattgtgccagacatgacggcgctgtggccggcctgtttgattattggggacagggcaccctggtcaccgtgtcatctgctacgcgtgggtctggaggcggaggcagcggcggaggcgggagcggcttcaagatccccatcgaggaactggaagatcgggtgttcgtgaactgcaacacctctatcacctgggtggaaggcaccgtgggaacactgctgagcgacatcaccagactggacctcggcaagcggattctggaccctcggggcatctacagatgcaacggcaccgacatctacaaggacaaagaaagcaccgtgcaggtccactacagaatgtgccagtcctgcgtggaactggaccctgctacagtggccggcatcatcgtgaccgatgtgatcgctactctgctgctggctctgggagtgttctgcttcgccggacacgaaacaggcagactgtctggcgctgccgatacacaggccctgctgagaaacgaccaagtgtatcagcccctgcgcgacagagatgatgcccagtattctcacctcggcggcaactgggctagaaacaagcgcgccaagagaagcggatctggcgtgaagcagaccctgaatttcgacctgctgaagctggctggcgacgtggaatccaacccaggcccttctagaggccatatgaccgagtacaagcccacggtgcgcctcgccacccgcgacgacgtccccagggccgtacgcaccctcgccgccgcgttcgccgactaccccgccacgcgccacaccgtcgatccggaccgccacatcgagcgggtcaccgagctgcaagaactcttcctcacgcgcgtcgggctcgacatcggcaaggtgtgggtcgcggacgacggcgccgcggtggcggtctggaccacgccggagagcgtcgaagcgggggcggtgttcgccgagatcggcccgcgcatggccgagttgagcggttcccggctggccgcgcagcaacagatggaaggcctcctggcgccgcaccggcccaaggagcccgcgtggttcctggccaccgtcggcgtctcgcccgaccaccagggcaagggtctgggcagcgccgtcgtgctccccggagtggaggcggccgagcgcgccggggtgcccgccttcctggagacctccgcgccccgcaacctccccttctacgagcggctcggcttcaccgtcaccgccgacgtcgaggtgcccgaaggaccgcgcacctggtgcatgacccgcaagcccggtgcctga

SEQ ID NO: 8084 - DNA, 2025 bp, Artificial Sequence
  Synthetic Polynucloetide
atggccttaccagtgaccgccttgctcctgccgctggccttgctgctccacgccgccaggccgagctacgtgctgacacagcctccatccgtgtctgtggctccaggacagaccgccagaatcacatgcggcggcaacaacatcggcggcaagagcgtgcactggtatcagcagccacctggacaggctccagtggtggtggtgtacgacgacagcgatagacctagcggcatccccgagagattcagcggcagcaattccggcaataccgccacactgaccatcagcagagtggaagctggcgacgaggccgtgtactactgccaagtgtgggacagcagcagcgatcacgtggtgtttggcggcggaacaaagctgacagtgcttggcggaggcggaagtggaggcggaggatctggcggcggaggctctcaactccagctgcaagagtctggccctggcctggtcaagcctagcgaaacactgagcctgacctgtaccgtgtctggcggctctatcagctccggcagctatttctggggctggatcagacaacctcctggcaaaggactggaatggatcggctccatctactacagcggcatcacctactacaaccccagcctgaagtccagagtgaccatctccgtggacaccagcaagaaccagttctccctgaagctgagcagcgtgacagccgccgataccgccgtgtattattgtgccagacatgacggcgctgtggccggcctgtttgattattggggacagggcaccctggtcaccgtgtcatctgctacgcgtgggtctggaggcggaggcagcggcggaggcgggagcggccagagcatcaagggcaaccacctggtcaaggtgtacgactaccaagaggacggcagcgtgctgctgacatgtgatgccgaggccaagaacatcacctggtttaaggacggcaagatgatcggcttcctgaccgaggacaagaagaagtggaacctgggcagcaacgctaaggaccccagaggcatgtatcagtgcaagggcagccagaacaagagcaagcccctccaggtgtactaccggatgtgccagaactgcatcgagctgaacgccgctaccatcagcggctttctgttcgccgagatcgtgtccatcttcgtgctggccgtgggcgtgtactttatcgctggacaggatggcgtgcggcagagcagagcttccgataagcaaaccctgctgcctaacgaccagctgtaccagcctctgaaggacagagaggacgaccagtacagccacctccagggcaatcagctgagaagaaaccgcgccaagagaagcggatctggcgtgaagcagaccctgaatttcgacctgctgaagctggctggcgacgtggaatccaacccaggcccttctagaggccatatgaccgagtacaagcccacggtgcgcctcgccacccgcgacgacgtccccagggccgtacgcaccctcgccgccgcgttcgccgactaccccgccacgcgccacaccgtcgatccggaccgccacatcgagcgggtcaccgagctgcaagaactcttcctcacgcgcgtcgggctcgacatcggcaaggtgtgggtcgcggacgacggcgccgcggtggcggtctggaccacgccggagagcgtcgaagcgggggcggtgttcgccgagatcggcccgcgcatggccgagttgagcggttcccggctggccgcgcagcaacagatggaaggcctcctggcgccgcaccggcccaaggagcccgcgtggttcctggccaccgtcggcgtctcgcccgaccaccagggcaagggtctgggcagcgccgtcgtgctccccggagtggaggcggccgagcgcgccggggtgcccgccttcctggagacctccgcgccccgcaacctccccttctacgagcggctcggcttcaccgtcaccgccgacgtcgaggtgcccgaaggaccgcgcacctggtgcatgacccgcaagcccggtgcctga

SEQ ID NO: 8085 - DNA, 1974 bp, Artificial Sequence
  Synthetic Polynucloetide
atggccttaccagtgaccgccttgctcctgccgctggccttgctgctccacgccgccaggccgagctacgtgctgacacagcctccatccgtgtctgtggctccaggacagaccgccagaatcacatgcggcggcaacaacatcggcggcaagagcgtgcactggtatcagcagccacctggacaggctccagtggtggtggtgtacgacgacagcgatagacctagcggcatccccgagagattcagcggcagcaattccggcaataccgccacactgaccatcagcagagtggaagctggcgacgaggccgtgtactactgccaagtgtgggacagcagcagcgatcacgtggtgtttggcggcggaacaaagctgacagtgcttggcggaggcggaagtggaggcggaggatctggcggcggaggctctcaactccagctgcaagagtctggccctggcctggtcaagcctagcgaaacactgagcctgacctgtaccgtgtctggcggctctatcagctccggcagctatttctggggctggatcagacaacctcctggcaaaggactggaatggatcggctccatctactacagcggcatcacctactacaaccccagcctgaagtccagagtgaccatctccgtggacaccagcaagaaccagttctccctgaagctgagcagcgtgacagccgccgataccgccgtgtattattgtgccagacatgacggcgctgtggccggcctgtttgattattggggacagggcaccctggtcaccgtgtcatctgctacgcgtgggtctggaggcggaggcagcggcggaggcgggagcggccagagttttgggttgttggaccctaaattgtgctatctgttggacggaatcctgttcatttacggagtgatcctgaccgcattgttcctgcgggttaagttttccagatccgcagacgcacccgcttaccaacaagggcagaaccaactctacaatgaacttaatttggggcggagggaagagtacgacgttctggacaaaaggaggggacgagatcccgagatgggcggaaagcctcagcgaaggaagaatccgcaagaggggctttataacgaactccagaaagataaaatggcagaagcctatagtgagattgggatgaagggagaaaggaggaggggtaaaggtcacgatgggttgtaccaaggattgagcacagccactaaagatacctatgatgcgctccacatgcaggccctgccgccaagacgcgccaagagaagcggatctggcgtgaagcagaccctgaatttcgacctgctgaagctggctggcgacgtggaatccaacccaggcccttctagaggccatatgaccgagtacaagcccacggtgcgcctcgccacccgcgacgacgtccccagggccgtacgcaccctcgccgccgcgttcgccgactaccccgccacgcgccacaccgtcgatccggaccgccacatcgagcgggtcaccgagctgcaagaactcttcctcacgcgcgtcgggctcgacatcggcaaggtgtgggtcgcggacgacggcgccgcggtggcggtctggaccacgccggagagcgtcgaagcgggggcggtgttcgccgagatcggcccgcgcatggccgagttgagcggttcccggctggccgcgcagcaacagatggaaggcctcctggcgccgcaccggcccaaggagcccgcgtggttcctggccaccgtcggcgtctcgcccgaccaccagggcaagggtctgggcagcgccgtcgtgctccccggagtggaggcggccgagcgcgccggggtgcccgccttcctggagacctccgcgccccgcaacctccccttctacgagcggctcggcttcaccgtcaccgccgacgtcgaggtgcccgaaggaccgcgcacctggtgcatgacccgcaagcccggtgcctga

SEQ ID NO: 8086 - DNA, 2274 bp, Artificial Sequence
  Synthetic Polynucloetide
atggccttaccagtgaccgccttgctcctgccgctggccttgctgctccacgccgccaggccggaagtgcagctggttgaatctggcggaggactggttcagcctggcggatctctgagactgtcttgtgccgccagcggcttcagcttcagcgacttttggatgagctgggtccgacaggcccctggcaaaggacttgaatgggtcgccacaatcagccaggccggcagcgagaaggactacgtggactctgtgaagggcagattcaccatcagccgggacaacgccaagaagtccctgtacctccagatgaacagcctgagagccgaggacaccgccgtgtactattgtgcctctggcgtgtacagcttcgactacagaggccagggcaccctggtcacagtctcttctggtaccggcggaggcggatctggcggcggaggtagcggtggcggaggatctgaattcagctacgtgctgacacagcctccatccgtgtctgtggctccaggacagaccgccagaatcacatgcggcggcaacaacatcggcggcaagagcgtgcactggtatcagcagccacctggacaggctccagtggtggtggtgtacgacgacagcgatagacctagcggcatccccgagagattcagcggcagcaattccggcaataccgccacactgaccatcagcagagtggaagctggcgacgaggccgtgtactactgccaagtgtgggacagcagcagcgatcacgtggtgtttggcggcggaacaaagctgacagtgcttctcgaggacctgaagaacgtgttcccacctgaggtggccgtgttcgagcctagcgaggccgagatcagccacacccagaaagccaccctcgtgtgcctggctaccggcttctaccccgaccatgtggaactgtcttggtgggtcaacggcaaagaggtgcacagcggcgtgtgtaccgacccccagccactgaaagaacagcccgccctgaacgacagccggtactgcctgagcagcagactgagagtgtccgccaccttctggcagaacccccggaaccacttcagatgccaggtgcagttctacggcctgagcgagaacgacgagtggacccaggacagagccaagcccgtgacccagatcgtgtctgccgaagcctggggcagagccgattgcggctttaccagcgagagctaccagcagggcgtgctgagcgccaccatcctgtacgagatcctgctgggcaaggccaccctgtacgccgtgctggtgtctgccctggtgctgatggctatggtcaagcggaaggacagccggggaagggccaagcgatctggatctggagcaacaaacttctcactactcaaacaagcaggtgacgtggaggagaatcccgggcctactagtatggactggatttggcgcatccttttccttgtcggcgctgctaccggcgcgcattccttcgaacaactccagctgcaagagtctggccctggcctggtcaagcctagcgaaacactgagcctgacctgtaccgtgtctggcggctctatcagctccggcagctatttctggggctggatcagacaacctcctggcaaaggactggaatggatcggctccatctactacagcggcatcacctactacaaccccagcctgaagtccagagtgaccatctccgtggacaccagcaagaaccagttctccctgaagctgagcagcgtgacagccgccgataccgccgtgtattattgtgccagacatgacggcgctgtggccggcctgtttgattattggggacagggcaccctggtcaccgtgtcatctgctacgcgtatccagaaccctgatcctgccgtgtaccagctgcgggatagcaagagcagcgacaagagcgtgtgtctgttcaccgacttcgacagccagaccaacgtgtcccagagcaaggactccgacgtgtacatcaccgataagtgcgtgctggacatgcggagcatggacttcaagagcaactccgccgtggcctggtccaacaagtccgatttcgcctgcgccaacgccttcaacaacagcattatccccgaggacacattcttcccaagccccgagagcagctgcgacgtgaagctggtggaaaagagcttcgagacagacaccaacctgaacttccagaacctgagcgtgatcggcttcagaatcctgctgctgaaagtggccggctttaacctgctgatgaccctgcggctgtggtccagc

SEQ ID NO: 8087 - DNA, 2286 bp, Artificial Sequence
  Synthetic Polynucloetide
atggccttaccagtgaccgccttgctcctgccgctggccttgctgctccacgccgccaggccggaagtgcagctggttgaatctggcggaggactggttcagcctggcggatctctgagactgtcttgtgccgccagcggcttcagcttcagcgacttttggatgagctgggtccgacaggcccctggcaaaggacttgaatgggtcgccacaatcagccaggccggcagcgagaaggactacgtggactctgtgaagggcagattcaccatcagccgggacaacgccaagaagtccctgtacctccagatgaacagcctgagagccgaggacaccgccgtgtactattgtgcctctggcgtgtacagcttcgactacagaggccagggcaccctggtcacagtctcttctggtaccggcggaggcggatctggcggcggaggtagcggtggcggaggatctgaattcagctacgtgctgacacagcctccatccgtgtctgtggctccaggacagaccgccagaatcacatgcggcggcaacaacatcggcggcaagagcgtgcactggtatcagcagccacctggacaggctccagtggtggtggtgtacgacgacagcgatagacctagcggcatccccgagagattcagcggcagcaattccggcaataccgccacactgaccatcagcagagtggaagctggcgacgaggccgtgtactactgccaagtgtgggacagcagcagcgatcacgtggtgtttggcggcggaacaaagctgacagtgcttctcgagatccagaaccctgatcctgccgtgtaccagctgcgggatagcaagagcagcgacaagagcgtgtgtctgttcaccgacttcgacagccagaccaacgtgtcccagagcaaggactccgacgtgtacatcaccgataagtgcgtgctggacatgcggagcatggacttcaagagcaactccgccgtggcctggtccaacaagtccgatttcgcctgcgccaacgccttcaacaacagcattatccccgaggacacattcttcccaagccccgagagcagctgcgacgtgaagctggtggaaaagagcttcgagacagacaccaacctgaacttccagaacctgagcgtgatcggcttcagaatcctgctgctgaaagtggccggctttaacctgctgatgaccctgcggctgtggtccagccgcgccaagagaagcggatctggcgtgaagcagaccctgaatttcgacctgctgaagctggctggcgacgtggaatccaacccaggccctactagtatggactggatttggcgcatccttttccttgtcggcgctgctaccggcgcgcattccttcgaacaactccagctgcaagagtctggccctggcctggtcaagcctagcgaaacactgagcctgacctgtaccgtgtctggcggctctatcagctccggcagctatttctggggctggatcagacaacctcctggcaaaggactggaatggatcggctccatctactacagcggcatcacctactacaaccccagcctgaagtccagagtgaccatctccgtggacaccagcaagaaccagttctccctgaagctgagcagcgtgacagccgccgataccgccgtgtattattgtgccagacatgacggcgctgtggccggcctgtttgattattggggacagggcaccctggtcaccgtgtcatctgctacgcgtgaggacctgaagaacgtgttcccacctgaggtggccgtgttcgagcctagcgaggccgagatcagccacacccagaaagccaccctcgtgtgcctggctaccggcttctaccccgaccatgtggaactgtcttggtgggtcaacggcaaagaggtgcacagcggcgtgtgtaccgacccccagccactgaaagaacagcccgccctgaacgacagccggtactgcctgagcagcagactgagagtgtccgccaccttctggcagaacccccggaaccacttcagatgccaggtgcagttctacggcctgagcgagaacgacgagtggacccaggacagagccaagcccgtgacccagatcgtgtctgccgaagcctggggcagagccgattgcggctttaccagcgagagctaccagcagggcgtgctgagcgccaccatcctgtacgagatcctgctgggcaaggccaccctgtacgccgtgctggtgtctgccctggtgctgatggctatggtcaagcggaaggacagccgggga

SEQ ID NO: 8088 - DNA, 2862 bp, Artificial Sequence
  Synthetic Polynucloetide
atggccttaccagtgaccgccttgctcctgccgctggccttgctgctccacgccgccaggccggaagtgcagctggttgaatctggcggaggactggttcagcctggcggatctctgagactgtcttgtgccgccagcggcttcagcttcagcgacttttggatgagctgggtccgacaggcccctggcaaaggacttgaatgggtcgccacaatcagccaggccggcagcgagaaggactacgtggactctgtgaagggcagattcaccatcagccgggacaacgccaagaagtccctgtacctccagatgaacagcctgagagccgaggacaccgccgtgtactattgtgcctctggcgtgtacagcttcgactacagaggccagggcaccctggtcacagtctcttctggtaccggcggaggcggatctggcggcggaggtagcggtggcggaggatctgaattcagctacgtgctgacacagcctccatccgtgtctgtggctccaggacagaccgccagaatcacatgcggcggcaacaacatcggcggcaagagcgtgcactggtatcagcagccacctggacaggctccagtggtggtggtgtacgacgacagcgatagacctagcggcatccccgagagattcagcggcagcaattccggcaataccgccacactgaccatcagcagagtggaagctggcgacgaggccgtgtactactgccaagtgtgggacagcagcagcgatcacgtggtgtttggcggcggaacaaagctgacagtgcttctcgaggacctgaagaacgtgttcccacctgaggtggccgtgttcgagcctagcgaggccgagatcagccacacccagaaagccaccctcgtgtgcctggctaccggcttctaccccgaccatgtggaactgtcttggtgggtcaacggcaaagaggtgcacagcggcgtgtctaccgacccccagccactgaaagaacagcccgccctgaacgacagccggtactgcctgagcagcagactgagagtgtccgccaccttctggcagaacccccggaaccacttcagatgccaggtgcagttctacggcctgagcgagaacgacgagtggacccaggacagagccaagcccgtgacccagatcgtgtctgccgaagcctggggcagagccgattgcggatcccagagcttcggcctgctggaccccaagctgtgctacctgctggatggcatcctgttcatctacggcgtgatcctgaccgccctgttcctgagagtgaagttcagcagaagcgccgacgcccctgcctaccagcagggacagaaccaactgtacaacgagctgaacctgggcagacgggaagagtacgacgtgctggacaagcggagaggcagggaccctgagatgggcggaaagccccagcggagaaagaacccccaggaaggactgtataacgaactccagaaagacaagatggccgaagcctacagcgagatcggcatgaagggcgagcggagaagaggcaagggccacgatggcctgtaccagggcctgagcaccgccaccaaggacacctatgacgccctgcacatgcaggccctgcctccaagaagggccaagcgatctggatctggagcaacaaacttctcactactcaaacaagcaggtgacgtggaggagaatcccgggcctactagtatggactggatttggcgcatccttttccttgtcggcgctgctaccggcgcgcattccttcgaacaactccagctgcaagagtctggccctggcctggtcaagcctagcgaaacactgagcctgacctgtaccgtgtctggcggctctatcagctccggcagctatttctggggctggatcagacaacctcctggcaaaggactggaatggatcggctccatctactacagcggcatcacctactacaaccccagcctgaagtccagagtgaccatctccgtggacaccagcaagaaccagttctccctgaagctgagcagcgtgacagccgccgataccgccgtgtattattgtgccagacatgacggcgctgtggccggcctgtttgattattggggacagggcaccctggtcaccgtgtcatctgctacgcgtatccagaaccctgatcctgccgtgtaccagctgcgggatagcaagagcagcgacaagagcgtgtgtctgttcaccgacttcgacagccagaccaacgtgtcccagagcaaggactccgacgtgtacatcaccgataagaccgtgctggacatgcggagcatggacttcaagagcaactccgccgtggcctggtccaacaagtccgatttcgcctgcgccaacgccttcaacaacagcattatccccgaggacacattcttcccaagccccgagagcagctgcggtacccagagttttgggttgttggaccctaaattgtgctatctgttggacggaatcctgttcatttacggagtgatcctgaccgcattgttcctgcgggttaagttttccagatccgcagacgcacccgcttaccaacaagggcagaaccaactctacaatgaacttaatttggggcggagggaagagtacgacgttctggacaaaaggaggggacgagatcccgagatgggcggaaagcctcagcgaaggaagaatccgcaagaggggctttataacgaactccagaaagataaaatggcagaagcctatagtgagattgggatgaagggagaaaggaggaggggtaaaggtcacgatgggttgtaccaaggattgagcacagccactaaagatacctatgatgcgctccacatgcaggccctgccgccaaga

SEQ ID NO: 8089 - DNA, 2352 bp, Artificial Sequence
  Synthetic Polynucloetide
atggccttaccagtgaccgccttgctcctgccgctggccttgctgctccacgccgccaggccggaagtgcagctggttgaatctggcggaggactggttcagcctggcggatctctgagactgtcttgtgccgccagcggcttcagcttcagcgacttttggatgagctgggtccgacaggcccctggcaaaggacttgaatgggtcgccacaatcagccaggccggcagcgagaaggactacgtggactctgtgaagggcagattcaccatcagccgggacaacgccaagaagtccctgtacctccagatgaacagcctgagagccgaggacaccgccgtgtactattgtgcctctggcgtgtacagcttcgactacagaggccagggcaccctggtcacagtctcttctggtaccggcggaggcggatctggcggcggaggtagcggtggcggaggatctgaattcagctacgtgctgacacagcctccatccgtgtctgtggctccaggacagaccgccagaatcacatgcggcggcaacaacatcggcggcaagagcgtgcactggtatcagcagccacctggacaggctccagtggtggtggtgtacgacgacagcgatagacctagcggcatccccgagagattcagcggcagcaattccggcaataccgccacactgaccatcagcagagtggaagctggcgacgaggccgtgtactactgccaagtgtgggacagcagcagcgatcacgtggtgtttggcggcggaacaaagctgacagtgcttctcgagggacagcctaaggccaatcctaccgtgacactgttccctccaagcagcgaagaactccaggccaacaaggccacacttgtgtgcctgatctccgacttctaccctggggctgtgacagtggcttggaaggccgatggatctcctgtgaaagccggcgtggaaaccaccaagccatccaagcagagcaacaacaaatacgccgccagctcctacctgagcctgacacctgagcagtggaagtcccacagatcctacagctgccaagtgacccacgaaggcagcaccgtggaaaagacagtggcccctacagagtgcagccccatcaagaccgatgtgattacaatggaccccaaggacaactgctccaaggacgccaacgataccctgctgctccagctgaccaacaccagcgcctactacatgtacttgttgctgctgctgaagtccgtggtgtacttcgccatcatcacatgctgcctgctgcggagaaccgccttctgctgcaacggcgagaagtctagggccaagcgatctggatctggagcaacaaacttctcactactcaaacaagcaggtgacgtggaggagaatcccgggcctactagtatggactggatttggcgcatccttttccttgtcggcgctgctaccggcgcgcattccttcgaacaactccagctgcaagagtctggccctggcctggtcaagcctagcgaaacactgagcctgacctgtaccgtgtctggcggctctatcagctccggcagctatttctggggctggatcagacaacctcctggcaaaggactggaatggatcggctccatctactacagcggcatcacctactacaaccccagcctgaagtccagagtgaccatctccgtggacaccagcaagaaccagttctccctgaagctgagcagcgtgacagccgccgataccgccgtgtattattgtgccagacatgacggcgctgtggccggcctgtttgattattggggacagggcaccctggtcaccgtgtcatctgctacgcgtgcctctacaaagggaccctccgtgtttcctctggctcccagcagcaagtctacaagcggaggaacagccgctctgggctgcctggtcaaggattactttcccgagcctgtgaccgtgtcctggaatagcggagcactgacaagcggcgtgcacacctttccagccgtgctgcaaagcagcggcctgtactctctgagcagcgtggtcacagtgcctagctctagcctgggcacccagacctacatctgcaatgtgaaccacaagcctagcaacaccaaggtggacaagagagtggaacccaagagctgtgaagtgaaaaccgactccaccgaccacgtgaagcccaaagagacagagaacaccaagcagcccagcaagagctgccacaagcccaaggccatcgtgcacaccgagaaagtgaacatgatgagcctgaccgtgctgggcctgcggatgctgttcgccaaaaccgtggccgtgaacttcctgctgaccgccaagctgttcttcctc

SEQ ID NO: 8090 - DNA, 2295 bp, Artificial Sequence
  Synthetic Polynucloetide
atggccttaccagtgaccgccttgctcctgccgctggccttgctgctccacgccgccaggccggaagtgcagctggttgaatctggcggaggactggttcagcctggcggatctctgagactgtcttgtgccgccagcggcttcagcttcagcgacttttggatgagctgggtccgacaggcccctggcaaaggacttgaatgggtcgccacaatcagccaggccggcagcgagaaggactacgtggactctgtgaagggcagattcaccatcagccgggacaacgccaagaagtccctgtacctccagatgaacagcctgagagccgaggacaccgccgtgtactattgtgcctctggcgtgtacagcttcgactacagaggccagggcaccctggtcacagtctcttctggtaccggcggaggcggatctggcggcggaggtagcggtggcggaggatctgaattcagctacgtgctgacacagcctccatccgtgtctgtggctccaggacagaccgccagaatcacatgcggcggcaacaacatcggcggcaagagcgtgcactggtatcagcagccacctggacaggctccagtggtggtggtgtacgacgacagcgatagacctagcggcatccccgagagattcagcggcagcaattccggcaataccgccacactgaccatcagcagagtggaagctggcgacgaggccgtgtactactgccaagtgtgggacagcagcagcgatcacgtggtgtttggcggcggaacaaagctgacagtgcttctcgagggacagcctaaggccaatcctaccgtgacactgttccctccaagcagcgaagaactccaggccaacaaggccacacttgtgtgcctgatctccgacttctaccctggggctgtgacagtggcttggaaggccgatggatctcctgtgaaagccggcgtggaaaccaccaagccatccaagcagagcaacaacaaatacgccgccagctcctacctgagcctgacacctgagcagtggaagtcccacagatcctacagctgccaagtgacccacgaaggcagcaccgtggaaaagacagtggcccctacagagtgcagcggcagagccgattgcggctttaccagcgagagctaccagcagggcgtgctgagcgccaccatcctgtacgagatcctgctgggcaaggccaccctgtacgccgtgctggtgtctgccctggtgctgatggctatggtcaagcggaaggacagccggggacgcgccaagagaagcggatctggcgtgaagcagaccctgaatttcgacctgctgaagctggctggcgacgtggaatccaacccaggccctactagtatggactggatttggcgcatccttttccttgtcggcgctgctaccggcgcgcattccttcgaacaactccagctgcaagagtctggccctggcctggtcaagcctagcgaaacactgagcctgacctgtaccgtgtctggcggctctatcagctccggcagctatttctggggctggatcagacaacctcctggcaaaggactggaatggatcggctccatctactacagcggcatcacctactacaaccccagcctgaagtccagagtgaccatctccgtggacaccagcaagaaccagttctccctgaagctgagcagcgtgacagccgccgataccgccgtgtattattgtgccagacatgacggcgctgtggccggcctgtttgattattggggacagggcaccctggtcaccgtgtcatctgctacgcgtgcctctacaaagggaccctccgtgtttcctctggctcccagcagcaagtctacaagcggaggaacagccgctctgggctgcctggtcaaggattactttcccgagcctgtgaccgtgtcctggaatagcggagcactgacaagcggcgtgcacacctttccagccgtgctgcaaagcagcggcctgtactctctgagcagcgtggtcacagtgcctagctctagcctgggcacccagacctacatctgcaatgtgaaccacaagcctagcaacaccaaggtggacaagagagtggaacccaagagctgtatccccgaggacacattcttcccaagccccgagagcagctgcgacgtgaagctggtggaaaagagcttcgagacagacaccaacctgaacttccagaacctgagcgtgatcggcttcagaatcctgctgctgaaagtggccggctttaacctgctgatgaccctgcggctgtggtccagc

SEQ ID NO: 8091 - DNA, 2697 bp, Artificial Sequence
  Synthetic Polynucloetide
atggccttaccagtgaccgccttgctcctgccgctggccttgctgctccacgccgccaggccggaagtgcagctggttgaatctggcggaggactggttcagcctggcggatctctgagactgtcttgtgccgccagcggcttcagcttcagcgacttttggatgagctgggtccgacaggcccctggcaaaggacttgaatgggtcgccacaatcagccaggccggcagcgagaaggactacgtggactctgtgaagggcagattcaccatcagccgggacaacgccaagaagtccctgtacctccagatgaacagcctgagagccgaggacaccgccgtgtactattgtgcctctggcgtgtacagcttcgactacagaggccagggcaccctggtcacagtctcttctggtaccggcggaggcggatctggcggcggaggtagcggtggcggaggatctgaattcagctacgtgctgacacagcctccatccgtgtctgtggctccaggacagaccgccagaatcacatgcggcggcaacaacatcggcggcaagagcgtgcactggtatcagcagccacctggacaggctccagtggtggtggtgtacgacgacagcgatagacctagcggcatccccgagagattcagcggcagcaattccggcaataccgccacactgaccatcagcagagtggaagctggcgacgaggccgtgtactactgccaagtgtgggacagcagcagcgatcacgtggtgtttggcggcggaacaaagctgacagtgcttctcgagatccagaaccctgatcctgccgtgtaccagctgcgggatagcaagagcagcgacaagagcgtgtgtctgttcaccgacttcgacagccagaccaacgtgtcccagagcaaggactccgacgtgtacatcaccgataagtgcgtgctggacatgcggagcatggacttcaagagcaactccgccgtggcctggtccaacaagtccgatttcgcctgcgccaacgccttcaacaacagcattatccccgaggacacattcttcccaagccccgagagcagctgcgacgtgaagctggtggaaaagagcttcgagacagacaccaacctgaacttccagaacctgagcgtgatcggcttcagaatcctgctgctgaaagtggccggctttaacctgctgatgaccctgcggctgtggtccagccgcgccaagagaagcggatctggcgtgaagcagaccctgaatttcgacctgctgaagctggctggcgacgtggaatccaacccaggccctactagtatggactggatttggcgcatccttttccttgtcggcgctgctaccggcgcgcattccgggccccagctccagctgcaagagtctggacctggcctggtcaagcctagcgagacactgagcctgacctgtaccgtgtccggcgatagcatcagcagcggcgattactactggggctggatcagacagcctcctggcaaaggactggaatggatcggccacatctactacagcggcgtgacctactacaaccccagcctgaagtccagagtgaccatcagcgtggacaccagccggaaccagttctccctgaagctgtctagcgtgacagccgccgataccgccgtgtactactgcaccagagaggacagcagcaactggcggagtagaggccagggaacactggtcacagttagctctggatccggcggaggcggaagtggaggcggaggatctggcggcggaggctctttcgaacaactccagctgcaagagtctggccctggcctggtcaagcctagcgaaacactgagcctgacctgtaccgtgtctggcggctctatcagctccggcagctatttctggggctggatcagacaacctcctggcaaaggactggaatggatcggctccatctactacagcggcatcacctactacaaccccagcctgaagtccagagtgaccatctccgtggacaccagcaagaaccagttctccctgaagctgagcagcgtgacagccgccgataccgccgtgtattattgtgccagacatgacggcgctgtggccggcctgtttgattattggggacagggcaccctggtcaccgtgtcatctgctacgcgtgaggacctgaagaacgtgttcccacctgaggtggccgtgttcgagcctagcgaggccgagatcagccacacccagaaagccaccctcgtgtgcctggctaccggcttctaccccgaccatgtggaactgtcttggtgggtcaacggcaaagaggtgcacagcggcgtgtgtaccgacccccagccactgaaagaacagcccgccctgaacgacagccggtactgcctgagcagcagactgagagtgtccgccaccttctggcagaacccccggaaccacttcagatgccaggtgcagttctacggcctgagcgagaacgacgagtggacccaggacagagccaagcccgtgacccagatcgtgtctgccgaagcctggggcagagccgattgcggctttaccagcgagagctaccagcagggcgtgctgagcgccaccatcctgtacgagatcctgctgggcaaggccaccctgtacgccgtgctggtgtctgccctggtgctgatggctatggtcaagcggaaggacagccgggga

SEQ ID NO: 8092 - DNA, 3273 bp, Artificial Sequence
  Synthetic Polynucloetide
atggccttaccagtgaccgccttgctcctgccgctggccttgctgctccacgccgccaggccggaagtgcagctggttgaatctggcggaggactggttcagcctggcggatctctgagactgtcttgtgccgccagcggcttcagcttcagcgacttttggatgagctgggtccgacaggcccctggcaaaggacttgaatgggtcgccacaatcagccaggccggcagcgagaaggactacgtggactctgtgaagggcagattcaccatcagccgggacaacgccaagaagtccctgtacctccagatgaacagcctgagagccgaggacaccgccgtgtactattgtgcctctggcgtgtacagcttcgactacagaggccagggcaccctggtcacagtctcttctggtaccggcggaggcggatctggcggcggaggtagcggtggcggaggatctgaattcagctacgtgctgacacagcctccatccgtgtctgtggctccaggacagaccgccagaatcacatgcggcggcaacaacatcggcggcaagagcgtgcactggtatcagcagccacctggacaggctccagtggtggtggtgtacgacgacagcgatagacctagcggcatccccgagagattcagcggcagcaattccggcaataccgccacactgaccatcagcagagtggaagctggcgacgaggccgtgtactactgccaagtgtgggacagcagcagcgatcacgtggtgtttggcggcggaacaaagctgacagtgcttctcgaggacctgaagaacgtgttcccacctgaggtggccgtgttcgagcctagcgaggccgagatcagccacacccagaaagccaccctcgtgtgcctggctaccggcttctaccccgaccatgtggaactgtcttggtgggtcaacggcaaagaggtgcacagcggcgtgtctaccgacccccagccactgaaagaacagcccgccctgaacgacagccggtactgcctgagcagcagactgagagtgtccgccaccttctggcagaacccccggaaccacttcagatgccaggtgcagttctacggcctgagcgagaacgacgagtggacccaggacagagccaagcccgtgacccagatcgtgtctgccgaagcctggggcagagccgattgcggatcccagagcttcggcctgctggaccccaagctgtgctacctgctggatggcatcctgttcatctacggcgtgatcctgaccgccctgttcctgagagtgaagttcagcagaagcgccgacgcccctgcctaccagcagggacagaaccaactgtacaacgagctgaacctgggcagacgggaagagtacgacgtgctggacaagcggagaggcagggaccctgagatgggcggaaagccccagcggagaaagaacccccaggaaggactgtataacgaactccagaaagacaagatggccgaagcctacagcgagatcggcatgaagggcgagcggagaagaggcaagggccacgatggcctgtaccagggcctgagcaccgccaccaaggacacctatgacgccctgcacatgcaggccctgcctccaagaagggccaagcgatctggatctggagcaacaaacttctcactactcaaacaagcaggtgacgtggaggagaatcccgggcctactagtatggactggatttggcgcatccttttccttgtcggcgctgctaccggcgcgcattccgggccccagctccagctgcaagagtctggacctggcctggtcaagcctagcgagacactgagcctgacctgtaccgtgtccggcgatagcatcagcagcggcgattactactggggctggatcagacagcctcctggcaaaggactggaatggatcggccacatctactacagcggcgtgacctactacaaccccagcctgaagtccagagtgaccatcagcgtggacaccagccggaaccagttctccctgaagctgtctagcgtgacagccgccgataccgccgtgtactactgcaccagagaggacagcagcaactggcggagtagaggccagggaacactggtcacagttagctctggatccggcggaggcggaagtggaggcggaggatctggcggcggaggctctttcgaacaactccagctgcaagagtctggccctggcctggtcaagcctagcgaaacactgagcctgacctgtaccgtgtctggcggctctatcagctccggcagctatttctggggctggatcagacaacctcctggcaaaggactggaatggatcggctccatctactacagcggcatcacctactacaaccccagcctgaagtccagagtgaccatctccgtggacaccagcaagaaccagttctccctgaagctgagcagcgtgacagccgccgataccgccgtgtattattgtgccagacatgacggcgctgtggccggcctgtttgattattggggacagggcaccctggtcaccgtgtcatctgctacgcgtatccagaaccctgatcctgccgtgtaccagctgcgggatagcaagagcagcgacaagagcgtgtgtctgttcaccgacttcgacagccagaccaacgtgtcccagagcaaggactccgacgtgtacatcaccgataagaccgtgctggacatgcggagcatggacttcaagagcaactccgccgtggcctggtccaacaagtccgatttcgcctgcgccaacgccttcaacaacagcattatccccgaggacacattcttcccaagccccgagagcagctgcggtacccagagttttgggttgttggaccctaaattgtgctatctgttggacggaatcctgttcatttacggagtgatcctgaccgcattgttcctgcgggttaagttttccagatccgcagacgcacccgcttaccaacaagggcagaaccaactctacaatgaacttaatttggggcggagggaagagtacgacgttctggacaaaaggaggggacgagatcccgagatgggcggaaagcctcagcgaaggaagaatccgcaagaggggctttataacgaactccagaaagataaaatggcagaagcctatagtgagattgggatgaagggagaaaggaggaggggtaaaggtcacgatgggttgtaccaaggattgagcacagccactaaagatacctatgatgcgctccacatgcaggccctgccgccaaga

SEQ ID NO: 8093 - DNA, 2763 bp, Artificial Sequence
  Synthetic Polynucloetide
atggccttaccagtgaccgccttgctcctgccgctggccttgctgctccacgccgccaggccggaagtgcagctggttgaatctggcggaggactggttcagcctggcggatctctgagactgtcttgtgccgccagcggcttcagcttcagcgacttttggatgagctgggtccgacaggcccctggcaaaggacttgaatgggtcgccacaatcagccaggccggcagcgagaaggactacgtggactctgtgaagggcagattcaccatcagccgggacaacgccaagaagtccctgtacctccagatgaacagcctgagagccgaggacaccgccgtgtactattgtgcctctggcgtgtacagcttcgactacagaggccagggcaccctggtcacagtctcttctggtaccggcggaggcggatctggcggcggaggtagcggtggcggaggatctgaattcagctacgtgctgacacagcctccatccgtgtctgtggctccaggacagaccgccagaatcacatgcggcggcaacaacatcggcggcaagagcgtgcactggtatcagcagccacctggacaggctccagtggtggtggtgtacgacgacagcgatagacctagcggcatccccgagagattcagcggcagcaattccggcaataccgccacactgaccatcagcagagtggaagctggcgacgaggccgtgtactactgccaagtgtgggacagcagcagcgatcacgtggtgtttggcggcggaacaaagctgacagtgcttctcgagggacagcctaaggccaatcctaccgtgacactgttccctccaagcagcgaagaactccaggccaacaaggccacacttgtgtgcctgatctccgacttctaccctggggctgtgacagtggcttggaaggccgatggatctcctgtgaaagccggcgtggaaaccaccaagccatccaagcagagcaacaacaaatacgccgccagctcctacctgagcctgacacctgagcagtggaagtcccacagatcctacagctgccaagtgacccacgaaggcagcaccgtggaaaagacagtggcccctacagagtgcagccccatcaagaccgatgtgattacaatggaccccaaggacaactgctccaaggacgccaacgataccctgctgctccagctgaccaacaccagcgcctactacatgtacttgttgctgctgctgaagtccgtggtgtacttcgccatcatcacatgctgcctgctgcggagaaccgccttctgctgcaacggcgagaagtctagggccaagcgatctggatctggagcaacaaacttctcactactcaaacaagcaggtgacgtggaggagaatcccgggcctactagtatggactggatttggcgcatccttttccttgtcggcgctgctaccggcgcgcattccgggccccagctccagctgcaagagtctggacctggcctggtcaagcctagcgagacactgagcctgacctgtaccgtgtccggcgatagcatcagcagcggcgattactactggggctggatcagacagcctcctggcaaaggactggaatggatcggccacatctactacagcggcgtgacctactacaaccccagcctgaagtccagagtgaccatcagcgtggacaccagccggaaccagttctccctgaagctgtctagcgtgacagccgccgataccgccgtgtactactgcaccagagaggacagcagcaactggcggagtagaggccagggaacactggtcacagttagctctggatccggcggaggcggaagtggaggcggaggatctggcggcggaggctctttcgaacaactccagctgcaagagtctggccctggcctggtcaagcctagcgaaacactgagcctgacctgtaccgtgtctggcggctctatcagctccggcagctatttctggggctggatcagacaacctcctggcaaaggactggaatggatcggctccatctactacagcggcatcacctactacaaccccagcctgaagtccagagtgaccatctccgtggacaccagcaagaaccagttctccctgaagctgagcagcgtgacagccgccgataccgccgtgtattattgtgccagacatgacggcgctgtggccggcctgtttgattattggggacagggcaccctggtcaccgtgtcatctgctacgcgtgcctctacaaagggaccctccgtgtttcctctggctcccagcagcaagtctacaagcggaggaacagccgctctgggctgcctggtcaaggattactttcccgagcctgtgaccgtgtcctggaatagcggagcactgacaagcggcgtgcacacctttccagccgtgctgcaaagcagcggcctgtactctctgagcagcgtggtcacagtgcctagctctagcctgggcacccagacctacatctgcaatgtgaaccacaagcctagcaacaccaaggtggacaagagagtggaacccaagagctgtgaagtgaaaaccgactccaccgaccacgtgaagcccaaagagacagagaacaccaagcagcccagcaagagctgccacaagcccaaggccatcgtgcacaccgagaaagtgaacatgatgagcctgaccgtgctgggcctgcggatgctgttcgccaaaaccgtggccgtgaacttcctgctgaccgccaagctgttcttcctc

SEQ ID NO: 8094 - DNA, 2706 bp, Artificial Sequence
  Synthetic Polynucloetide
atggccttaccagtgaccgccttgctcctgccgctggccttgctgctccacgccgccaggccggaagtgcagctggttgaatctggcggaggactggttcagcctggcggatctctgagactgtcttgtgccgccagcggcttcagcttcagcgacttttggatgagctgggtccgacaggcccctggcaaaggacttgaatgggtcgccacaatcagccaggccggcagcgagaaggactacgtggactctgtgaagggcagattcaccatcagccgggacaacgccaagaagtccctgtacctccagatgaacagcctgagagccgaggacaccgccgtgtactattgtgcctctggcgtgtacagcttcgactacagaggccagggcaccctggtcacagtctcttctggtaccggcggaggcggatctggcggcggaggtagcggtggcggaggatctgaattcagctacgtgctgacacagcctccatccgtgtctgtggctccaggacagaccgccagaatcacatgcggcggcaacaacatcggcggcaagagcgtgcactggtatcagcagccacctggacaggctccagtggtggtggtgtacgacgacagcgatagacctagcggcatccccgagagattcagcggcagcaattccggcaataccgccacactgaccatcagcagagtggaagctggcgacgaggccgtgtactactgccaagtgtgggacagcagcagcgatcacgtggtgtttggcggcggaacaaagctgacagtgcttctcgagggacagcctaaggccaatcctaccgtgacactgttccctccaagcagcgaagaactccaggccaacaaggccacacttgtgtgcctgatctccgacttctaccctggggctgtgacagtggcttggaaggccgatggatctcctgtgaaagccggcgtggaaaccaccaagccatccaagcagagcaacaacaaatacgccgccagctcctacctgagcctgacacctgagcagtggaagtcccacagatcctacagctgccaagtgacccacgaaggcagcaccgtggaaaagacagtggcccctacagagtgcagcggcagagccgattgcggctttaccagcgagagctaccagcagggcgtgctgagcgccaccatcctgtacgagatcctgctgggcaaggccaccctgtacgccgtgctggtgtctgccctggtgctgatggctatggtcaagcggaaggacagccggggacgcgccaagagaagcggatctggcgtgaagcagaccctgaatttcgacctgctgaagctggctggcgacgtggaatccaacccaggccctactagtatggactggatttggcgcatccttttccttgtcggcgctgctaccggcgcgcattccgggccccagctccagctgcaagagtctggacctggcctggtcaagcctagcgagacactgagcctgacctgtaccgtgtccggcgatagcatcagcagcggcgattactactggggctggatcagacagcctcctggcaaaggactggaatggatcggccacatctactacagcggcgtgacctactacaaccccagcctgaagtccagagtgaccatcagcgtggacaccagccggaaccagttctccctgaagctgtctagcgtgacagccgccgataccgccgtgtactactgcaccagagaggacagcagcaactggcggagtagaggccagggaacactggtcacagttagctctggatccggcggaggcggaagtggaggcggaggatctggcggcggaggctctttcgaacaactccagctgcaagagtctggccctggcctggtcaagcctagcgaaacactgagcctgacctgtaccgtgtctggcggctctatcagctccggcagctatttctggggctggatcagacaacctcctggcaaaggactggaatggatcggctccatctactacagcggcatcacctactacaaccccagcctgaagtccagagtgaccatctccgtggacaccagcaagaaccagttctccctgaagctgagcagcgtgacagccgccgataccgccgtgtattattgtgccagacatgacggcgctgtggccggcctgtttgattattggggacagggcaccctggtcaccgtgtcatctgctacgcgtgcctctacaaagggaccctccgtgtttcctctggctcccagcagcaagtctacaagcggaggaacagccgctctgggctgcctggtcaaggattactttcccgagcctgtgaccgtgtcctggaatagcggagcactgacaagcggcgtgcacacctttccagccgtgctgcaaagcagcggcctgtactctctgagcagcgtggtcacagtgcctagctctagcctgggcacccagacctacatctgcaatgtgaaccacaagcctagcaacaccaaggtggacaagagagtggaacccaagagctgtatccccgaggacacattcttcccaagccccgagagcagctgcgacgtgaagctggtggaaaagagcttcgagacagacaccaacctgaacttccagaacctgagcgtgatcggcttcagaatcctgctgctgaaagtggccggctttaacctgctgatgaccctgcggctgtggtccagc

SEQ ID NO: 8095 - DNA, 2277 bp, Artificial Sequence
  Synthetic Polynucloetide
atggccttaccagtgaccgccttgctcctgccgctggccttgctgctccacgccgccaggccggaagtgcaggttttggagtctggcggaggactggttcagcctggcggatctctgagactgtcttgtgccgccagcggcttcaccttcagcaactttgccatgagctgggtccgacaggcccctggcaaaggacttgaatgggtgtccacaatcagcggcagcgccggcacaacagattacgccgattctgtgaagggcagattcaccatcagccgggacaacagcaagaaaaccctgtacctccagatgaacagcctgcgcgtggaagataccgccgtgtactactgtgccgatggcagaggccccttcttcgattatcgcggccagggcacactggtcaccgtttcttctggtaccggcggaggcggatctggcggcggaggtagcggtggcggaggatctgaattcagctacgtgctgacacagcctccatccgtgtctgtggctccaggacagaccgccagaatcacatgcggcggcaacaacatcggcggcaagagcgtgcactggtatcagcagccacctggacaggctccagtggtggtggtgtacgacgacagcgatagacctagcggcatccccgagagattcagcggcagcaattccggcaataccgccacactgaccatcagcagagtggaagctggcgacgaggccgtgtactactgccaagtgtgggacagcagcagcgatcacgtggtgtttggcggcggaacaaagctgacagtgcttctcgaggacctgaagaacgtgttcccacctgaggtggccgtgttcgagcctagcgaggccgagatcagccacacccagaaagccaccctcgtgtgcctggctaccggcttctaccccgaccatgtggaactgtcttggtgggtcaacggcaaagaggtgcacagcggcgtgtgtaccgacccccagccactgaaagaacagcccgccctgaacgacagccggtactgcctgagcagcagactgagagtgtccgccaccttctggcagaacccccggaaccacttcagatgccaggtgcagttctacggcctgagcgagaacgacgagtggacccaggacagagccaagcccgtgacccagatcgtgtctgccgaagcctggggcagagccgattgcggctttaccagcgagagctaccagcagggcgtgctgagcgccaccatcctgtacgagatcctgctgggcaaggccaccctgtacgccgtgctggtgtctgccctggtgctgatggctatggtcaagcggaaggacagccggggaagggccaagcgatctggatctggagcaacaaacttctcactactcaaacaagcaggtgacgtggaggagaatcccgggcctactagtatggactggatttggcgcatccttttccttgtcggcgctgctaccggcgcgcattccttcgaacaactccagctgcaagagtctggccctggcctggtcaagcctagcgaaacactgagcctgacctgtaccgtgtctggcggctctatcagctccggcagctatttctggggctggatcagacaacctcctggcaaaggactggaatggatcggctccatctactacagcggcatcacctactacaaccccagcctgaagtccagagtgaccatctccgtggacaccagcaagaaccagttctccctgaagctgagcagcgtgacagccgccgataccgccgtgtattattgtgccagacatgacggcgctgtggccggcctgtttgattattggggacagggcaccctggtcaccgtgtcatctgctacgcgtatccagaaccctgatcctgccgtgtaccagctgcgggatagcaagagcagcgacaagagcgtgtgtctgttcaccgacttcgacagccagaccaacgtgtcccagagcaaggactccgacgtgtacatcaccgataagtgcgtgctggacatgcggagcatggacttcaagagcaactccgccgtggcctggtccaacaagtccgatttcgcctgcgccaacgccttcaacaacagcattatccccgaggacacattcttcccaagccccgagagcagctgcgacgtgaagctggtggaaaagagcttcgagacagacaccaacctgaacttccagaacctgagcgtgatcggcttcagaatcctgctgctgaaagtggccggctttaacctgctgatgaccctgcggctgtggtccagc

SEQ ID NO: 8096 - DNA, 2280 bp, Artificial Sequence
  Synthetic Polynucloetide
atggccttaccagtgaccgccttgctcctgccgctggccttgctgctccacgccgccaggccgagctacgtgctgacacagcctccatccgtgtctgtggctccaggacagaccgccagaatcacatgcggcggcaacaacatcggcggcaagagcgtgcactggtatcagcagccacctggacaggctccagtggtggtggtgtacgacgacagcgatagacctagcggcatccccgagagattcagcggcagcaattccggcaataccgccacactgaccatcagcagagtggaagctggcgacgaggccgtgtactactgccaagtgtgggacagcagcagcgatcacgtggtgtttggcggcggaacaaagctgacagtgcttctcgaggacctgaagaacgtgttcccacctgaggtggccgtgttcgagcctagcgaggccgagatcagccacacccagaaagccaccctcgtgtgcctggctaccggcttctaccccgaccatgtggaactgtcttggtgggtcaacggcaaagaggtgcacagcggcgtgtgtaccgacccccagccactgaaagaacagcccgccctgaacgacagccggtactgcctgagcagcagactgagagtgtccgccaccttctggcagaacccccggaaccacttcagatgccaggtgcagttctacggcctgagcgagaacgacgagtggacccaggacagagccaagcccgtgacccagatcgtgtctgccgaagcctggggcagagccgattgcggctttaccagcgagagctaccagcagggcgtgctgagcgccaccatcctgtacgagatcctgctgggcaaggccaccctgtacgccgtgctggtgtctgccctggtgctgatggctatggtcaagcggaaggacagccggggaagggccaagcgatctggatctggagcaacaaacttctcactactcaaacaagcaggtgacgtggaggagaatcccgggcctactagtatggactggatttggcgcatccttttccttgtcggcgctgctaccggcgcccattccgggcccgaagtgcagctggttgaatctggcggaggactggttcaggctggcggatctctgagactgtcttgtgccgccagcggcagaacctttagcatgggctggtttagacaggcccctggcaaagagagagagttcgtcgccgccatcacatactctggcggcagcccttactacgccgactctgtgaagggcagattcaccatcagccgggacaacgccaagaacaccgtgtacctccagatgaacagcctgaagcctgaggacaccgccgtgtactactgcgccgccaatccaacatacggcagcgactggaacgccgagaattggggccagggaacccaagtgacagtgtctagcggatccggcggcggaggatctggcggaggcggatctgggggcggaggctctttcgaacaactccagctgcaagagtctggccctggcctggtcaagcctagcgaaacactgagcctgacctgtaccgtgtctggcggctctatcagctccggcagctatttctggggctggatcagacaacctcctggcaaaggactggaatggatcggctccatctactacagcggcatcacctactacaaccccagcctgaagtccagagtgaccatctccgtggacaccagcaagaaccagttctccctgaagctgagcagcgtgacagccgccgataccgccgtgtattattgtgccagacatgacggcgctgtggccggcctgtttgattattggggacagggcaccctggtcaccgtgtcatctgctacgcgtatccagaaccctgatcctgccgtgtaccagctgcgggatagcaagagcagcgacaagagcgtgtgtctgttcaccgacttcgacagccagaccaacgtgtcccagagcaaggactccgacgtgtacatcaccgataagtgcgtgctggacatgcggagcatggacttcaagagcaactccgccgtggcctggtccaacaagtccgatttcgcctgcgccaacgccttcaacaacagcattatccccgaggacacattcttcccaagccccgagagcagctgcgacgtgaagctggtggaaaagagcttcgagacagacaccaacctgaacttccagaacctgagcgtgatcggcttcagaatcctgctgctgaaagtggccggctttaacctgctgatgaccctgcggctgtggtccagc

SEQ ID NO: 8097 - DNA, 2661 bp, Artificial Sequence
  Synthetic Polynucloetide
atggccttaccagtgaccgccttgctcctgccgctggccttgctgctccacgccgccaggccgagctacgtgctgacacagcctccatccgtgtctgtggctccaggacagaccgccagaatcacatgcggcggcaacaacatcggcggcaagagcgtgcactggtatcagcagccacctggacaggctccagtggtggtggtgtacgacgacagcgatagacctagcggcatccccgagagattcagcggcagcaattccggcaataccgccacactgaccatcagcagagtggaagctggcgacgaggccgtgtactactgccaagtgtgggacagcagcagcgatcacgtggtgtttggcggcggaacaaagctgacagtgcttctcgaggacctgaagaacgtgttcccacctgaggtggccgtgttcgagcctagcgaggccgagatcagccacacccagaaagccaccctcgtgtgcctggctaccggcttctaccccgaccatgtggaactgtcttggtgggtcaacggcaaagaggtgcacagcggcgtgtgtaccgacccccagccactgaaagaacagcccgccctgaacgacagccggtactgcctgagcagcagactgagagtgtccgccaccttctggcagaacccccggaaccacttcagatgccaggtgcagttctacggcctgagcgagaacgacgagtggacccaggacagagccaagcccgtgacccagatcgtgtctgccgaagcctggggcagagccgattgcggctttaccagcgagagctaccagcagggcgtgctgagcgccaccatcctgtacgagatcctgctgggcaaggccaccctgtacgccgtgctggtgtctgccctggtgctgatggctatggtcaagcggaaggacagccggggaagggccaagcgatctggatctggagcaacaaacttctcactactcaaacaagcaggtgacgtggaggagaatcccgggcctactagtatggactggatttggcgcatccttttccttgtcggcgctgctaccggcgcccattcccaactgcaactgcaagagtctggccctggcctggtcaagccttctgaaaccctgagcctgacctgtaccgtgtccggcggctctatcagcagcggcgattactactggggctggatcagacagcctccaggcaagggactcgaatggatcggcagcatcagctacagcggctccacctactacaacccaagcctgaagtccagagtgaccatcagcgtggacaccagcagaaaccagttctccctgaagctgagcagcgtgacagccgccgatacagccgtgtattattgcaccagagaggacagcagcaactggcggagtagaggacagggcacactggtcacagtgtcctcttctggaggcggtggaagcggtggaggaggatctgaagtgcagctggttgaatctggcggaggactggttcaggctggcggatctctgagactgtcttgtgccgccagcggcagaacctttagcatgggctggtttagacaggcccctggcaaagagagagagttcgtcgccgccatcacatactctggcggcagcccttactacgccgactctgtgaagggcagattcaccatcagccgggacaacgccaagaacaccgtgtacctccagatgaacagcctgaagcctgaggacaccgccgtgtactactgcgccgccaatccaacatacggcagcgactggaacgccgagaattggggccagggaacccaagtgacagtgtctagcggatccggcggcggaggatctggcggaggcggatctgggggcggaggctctttcgaacaactccagctgcaagagtctggccctggcctggtcaagcctagcgaaacactgagcctgacctgtaccgtgtctggcggctctatcagctccggcagctatttctggggctggatcagacaacctcctggcaaaggactggaatggatcggctccatctactacagcggcatcacctactacaaccccagcctgaagtccagagtgaccatctccgtggacaccagcaagaaccagttctccctgaagctgagcagcgtgacagccgccgataccgccgtgtattattgtgccagacatgacggcgctgtggccggcctgtttgattattggggacagggcaccctggtcaccgtgtcatctgctacgcgtatccagaaccctgatcctgccgtgtaccagctgcgggatagcaagagcagcgacaagagcgtgtgtctgttcaccgacttcgacagccagaccaacgtgtcccagagcaaggactccgacgtgtacatcaccgataagtgcgtgctggacatgcggagcatggacttcaagagcaactccgccgtggcctggtccaacaagtccgatttcgcctgcgccaacgccttcaacaacagcattatccccgaggacacattcttcccaagccccgagagcagctgcgacgtgaagctggtggaaaagagcttcgagacagacaccaacctgaacttccagaacctgagcgtgatcggcttcagaatcctgctgctgaaagtggccggctttaacctgctgatgaccctgcggctgtggtccagc

SEQ ID NO: 8098 - DNA, 2688 bp, Artificial Sequence
  Synthetic Polynucloetide
atggccttaccagtgaccgccttgctcctgccgctggccttgctgctccacgccgccaggccggaagtgcaggttttggagtctggcggaggactggttcagcctggcggatctctgagactgtcttgtgccgccagcggcttcaccttcagcaactttgccatgagctgggtccgacaggcccctggcaaaggacttgaatgggtgtccacaatcagcggcagcgccggcacaacagattacgccgattctgtgaagggcagattcaccatcagccgggacaacagcaagaaaaccctgtacctccagatgaacagcctgcgcgtggaagataccgccgtgtactactgtgccgatggcagaggccccttcttcgattatcgcggccagggcacactggtcaccgtttcttctggtaccggcggaggcggatctggcggcggaggtagcggtggcggaggatctgaattcagctacgtgctgacacagcctccatccgtgtctgtggctccaggacagaccgccagaatcacatgcggcggcaacaacatcggcggcaagagcgtgcactggtatcagcagccacctggacaggctccagtggtggtggtgtacgacgacagcgatagacctagcggcatccccgagagattcagcggcagcaattccggcaataccgccacactgaccatcagcagagtggaagctggcgacgaggccgtgtactactgccaagtgtgggacagcagcagcgatcacgtggtgtttggcggcggaacaaagctgacagtgcttctcgaggacctgaagaacgtgttcccacctgaggtggccgtgttcgagcctagcgaggccgagatcagccacacccagaaagccaccctcgtgtgcctggctaccggcttctaccccgaccatgtggaactgtcttggtgggtcaacggcaaagaggtgcacagcggcgtgtgtaccgacccccagccactgaaagaacagcccgccctgaacgacagccggtactgcctgagcagcagactgagagtgtccgccaccttctggcagaacccccggaaccacttcagatgccaggtgcagttctacggcctgagcgagaacgacgagtggacccaggacagagccaagcccgtgacccagatcgtgtctgccgaagcctggggcagagccgattgcggctttaccagcgagagctaccagcagggcgtgctgagcgccaccatcctgtacgagatcctgctgggcaaggccaccctgtacgccgtgctggtgtctgccctggtgctgatggctatggtcaagcggaaggacagccggggaagggccaagcgatctggatctggagcaacaaacttctcactactcaaacaagcaggtgacgtggaggagaatcccgggcctactagtatggactggatttggcgcatccttttccttgtcggcgctgctaccggcgcccattccgggcccgaagtgcagctggttgaatctggcggaggactggttcaggctggcggatctctgagactgtcttgtgccgccagcggcagaacctttagcatgggctggtttagacaggcccctggcaaagagagagagttcgtcgccgccatcacatacagcggcggcagcccttactacgcctcttctgtcagaggccggttcaccatcagccgggacaacgccaagaacaccgtgtacctccagatgaacagcctgaagccagaggacaccgccgtgtactactgtgccgccaatccaacctacggcagcgactggaatgccgagaattggggccagggcacccaagtgacagtgtctagtggatccggcggcggaggatctggcggaggcggatctgggggcggaggctctttcgaacaactccagctgcaagagtctggccctggcctggtcaagcctagcgaaacactgagcctgacctgtaccgtgtctggcggctctatcagctccggcagctatttctggggctggatcagacaacctcctggcaaaggactggaatggatcggctccatctactacagcggcatcacctactacaaccccagcctgaagtccagagtgaccatctccgtggacaccagcaagaaccagttctccctgaagctgagcagcgtgacagccgccgataccgccgtgtattattgtgccagacatgacggcgctgtggccggcctgtttgattattggggacagggcaccctggtcaccgtgtcatctgctacgcgtatccagaaccctgatcctgccgtgtaccagctgcgggatagcaagagcagcgacaagagcgtgtgtctgttcaccgacttcgacagccagaccaacgtgtcccagagcaaggactccgacgtgtacatcaccgataagtgcgtgctggacatgcggagcatggacttcaagagcaactccgccgtggcctggtccaacaagtccgatttcgcctgcgccaacgccttcaacaacagcattatccccgaggacacattcttcccaagccccgagagcagctgcgacgtgaagctggtggaaaagagcttcgagacagacaccaacctgaacttccagaacctgagcgtgatcggcttcagaatcctgctgctgaaagtggccggctttaacctgctgatgaccctgcggctgtggtccagc

SEQ ID NO: 8099 - DNA, 2184 bp, Artificial Sequence
  Synthetic Polynucloetide
atggccttaccagtgaccgccttgctcctgccgctggccttgctgctccacgccgccaggccgagctacgtgctgacacagcctccatccgtgtctgtggctccaggacagaccgccagaatcacatgcggcggcaacaacatcggcagcaagaccgtgcactggtatcagcagccacctggacaggctccagtggtggtggtgtacgacgacagcgatagacctagcggcatccccgagagattcagcggcagcaattccggcaataccgccacactgaccatcagcagagtggaagctggcgacgaggccgtgtactactgccaagtgtgggacagcagcagcgatcacgtggtgtttggcggcggaacaaagctgacagtgcttggcggaggcggaagtggaggcggaggatctggcggcggaggctctcaactccagctgcaagagtctggccctggcctggtcaagcctagcgaaacactgagcctgacctgtaccgtgtctggcggctctatcagctccggcagctatttctggggctggatcagacaacctcctggcaaaggactggaatggatcggctccatctactacagcggcatcacctactacaaccccagcctgaagtccagagtgaccatctccgtggacaccagcaagaaccagttctccctgaagctgagcagcgtgacagccgccgataccgccgtgtattattgtgccagacatgacggcgctgtggccggcctgtttgattattggggacagggcaccctggtcaccgtgtcatctgctacgcgtgagcagaaactgatctcggaagaggatctggcgaagcccaccacgacgccagcgccgcgaccaccaacaccggcgcccaccatcgcgtcgcagcccctgtccctgcgcccagaggcgtgccggccagcggcggggggcgcagtgcacacgagggggctggacttcgcctgtgacatctacatctgggcgcccttggccgggacttgtggggtccttctcctgtcactggttatcaccctttactgcaaacggggcagaaagaaactcctgtatatattcaaacaaccatttatgagaccagtacaaactactcaagaggaagatggctgtagctgccgatttccagaagaagaagaaggaggatgtgaactgagagtgaagttcagcaggagcgcagacgcccccgcgtaccagcagggccagaaccagctctataacgagctgaatctaggacgaagagaggagtacgatgttttggacaagagacgtggccgggaccctgagatggggggaaagccgagaaggaagaaccctcaggaaggcctgtacaatgaactgcagaaagataagatggcggaggcctacagtgagattgggatgaaaggcgagcgccggaggggcaaggggcacgatggcctttaccagggtctcagtacagccaccaaggacacctacgacgcccttcacatgcaggccctgccccctcgctctagtggctccggcgagggcagaggaagtctactaacctgcggagatgtggaagaaaatcctggcccacatatgaccgagtacaagcccacggtgcgcctcgccacccgcgacgacgtccccagggccgtacgcaccctcgccgccgcgttcgccgactaccccgccacgcgccacaccgtcgatccggaccgccacatcgagcgggtcaccgagctgcaagaactcttcctcacgcgcgtcgggctcgacatcggcaaggtgtgggtcgcggacgacggcgccgcggtggcggtctggaccacgccggagagcgtcgaagcgggggcggtgttcgccgagatcggcccgcgcatggccgagttgagcggttcccggctggccgcgcagcaacagatggaaggcctcctggcgccgcaccggcccaaggagcccgcgtggttcctggccaccgtcggcgtctcgcccgaccaccagggcaagggtctgggcagcgccgtcgtgctccccggagtggaggcggccgagcgcgccggggtgcccgccttcctggagacctccgcgccccgcaacctccccttctacgagcggctcggcttcaccgtcaccgccgacgtcgaggtgcccgaaggaccgcgcacctggtgcatgacccgcaagcccggtgcctga

SEQ ID NO: 8100 - DNA, 2166 bp, Artificial Sequence
  Synthetic Polynucloetide
atggccttaccagtgaccgccttgctcctgccgctggccttgctgctccacgccgccaggccgagctacgtgctgacacagcctccatccgtgtctgtggctccaggacagaccgccagaatcacatgcggcggcaacaacatcggcagcaagaccgtgcactggtatcagcagccacctggacaggctccagtggtggtggtgtacgacgacagcgatagacctagcggcatccccgagagattcagcggcagcaattccggcaataccgccacactgaccatcagcagagtggaagctggcgacgaggccgtgtactactgccaagtgtgggacagcagcagcgatcacgtggtgtttggcggcggaacaaagctgacagtgcttggcggaggcggaagtggaggcggaggatctggcggcggaggctctcaactccagctgcaagagtctggccctggcctggtcaagcctagcgaaacactgagcctgacctgtaccgtgtctggcggctctatcagctccggcagctatttctggggctggatcagacaacctcctggcaaaggactggaatggatcggctccatctactacagcggcatcacctactacaaccccagcctgaagtccagagtgaccatctccgtggacaccagcaagaaccagttctccctgaagctgagcagcgtgacagccgccgataccgccgtgtattattgtgccagacatgacggcgctgtggccggcctgtttgattattggggacagggcaccctggtcaccgtgtcatctgctacgcgtgagcagaaactgatctcggaagaggatctgaaaattgaagttatgtatcctcctccttacctagacaatgagaagagcaatggaaccattatccatgtgaaagggaaacacctttgtccaagtcccctatttcccggaccttctaagcccttttgggtgctggtggtggttgggggagtcctggcttgctatagcttgctagtaacagtggcctttattattttctgggtgaggagtaagaggagcaggctcctgcacagtgactacatgaacatgactccacgccgccccggacccacccgcaagcattaccagccctatgccccaccacgcgacttcgcagcctatcgctccagagtgaagttcagcaggagcgcagacgcccccgcgtaccagcagggccagaaccagctctataacgagctcaatctaggacgaagagaggagtacgatgttttggacaagagacgtggccgggaccctgagatggggggaaagccgagaaggaagaaccctcaggaaggcctgtacaatgaactgcagaaagataagatggcggaggcctacagtgagattgggatgaaaggcgagcgccggaggggcaaggggcacgatggcctttaccagggtctcagtacagccaccaaggacacctacgacgcccttcacatgcaggccctgccccctcgctctagtggctccggcgagggcagaggaagtctactaacctgcggagatgtggaagaaaatcctggcccacatatgaccgagtacaagcccacggtgcgcctcgccacccgcgacgacgtccccagggccgtacgcaccctcgccgccgcgttcgccgactaccccgccacgcgccacaccgtcgatccggaccgccacatcgagcgggtcaccgagctgcaagaactcttcctcacgcgcgtcgggctcgacatcggcaaggtgtgggtcgcggacgacggcgccgcggtggcggtctggaccacgccggagagcgtcgaagcgggggcggtgttcgccgagatcggcccgcgcatggccgagttgagcggttcccggctggccgcgcagcaacagatggaaggcctcctggcgccgcaccggcccaaggagcccgcgtggttcctggccaccgtcggcgtctcgcccgaccaccagggcaagggtctgggcagcgccgtcgtgctccccggagtggaggcggccgagcgcgccggggtgcccgccttcctggagacctccgcgccccgcaacctccccttctacgagcggctcggcttcaccgtcaccgccgacgtcgaggtgcccgaaggaccgcgcacctggtgcatgacccgcaagcccggtgcctga

SEQ ID NO: 8101 - DNA, 1494 bp, Artificial Sequence
  Synthetic Polynucloetide
atggccttaccagtgaccgccttgctcctgccgctggccttgctgctccacgccgccaggccgagctacgtgctgacacagcctccatccgtgtctgtggctccaggacagaccgccagaatcacatgcggcggcaacaacatcggcagcaagaccgtgcactggtatcagcagccacctggacaggctccagtggtggtggtgtacgacgacagcgatagacctagcggcatccccgagagattcagcggcagcaattccggcaataccgccacactgaccatcagcagagtggaagctggcgacgaggccgtgtactactgccaagtgtgggacagcagcagcgatcacgtggtgtttggcggcggaacaaagctgacagtgcttggcggaggcggaagtggaggcggaggatctggcggcggaggctctcaactccagctgcaagagtctggccctggcctggtcaagcctagcgaaacactgagcctgacctgtaccgtgtctggcggctctatcagctccggcagctatttctggggctggatcagacaacctcctggcaaaggactggaatggatcggctccatctactacagcggcatcacctactacaaccccagcctgaagtccagagtgaccatctccgtggacaccagcaagaaccagttctccctgaagctgagcagcgtgacagccgccgataccgccgtgtattattgtgccagacatgacggcgctgtggccggcctgtttgattattggggacagggcaccctggtcaccgtgtcatctgctacgcgtgagcagaaactgatctcggaagaggatctgaaaattgaagttatgtatcctcctccttacctagacaatgagaagagcaatggaaccattatccatgtgaaagggaaacacctttgtccaagtcccctatttcccggaccttctaagcccttttgggtgctggtggtggttgggggagtcctggcttgctatagcttgctagtaacagtggcctttattattttctgggtgaggagtaagaggagcaggctcctgcacagtgactacatgaacatgactccacgccgccccggacccacccgcaagcattaccagccctatgccccaccacgcgacttcgcagcctatcgctccagagtgaagttcagcaggagcgcagacgcccccgcgtaccagcagggccagaaccagctctataacgagctcaatctaggacgaagagaggagtacgatgttttggacaagagacgtggccgggaccctgagatggggggaaagccgagaaggaagaaccctcaggaaggcctgtacaatgaactgcagaaagataagatggcggaggcctacagtgagattgggatgaaaggcgagcgccggaggggcaaggggcacgatggcctttaccagggtctcagtacagccaccaaggacacctacgacgcccttcacatgcaggccctgccccctcgc

SEQ ID NO: 8102 - DNA, 1515 bp, Artificial Sequence
  Synthetic Polynucloetide
atggccttaccagtgaccgccttgctcctgccgctggccttgctgctccacgccgccaggccgagctacgtgctgacacagcctccatccgtgtctgtggctccaggacagaccgccagaatcacatgcggcggcaacaacatcggcagcaagaccgtgcactggtatcagcagccacctggacaggctccagtggtggtggtgtacgacgacagcgatagacctagcggcatccccgagagattcagcggcagcaattccggcaataccgccacactgaccatcagcagagtggaagctggcgacgaggccgtgtactactgccaagtgtgggacagcagcagcgatcacgtggtgtttggcggcggaacaaagctgacagtgcttggcggaggcggaagtggaggcggaggatctggcggcggaggctctcaactccagctgcaagagtctggccctggcctggtcaagcctagcgaaacactgagcctgacctgtaccgtgtctggcggctctatcagctccggcagctatttctggggctggatcagacaacctcctggcaaaggactggaatggatcggctccatctactacagcggcatcacctactacaaccccagcctgaagtccagagtgaccatctccgtggacaccagcaagaaccagttctccctgaagctgagcagcgtgacagccgccgataccgccgtgtattattgtgccagacatgacggcgctgtggccggcctgtttgattattggggacagggcaccctggtcaccgtgtcatctgctacgcgtgagcagaaactgatctcggaagaggatctggcgaagcccaccacgacgccagcgccgcgaccaccaacaccggcgcccaccatcgcgtcgcagcccctgtccctgcgcccagaggcgtgccggccagcggcggggggcgcagtgcacacgagggggctggacttcgcctgtgacatctacatctgggcgcccttggccgggacttgtggggtccttctcctgtcactggttatcaccctttactgcaaacggggcagaaagaaactcctgtatatattcaaacaaccatttatgagaccagtacaaactactcaagaggaagatggctgtagctgccgatttccagaagaagaagaaggaggatgtgaactgagagtgaagttcagcaggagcgcagacgcccccgcgtaccagcagggccagaaccagctctataacgagctgaatctaggacgaagagaggagtacgatgttttggacaagagacgtggccgggaccctgagatggggggaaagccgagaaggaagaaccctcaggaaggcctgtacaatgaactgcagaaagataagatggcggaggcctacagtgagattgggatgaaaggcgagcgccggaggggcaaggggcacgatggcctttaccagggtctcagtacagccaccaaggacacctacgacgcccttcacatgcaggccctgccccctcgctga

SEQ ID NO: 8103 - DNA, 1515 bp, Artificial Sequence
  Synthetic Polynucloetide
atggccttaccagtgaccgccttgctcctgccgctggccttgctgctccacgccgccaggccgcaactccagctgcaagagtctggccctggcctggtcaagcctagcgaaacactgagcctgacctgtaccgtgtctggcggctctatcagctccggcagctatttctggggctggatcagacaacctcctggcaaaggactggaatggatcggctccatctactacagcggcatcacctactacaaccccagcctgaagtccagagtgaccatctccgtggacaccagcaagaaccagttctccctgaagctgagcagcgtgacagccgccgataccgccgtgtattattgtgccagacatgacggcgctgtggccggcctgtttgattattggggacagggcaccctggtcaccgtgtcatctgctggcggaggcggaagtggaggcggaggatctggcggcggaggctctagctacgtgctgacacagcctccatccgtgtctgtggctccaggacagaccgccagaatcacatgcggcggcaacaacatcggcagcaagaccgtgcactggtatcagcagccacctggacaggctccagtggtggtggtgtacgacgacagcgatagacctagcggcatccccgagagattcagcggcagcaattccggcaataccgccacactgaccatcagcagagtggaagctggcgacgaggccgtgtactactgccaagtgtgggacagcagcagcgatcacgtggtgtttggcggcggaacaaagctgacagtgcttacgcgtgagcagaaactgatctcggaagaggatctggcgaagcccaccacgacgccagcgccgcgaccaccaacaccggcgcccaccatcgcgtcgcagcccctgtccctgcgcccagaggcgtgccggccagcggcggggggcgcagtgcacacgagggggctggacttcgcctgtgacatctacatctgggcgcccttggccgggacttgtggggtccttctcctgtcactggttatcaccctttactgcaaacggggcagaaagaaactcctgtatatattcaaacaaccatttatgagaccagtacaaactactcaagaggaagatggctgtagctgccgatttccagaagaagaagaaggaggatgtgaactgagagtgaagttcagcaggagcgcagacgcccccgcgtaccagcagggccagaaccagctctataacgagctgaatctaggacgaagagaggagtacgatgttttggacaagagacgtggccgggaccctgagatggggggaaagccgagaaggaagaaccctcaggaaggcctgtacaatgaactgcagaaagataagatggcggaggcctacagtgagattgggatgaaaggcgagcgccggaggggcaaggggcacgatggcctttaccagggtctcagtacagccaccaaggacacctacgacgcccttcacatgcaggccctgccccctcgctga

SEQ ID NO: 8104 - DNA, 2754 bp, Artificial Sequence
  Synthetic Polynucloetide
atggccttaccagtgaccgccttgctcctgccgctggccttgctgctccacgccgccaggccgagctacgtgctgacacagcctccatccgtgtctgtggctccaggacagaccgccagaatcacatgcggcggcaacaacatcggcagcaagaccgtgcactggtatcagcagccacctggacaggctccagtggtggtggtgtacgacgacagcgatagacctagcggcatccccgagagattcagcggcagcaattccggcaataccgccacactgaccatcagcagagtggaagctggcgacgaggccgtgtactactgccaagtgtgggacagcagcagcgatcacgtggtgtttggcggcggaacaaagctgacagtgcttggcggaggcggaagtggaggcggaggatctggcggcggaggctctcaactccagctgcaagagtctggccctggcctggtcaagcctagcgaaacactgagcctgacctgtaccgtgtctggcggctctatcagctccggcagctatttctggggctggatcagacaacctcctggcaaaggactggaatggatcggctccatctactacagcggcatcacctactacaaccccagcctgaagtccagagtgaccatctccgtggacaccagcaagaaccagttctccctgaagctgagcagcgtgacagccgccgataccgccgtgtattattgtgccagacatgacggcgctgtggccggcctgtttgattattggggacagggcaccctggtcaccgtgtcatctgctacgcgtgagcagaaactgatctcggaagaggatctggcgaagcccaccacgacgccagcgccgcgaccaccaacaccggcgcccaccatcgcgtcgcagcccctgtccctgcgcccagaggcgtgccggccagcggcggggggcgcagtgcacacgagggggctggacttcgcctgtgacatctacatctgggcgcccttggccgggacttgtggggtccttctcctgtcactggttatcaccctttactgcgggcgcgccagagtgaagttcagcaggagcgcagacgcccccgcgtaccagcagggccagaaccagctctataacgagctgaatctaggacgaagagaggagtacgatgttttggacaagagacgtggccgggaccctgagatggggggaaagccgagaaggaagaaccctcaggaaggcctgtacaatgaactgcagaaagataagatggcggaggcctacagtgagattgggatgaaaggcgagcgccggaggggcaaggggcacgatggcctttaccagggtctcagtacagccaccaaggacacctacgacgcccttcacatgcaggccctgccccctcgctctagaggatctggagcaacaaacttctcactactcaaacaagcaggtgacgtggaggagaatcccgggcctgggatccacatggccacttacgaggttctctgtgaggtggcgcggaaactgggcacggatgacagggaagtggtattgttcctcctaaacgtgttcatacctcaacccacactggcccaattaattggagctcttagagctttaaaggaggagggcaggttaacgtttcccctgttagcggaatgtctgtttcgtgcaggtcgcagagacctcttgcgcgacctgcttcacttagacccgcgttttttagagcgccacctagcgggcacaatgagttatttcagcccttatcagctcactgttctccacgtagacggggagctgtgtgcgagggatattaggtctttgatatttttaagcaaggacactatagggtctcgcagcacaccacagacattcttacactgggtgtactgtatggaaaacttagacctactgggtcccactgacgtggatgccctaatgtcaatgcttagatctttgtcaagagtagacctacagcgccaagtgcaaaccctaatgggccttcacctttccggcccatcacactcccaacactatcgccatacaccactcgagaccgatttctacgactacaaggacgacgatgacaagactagtggctccggcgagggcagaggaagtctactaacctgcggagatgtggaagaaaatcctggcccacatatgaccgagtacaagcccacggtgcgcctcgccacccgcgacgacgtccccagggccgtacgcaccctcgccgccgcgttcgccgactaccccgccacgcgccacaccgtcgatccggaccgccacatcgagcgggtcaccgagctgcaagaactcttcctcacgcgcgtcgggctcgacatcggcaaggtgtgggtcgcggacgacggcgccgcggtggcggtctggaccacgccggagagcgtcgaagcgggggcggtgttcgccgagatcggcccgcgcatggccgagttgagcggttcccggctggccgcgcagcaacagatggaaggcctcctggcgccgcaccggcccaaggagcccgcgtggttcctggccaccgtcggcgtctcgcccgaccaccagggcaagggtctgggcagcgccgtcgtgctccccggagtggaggcggccgagcgcgccggggtgcccgccttcctggagacctccgcgccccgcaacctccccttctacgagcggctcggcttcaccgtcaccgccgacgtcgaggtgcccgaaggaccgcgcacctggtgcatgacccgcaagcccggtgcctga

SEQ ID NO: 8105 - DNA, 2574 bp, Artificial Sequence
  Synthetic Polynucloetide
atggccttaccagtgaccgccttgctcctgccgctggccttgctgctccacgccgccaggccgagctacgtgctgacacagcctccatccgtgtctgtggctccaggacagaccgccagaatcacatgcggcggcaacaacatcggcagcaagaccgtgcactggtatcagcagccacctggacaggctccagtggtggtggtgtacgacgacagcgatagacctagcggcatccccgagagattcagcggcagcaattccggcaataccgccacactgaccatcagcagagtggaagctggcgacgaggccgtgtactactgccaagtgtgggacagcagcagcgatcacgtggtgtttggcggcggaacaaagctgacagtgcttctcgagatccagaaccctgatcctgccgtgtaccagctgcgggatagcaagagcagcgacaagagcgtgtgtctgttcaccgacttcgacagccagaccaacgtgtcccagagcaaggactccgacgtgtacatcaccgataagtgcgtgctggacatgcggagcatggacttcaagagcaactccgccgtggcctggtccaacaagtccgatttcgcctgcgccaacgccttcaacaacagcattatccccgaggacacattcttcccaagcagcgacgtgccctgcgacgtgaagctggtggaaaagagcttcgagacagacaccaacctgaacttccagaacctgagcgtgatcggcttcagaatcctgctgctgaaagtggccggctttaacctgctgatgaccctgcggctgtggtccagccgcgccaagagaagcggatctggcgtgaagcagaccctgaatttcgacctgctgaagctggctggcgacgtggaatccaacccaggccctactagtatggactggatttggcgcatccttttccttgtcggcgctgctaccggcgcgcattccttcgaacaactccagctgcaagagtctggccctggcctggtcaagcctagcgaaacactgagcctgacctgtaccgtgtctggcggctctatcagctccggcagctatttctggggctggatcagacaacctcctggcaaaggactggaatggatcggctccatctactacagcggcatcacctactacaaccccagcctgaagtccagagtgaccatctccgtggacaccagcaagaaccagttctccctgaagctgagcagcgtgacagccgccgataccgccgtgtattattgtgccagacatgacggcgctgtggccggcctgtttgattattggggacagggcaccctggtcaccgtgtcatctgctacgcgtgaggacctgaagaacgtgttcccacctgaggtggccgtgttcgagcctagcaaggccgagatcgcccacacccagaaagccaccctcgtgtgcctggctaccggcttctaccccgaccatgtggaactgtcttggtgggtcaacggcaaagaggtgcacagcggcgtgtgtaccgacccccagccactgaaagaacagcccgccctgaacgacagccggtactgcctgagcagcagactgagagtgtccgccaccttctggcagaacccccggaaccacttcagatgccaggtgcagttctacggcctgagcgagaacgacgagtggacccaggacagagccaagcccgtgacccagatcgtgtctgccgaagcctggggcagagccgattgcggcatcaccagcgccagctaccaccagggcgtgctgagcgccaccatcctgtacgagatcctgctgggcaaggccaccctgtacgccgtgctggtgtctgccctggtgctgatggctatggtcaagcggaaggacagccggggaagggccaagcgatctggatctggagcaacaaacttctcactactcaaacaagcaggtgacgtggaggagaatcccgggccttctagaggccatatgaccgagtacaagcccacggtgcgcctcgccacccgcgacgacgtccccagggccgtacgcaccctcgccgccgcgttcgccgactaccccgccacgcgccacaccgtcgatccggaccgccacatcgagcgggtcaccgagctgcaagaactcttcctcacgcgcgtcgggctcgacatcggcaaggtgtgggtcgcggacgacggcgccgcggtggcggtctggaccacgccggagagcgtcgaagcgggggcggtgttcgccgagatcggcccgcgcatggccgagttgagcggttcccggctggccgcgcagcaacagatggaaggcctcctggcgccgcaccggcccaaggagcccgcgtggttcctggccaccgtcggcgtctcgcccgaccaccagggcaagggtctgggcagcgccgtcgtgctccccggagtggaggcggccgagcgcgccggggtgcccgccttcctggagacctccgcgccccgcaacctccccttctacgagcggctcggcttcaccgtcaccgccgacgtcgaggtgcccgaaggaccgcgcacctggtgcatgacccgcaagcccggtgcctga

SEQ ID NO: 8106 - DNA, 2571 bp, Artificial Sequence
  Synthetic Polynucloetide
atggccttaccagtgaccgccttgctcctgccgctggccttgctgctccacgccgccaggccgagctacgtgctgacacagcctccatccgtgtctgtggctccaggacagaccgccagaatcacatgcggcggcaacaacatcggcagcaagaccgtgcactggtatcagcagccacctggacaggctccagtggtggtggtgtacgacgacagcgatagacctagcggcatccccgagagattcagcggcagcaattccggcaataccgccacactgaccatcagcagagtggaagctggcgacgaggccgtgtactactgccaagtgtgggacagcagcagcgatcacgtggtgtttggcggcggaacaaagctgacagtgcttctcgaggacctgaagaacgtgttcccacctgaggtggccgtgttcgagcctagcaaggccgagatcgcccacacccagaaagccaccctcgtgtgcctggctaccggcttctaccccgaccatgtggaactgtcttggtgggtcaacggcaaagaggtgcacagcggcgtgtgtaccgacccccagccactgaaagaacagcccgccctgaacgacagccggtactgcctgagcagcagactgagagtgtccgccaccttctggcagaacccccggaaccacttcagatgccaggtgcagttctacggcctgagcgagaacgacgagtggacccaggacagagccaagcccgtgacccagatcgtgtctgccgaagcctggggcagagccgattgcggcatcaccagcgccagctaccaccagggcgtgctgagcgccaccatcctgtacgagatcctgctgggcaaggccaccctgtacgccgtgctggtgtctgccctggtgctgatggctatggtcaagcggaaggacagccggggaagggccaagcgatctggatctggagcaacaaacttctcactactcaaacaagcaggtgacgtggaggagaatcccgggcctactagtatggactggatttggcgcatccttttccttgtcggcgctgctaccggcgcgcattccttcgaacaactccagctgcaagagtctggccctggcctggtcaagcctagcgaaacactgagcctgacctgtaccgtgtctggcggctctatcagctccggcagctatttctggggctggatcagacaacctcctggcaaaggactggaatggatcggctccatctactacagcggcatcacctactacaaccccagcctgaagtccagagtgaccatctccgtggacaccagcaagaaccagttctccctgaagctgagcagcgtgacagccgccgataccgccgtgtattattgtgccagacatgacggcgctgtggccggcctgtttgattattggggacagggcaccctggtcaccgtgtcatctgctacgcgtatccagaaccctgatcctgccgtgtaccagctgcgggatagcaagagcagcgacaagagcgtgtgtctgttcaccgacttcgacagccagaccaacgtgtcccagagcaaggactccgacgtgtacatcaccgataagtgcgtgctggacatgcggagcatggacttcaagagcaactccgccgtggcctggtccaacaagtccgatttcgcctgcgccaacgccttcaacaacagcattatccccgaggacacattcttcccaagcagcgacgtgccctgcgacgtgaagctggtggaaaagagcttcgagacagacaccaacctgaacttccagaacctgagcgtgatcggcttcagaatcctgctgctgaaagtggccggctttaacctgctgatgaccctgcggctgtggtccagccgcgccaagagaagcggatctggcgtgaagcagaccctgaatttcgacctgctgaagctggctggcgacgtggaatccaacccaggcccttctagaggccatatgaccgagtacaagcccacggtgcgcctcgccacccgcgacgacgtccccagggccgtacgcaccctcgccgccgcgttcgccgactaccccgccacgcgccacaccgtcgatccggaccgccacatcgagcgggtcaccgagctgcaagaactcttcctcacgcgcgtcgggctcgacatcggcaaggtgtgggtcgcggacgacggcgccgcggtggcggtctggaccacgccggagagcgtcgaagcgggggcggtgttcgccgagatcggcccgcgcatggccgagttgagcggttcccggctggccgcgcagcaacagatggaaggcctcctggcgccgcaccggcccaaggagcccgcgtggttcctggccaccgtcggcgtctcgcccgaccaccagggcaagggtctgggcagcgccgtcgtgctccccggagtggaggcggccgagcgcgccggggtgcccgccttcctggagacctccgcgccccgcaacctccccttctacgagcggctcggcttcaccgtcaccgccgacgtcgaggtgcccgaaggaccgcgcacctggtgcatgacccgcaagcccggtgcctga

SEQ ID NO: 8107 - DNA, 1869 bp, Artificial Sequence
  Synthetic Polynucloetide
atggccttaccagtgaccgccttgctcctgccgctggccttgctgctccacgccgccaggccgagctacgtgctgacacagcctccatccgtgtctgtggctccaggacagaccgccagaatcacatgcggcggcaacaacatcggcagcaagaccgtgcactggtatcagcagccacctggacaggctccagtggtggtggtgtacgacgacagcgatagacctagcggcatccccgagagattcagcggcagcaattccggcaataccgccacactgaccatcagcagagtggaagctggcgacgaggccgtgtactactgccaagtgtgggacagcagcagcgatcacgtggtgtttggcggcggaacaaagctgacagtgcttctcgaggacctgaagaacgtgttcccacctgaggtggccgtgttcgagcctagcgaggccgagatcagccacacccagaaagccaccctcgtgtgcctggctaccggcttctaccccgaccatgtggaactgtcttggtgggtcaacggcaaagaggtgcacagcggcgtgtgtaccgacccccagccactgaaagaacagcccgccctgaacgacagccggtactgcctgagcagcagactgagagtgtccgccaccttctggcagaacccccggaaccacttcagatgccaggtgcagttctacggcctgagcgagaacgacgagtggacccaggacagagccaagcccgtgacccagatcgtgtctgccgaagcctggggcagagccgattgcggctttaccagcgagagctaccagcagggcgtgctgagcgccaccatcctgtacgagatcctgctgggcaaggccaccctgtacgccgtgctggtgtctgccctggtgctgatggctatggtcaagcggaaggacagccggggaagggccaagcgatctggatctggagcaacaaacttctcactactcaaacaagcaggtgacgtggaggagaatcccgggcctactagtatggactggatttggcgcatccttttccttgtcggcgctgctaccggcgcgcattccttcgaacaactccagctgcaagagtctggccctggcctggtcaagcctagcgaaacactgagcctgacctgtaccgtgtctggcggctctatcagctccggcagctatttctggggctggatcagacaacctcctggcaaaggactggaatggatcggctccatctactacagcggcatcacctactacaaccccagcctgaagtccagagtgaccatctccgtggacaccagcaagaaccagttctccctgaagctgagcagcgtgacagccgccgataccgccgtgtattattgtgccagacatgacggcgctgtggccggcctgtttgattattggggacagggcaccctggtcaccgtgtcatctgctacgcgtatccagaaccctgatcctgccgtgtaccagctgcgggatagcaagagcagcgacaagagcgtgtgtctgttcaccgacttcgacagccagaccaacgtgtcccagagcaaggactccgacgtgtacatcaccgataagtgcgtgctggacatgcggagcatggacttcaagagcaactccgccgtggcctggtccaacaagtccgatttcgcctgcgccaacgccttcaacaacagcattatccccgaggacacattcttcccaagccccgagagcagctgcgacgtgaagctggtggaaaagagcttcgagacagacaccaacctgaacttccagaacctgagcgtgatcggcttcagaatcctgctgctgaaagtggccggctttaacctgctgatgaccctgcggctgtggtccagc

SEQ ID NO: 8108 - DNA, 2544 bp, Artificial Sequence
  Synthetic Polynucloetide
atggccttaccagtgaccgccttgctcctgccgctggccttgctgctccacgccgccaggccgagctacgtgctgacacagcctccatccgtgtctgtggctccaggacagaccgccagaatcacatgcggcggcaacaacatcggcagcaagaccgtgcactggtatcagcagccacctggacaggctccagtggtggtggtgtacgacgacagcgatagacctagcggcatccccgagagattcagcggcagcaattccggcaataccgccacactgaccatcagcagagtggaagctggcgacgaggccgtgtactactgccaagtgtgggacagcagcagcgatcacgtggtgtttggcggcggaacaaagctgacagtgcttctcgaggacctgaagaacgtgttcccacctgaggtggccgtgttcgagcctagcgaggccgagatcagccacacccagaaagccaccctcgtgtgcctggctaccggcttctaccccgaccatgtggaactgtcttggtgggtcaacggcaaagaggtgcacagcggcgtgtgtaccgacccccagccactgaaagaacagcccgccctgaacgacagccggtactgcctgagcagcagactgagagtgtccgccaccttctggcagaacccccggaaccacttcagatgccaggtgcagttctacggcctgagcgagaacgacgagtggacccaggacagagccaagcccgtgacccagatcgtgtctgccgaagcctggggcagagccgattgcggctttaccagcgagagctaccagcagggcgtgctgagcgccaccatcctgtacgagatcctgctgggcaaggccaccctgtacgccgtgctggtgtctgccctggtgctgatggctatggtcaagcggaaggacagccggggaagggccaagcgatctggatctggagcaacaaacttctcactactcaaacaagcaggtgacgtggaggagaatcccgggcctactagtatggactggatttggcgcatccttttccttgtcggcgctgctaccggcgcgcattccttcgaacaactccagctgcaagagtctggccctggcctggtcaagcctagcgaaacactgagcctgacctgtaccgtgtctggcggctctatcagctccggcagctatttctggggctggatcagacaacctcctggcaaaggactggaatggatcggctccatctactacagcggcatcacctactacaaccccagcctgaagtccagagtgaccatctccgtggacaccagcaagaaccagttctccctgaagctgagcagcgtgacagccgccgataccgccgtgtattattgtgccagacatgacggcgctgtggccggcctgtttgattattggggacagggcaccctggtcaccgtgtcatctgctacgcgtatccagaaccctgatcctgccgtgtaccagctgcgggatagcaagagcagcgacaagagcgtgtgtctgttcaccgacttcgacagccagaccaacgtgtcccagagcaaggactccgacgtgtacatcaccgataagtgcgtgctggacatgcggagcatggacttcaagagcaactccgccgtggcctggtccaacaagtccgatttcgcctgcgccaacgccttcaacaacagcattatccccgaggacacattcttcccaagccccgagagcagctgcgacgtgaagctggtggaaaagagcttcgagacagacaccaacctgaacttccagaacctgagcgtgatcggcttcagaatcctgctgctgaaagtggccggctttaacctgctgatgaccctgcggctgtggtccagccgcgccaagagaagcggatctggcgtgaagcagaccctgaatttcgacctgctgaagctggctggcgacgtggaatccaacccaggcccttctagaggcgggatccacaccatggctacctacgaggtgctgtgcgaggtggcaagaaagctgggcaccgacgacagagaagtggtgctgttcctgctgaacgtgttcatccctcagcctacactggcccagctgatcggtgcactgagagccctgaaagaggaaggccggctgacctttcctctgctggccgaatgcctgttcagagccggaagaagggatctgctgcgggacctgctgcatctggaccccagatttctggaaagacacctggccggcaccatgagctacttcagcccttaccagctgaccgtgctgcacgttgacggcgaactgtgcgccagagatattcggagcctgatcttcctgagcaaggacaccatcggcagccggtctacccctcagacatttctgcactgggtgtactgcatggaaaacctggacctgctcggccccacagatgtggatgccctgatgtccatgctgagaagcctgagcagagtggacctccagagacaggtgcagacactgatgggactgcacctgagcggacctagccacagccagcactacagacacacccct

SEQ ID NO: 8109 - DNA, 1881 bp, Artificial Sequence
  Synthetic Polynucloetide
atggccttaccagtgaccgccttgctcctgccgctggccttgctgctccacgccgccaggccgagctacgtgctgacacagcctccatccgtgtctgtggctccaggacagaccgccagaatcacatgcggcggcaacaacatcggcagcaagaccgtgcactggtatcagcagccacctggacaggctccagtggtggtggtgtacgacgacagcgatagacctagcggcatccccgagagattcagcggcagcaattccggcaataccgccacactgaccatcagcagagtggaagctggcgacgaggccgtgtactactgccaagtgtgggacagcagcagcgatcacgtggtgtttggcggcggaacaaagctgacagtgcttctcgagatccagaaccctgatcctgccgtgtaccagctgcgggatagcaagagcagcgacaagagcgtgtgtctgttcaccgacttcgacagccagaccaacgtgtcccagagcaaggactccgacgtgtacatcaccgataagtgcgtgctggacatgcggagcatggacttcaagagcaactccgccgtggcctggtccaacaagtccgatttcgcctgcgccaacgccttcaacaacagcattatccccgaggacacattcttcccaagccccgagagcagctgcgacgtgaagctggtggaaaagagcttcgagacagacaccaacctgaacttccagaacctgagcgtgatcggcttcagaatcctgctgctgaaagtggccggctttaacctgctgatgaccctgcggctgtggtccagccgcgccaagagaagcggatctggcgtgaagcagaccctgaatttcgacctgctgaagctggctggcgacgtggaatccaacccaggccctactagtatggactggatttggcgcatccttttccttgtcggcgctgctaccggcgcgcattccttcgaacaactccagctgcaagagtctggccctggcctggtcaagcctagcgaaacactgagcctgacctgtaccgtgtctggcggctctatcagctccggcagctatttctggggctggatcagacaacctcctggcaaaggactggaatggatcggctccatctactacagcggcatcacctactacaaccccagcctgaagtccagagtgaccatctccgtggacaccagcaagaaccagttctccctgaagctgagcagcgtgacagccgccgataccgccgtgtattattgtgccagacatgacggcgctgtggccggcctgtttgattattggggacagggcaccctggtcaccgtgtcatctgctacgcgtgaggacctgaagaacgtgttcccacctgaggtggccgtgttcgagcctagcgaggccgagatcagccacacccagaaagccaccctcgtgtgcctggctaccggcttctaccccgaccatgtggaactgtcttggtgggtcaacggcaaagaggtgcacagcggcgtgtgtaccgacccccagccactgaaagaacagcccgccctgaacgacagccggtactgcctgagcagcagactgagagtgtccgccaccttctggcagaacccccggaaccacttcagatgccaggtgcagttctacggcctgagcgagaacgacgagtggacccaggacagagccaagcccgtgacccagatcgtgtctgccgaagcctggggcagagccgattgcggctttaccagcgagagctaccagcagggcgtgctgagcgccaccatcctgtacgagatcctgctgggcaaggccaccctgtacgccgtgctggtgtctgccctggtgctgatggctatggtcaagcggaaggacagccgggga

SEQ ID NO: 8110 - DNA, 2547 bp, Artificial Sequence
  Synthetic Polynucloetide
atggccttaccagtgaccgccttgctcctgccgctggccttgctgctccacgccgccaggccgagctacgtgctgacacagcctccatccgtgtctgtggctccaggacagaccgccagaatcacatgcggcggcaacaacatcggcagcaagaccgtgcactggtatcagcagccacctggacaggctccagtggtggtggtgtacgacgacagcgatagacctagcggcatccccgagagattcagcggcagcaattccggcaataccgccacactgaccatcagcagagtggaagctggcgacgaggccgtgtactactgccaagtgtgggacagcagcagcgatcacgtggtgtttggcggcggaacaaagctgacagtgcttctcgagatccagaaccctgatcctgccgtgtaccagctgcgggatagcaagagcagcgacaagagcgtgtgtctgttcaccgacttcgacagccagaccaacgtgtcccagagcaaggactccgacgtgtacatcaccgataagtgcgtgctggacatgcggagcatggacttcaagagcaactccgccgtggcctggtccaacaagtccgatttcgcctgcgccaacgccttcaacaacagcattatccccgaggacacattcttcccaagccccgagagcagctgcgacgtgaagctggtggaaaagagcttcgagacagacaccaacctgaacttccagaacctgagcgtgatcggcttcagaatcctgctgctgaaagtggccggctttaacctgctgatgaccctgcggctgtggtccagccgcgccaagagaagcggatctggcgtgaagcagaccctgaatttcgacctgctgaagctggctggcgacgtggaatccaacccaggccctactagtatggactggatttggcgcatccttttccttgtcggcgctgctaccggcgcgcattccttcgaacaactccagctgcaagagtctggccctggcctggtcaagcctagcgaaacactgagcctgacctgtaccgtgtctggcggctctatcagctccggcagctatttctggggctggatcagacaacctcctggcaaaggactggaatggatcggctccatctactacagcggcatcacctactacaaccccagcctgaagtccagagtgaccatctccgtggacaccagcaagaaccagttctccctgaagctgagcagcgtgacagccgccgataccgccgtgtattattgtgccagacatgacggcgctgtggccggcctgtttgattattggggacagggcaccctggtcaccgtgtcatctgctacgcgtgaggacctgaagaacgtgttcccacctgaggtggccgtgttcgagcctagcgaggccgagatcagccacacccagaaagccaccctcgtgtgcctggctaccggcttctaccccgaccatgtggaactgtcttggtgggtcaacggcaaagaggtgcacagcggcgtgtgtaccgacccccagccactgaaagaacagcccgccctgaacgacagccggtactgcctgagcagcagactgagagtgtccgccaccttctggcagaacccccggaaccacttcagatgccaggtgcagttctacggcctgagcgagaacgacgagtggacccaggacagagccaagcccgtgacccagatcgtgtctgccgaagcctggggcagagccgattgcggctttaccagcgagagctaccagcagggcgtgctgagcgccaccatcctgtacgagatcctgctgggcaaggccaccctgtacgccgtgctggtgtctgccctggtgctgatggctatggtcaagcggaaggacagccggggaagggccaagcgatctggatctggagcaacaaacttctcactactcaaacaagcaggtgacgtggaggagaatcccgggccttctagaggcgggatccacaccatggctacctacgaggtgctgtgcgaggtggcaagaaagctgggcaccgacgacagagaagtggtgctgttcctgctgaacgtgttcatccctcagcctacactggcccagctgatcggtgcactgagagccctgaaagaggaaggccggctgacctttcctctgctggccgaatgcctgttcagagccggaagaagggatctgctgcgggacctgctgcatctggaccccagatttctggaaagacacctggccggcaccatgagctacttcagcccttaccagctgaccgtgctgcacgttgacggcgaactgtgcgccagagatattcggagcctgatcttcctgagcaaggacaccatcggcagccggtctacccctcagacatttctgcactgggtgtactgcatggaaaacctggacctgctcggccccacagatgtggatgccctgatgtccatgctgagaagcctgagcagagtggacctccagagacaggtgcagacactgatgggactgcacctgagcggacctagccacagccagcactacagacacacccct

SEQ ID NO: 8111 - DNA, 2706 bp, Artificial Sequence
  Synthetic Polynucloetide
atggccttaccagtgaccgccttgctcctgccgctggccttgctgctccacgccgccaggccgctcgaggggaaaccaattcccaaccctcttctgggactggattcaaccggcagcggcgaggacctgaagaacgtgttcccacctgaggtggccgtgttcgagcctagcaaggccgagatcgcccacacccagaaagccaccctcgtgtgcctggctaccggcttctaccccgaccatgtggaactgtcttggtgggtcaacggcaaagaggtgcacagcggcgtgtgtaccgacccccagccactgaaagaacagcccgccctgaacgacagccggtactgcctgagcagcagactgagagtgtccgccaccttctggcagaacccccggaaccacttcagatgccaggtgcagttctacggcctgagcgagaacgacgagtggacccaggacagagccaagcccgtgacccagatcgtgtctgccgaagcctggggcagagccgattgcggcatcaccagcgccagctaccaccagggcgtgctgagcgccaccatcctgtacgagatcctgctgggcaaggccaccctgtacgccgtgctggtgtctgccctggtgctgatggctatggtcaagcggaaggacagccggggaagggccaagcgatctggatctggagcaacaaacttctcactactcaaacaagcaggtgacgtggaggagaatcccgggcctactagcatggccttaccagtgaccgccttgctcctgccgctggccttgctgctccacgccgccaggccgagctacgtgctgacacagcctccatccgtgtctgtggctccaggacagaccgccagaatcacatgcggcggcaacaacatcggcagcaagaccgtgcactggtatcagcagccacctggacaggctccagtggtggtggtgtacgacgacagcgatagacctagcggcatccccgagagattcagcggcagcaattccggcaataccgccacactgaccatcagcagagtggaagctggcgacgaggccgtgtactactgccaagtgtgggacagcagcagcgatcacgtggtgtttggcggcggaacaaagctgacagtgcttggcggaggcggaagtggaggcggaggatctggcggcggaggctctcaactccagctgcaagagtctggccctggcctggtcaagcctagcgaaacactgagcctgacctgtaccgtgtctggcggctctatcagctccggcagctatttctggggctggatcagacaacctcctggcaaaggactggaatggatcggctccatctactacagcggcatcacctactacaaccccagcctgaagtccagagtgaccatctccgtggacaccagcaagaaccagttctccctgaagctgagcagcgtgacagccgccgataccgccgtgtattattgtgccagacatgacggcgctgtggccggcctgtttgattattggggacagggcaccctggtcaccgtgtcatctgctacgcgtgagcagaaactgatctcggaagaggatgggagcggcatccagaaccctgatcctgccgtgtaccagctgcgggatagcaagagcagcgacaagagcgtgtgtctgttcaccgacttcgacagccagaccaacgtgtcccagagcaaggactccgacgtgtacatcaccgataagtgcgtgctggacatgcggagcatggacttcaagagcaactccgccgtggcctggtccaacaagtccgatttcgcctgcgccaacgccttcaacaacagcattatccccgaggacacattcttcccaagcagcgacgtgccctgcgacgtgaagctggtggaaaagagcttcgagacagacaccaacctgaacttccagaacctgagcgtgatcggcttcagaatcctgctgctgaaagtggccggctttaacctgctgatgaccctgcggctgtggtccagccgcgccaagagaagcggatctggcgtgaagcagaccctgaatttcgacctgctgaagctggctggcgacgtggaatccaacccaggcccttctagaggccatatgaccgagtacaagcccacggtgcgcctcgccacccgcgacgacgtccccagggccgtacgcaccctcgccgccgcgttcgccgactaccccgccacgcgccacaccgtcgatccggaccgccacatcgagcgggtcaccgagctgcaagaactcttcctcacgcgcgtcgggctcgacatcggcaaggtgtgggtcgcggacgacggcgccgcggtggcggtctggaccacgccggagagcgtcgaagcgggggcggtgttcgccgagatcggcccgcgcatggccgagttgagcggttcccggctggccgcgcagcaacagatggaaggcctcctggcgccgcaccggcccaaggagcccgcgtggttcctggccaccgtcggcgtctcgcccgaccaccagggcaagggtctgggcagcgccgtcgtgctccccggagtggaggcggccgagcgcgccggggtgcccgccttcctggagacctccgcgccccgcaacctccccttctacgagcggctcggcttcaccgtcaccgccgacgtcgaggtgcccgaaggaccgcgcacctggtgcatgacccgcaagcccggtgcctga

SEQ ID NO: 8112 - DNA, 2709 bp, Artificial Sequence
  Synthetic Polynucloetide
atggccttaccagtgaccgccttgctcctgccgctggccttgctgctccacgccgccaggccgctcgagcagaaactgatctcggaagaggatctgggctccggcgatcgccctgatcctgccgtgtaccagctgcgggatagcaagagcagcgacaagagcgtgtgtctgttcaccgacttcgacagccagaccaacgtgtcccagagcaaggactccgacgtgtacatcaccgataagtgcgtgctggacatgcggagcatggacttcaagagcaactccgccgtggcctggtccaacaagtccgatttcgcctgcgccaacgccttcaacaacagcattatccccgaggacacattcttcccaagccccgagagcagctgcgacgtgaagctggtggaaaagagcttcgagacagacaccaacctgaacttccagaacctgagcgtgatcggcttcagaatcctgctgctgaaagtggccggctttaacctgctgatgaccctgcggctgtggtccagctctagtcgcgccaagagaagcggatctggcgtgaagcagaccctgaatttcgacctgctgaagctggctggcgacgtggaatccaacccaggccccactagcatggccttaccagtgaccgccttgctcctgccgctggccttgctgctccacgccgccaggccgagctacgtgctgacacagcctccatccgtgtctgtggctccaggacagaccgccagaatcacatgcggcggcaacaacatcggcagcaagaccgtgcactggtatcagcagccacctggacaggctccagtggtggtggtgtacgacgacagcgatagacctagcggcatccccgagagattcagcggcagcaattccggcaataccgccacactgaccatcagcagagtggaagctggcgacgaggccgtgtactactgccaagtgtgggacagcagcagcgatcacgtggtgtttggcggcggaacaaagctgacagtgcttggcggaggcggaagtggaggcggaggatctggcggcggaggctctcaactccagctgcaagagtctggccctggcctggtcaagcctagcgaaacactgagcctgacctgtaccgtgtctggcggctctatcagctccggcagctatttctggggctggatcagacaacctcctggcaaaggactggaatggatcggctccatctactacagcggcatcacctactacaaccccagcctgaagtccagagtgaccatctccgtggacaccagcaagaaccagttctccctgaagctgagcagcgtgacagccgccgataccgccgtgtattattgtgccagacatgacggcgctgtggccggcctgtttgattattggggacagggcaccctggtcaccgtgtcatctgctacgcgtgggaaaccaattcccaaccctcttctgggactggattcaaccggcagcggcgaggacctgaagaacgtgttcccacctgaggtggccgtgttcgagcctagcgaggccgagatcagccacacccagaaagccaccctcgtgtgcctggctaccggcttctaccccgaccatgtggaactgtcttggtgggtcaacggcaaagaggtgcacagcggcgtgtgtaccgacccccagccactgaaagaacagcccgccctgaacgacagccggtactgcctgagcagcagactgagagtgtccgccaccttctggcagaacccccggaaccacttcagatgccaggtgcagttctacggcctgagcgagaacgacgagtggacccaggacagagccaagcccgtgacccagatcgtgtctgccgaagcctggggcagagccgattgcggctttaccagcgagagctaccagcagggcgtgctgagcgccaccatcctgtacgagatcctgctgggcaaggccaccctgtacgccgtgctggtgtctgccctggtgctgatggctatggtcaagcggaaggacagccggggaagggccaagcgatctggatctggagcaacaaacttctcactactcaaacaagcaggtgacgtggaggagaatcccgggccttctagaggccatatgaccgagtacaagcccacggtgcgcctcgccacccgcgacgacgtccccagggccgtacgcaccctcgccgccgcgttcgccgactaccccgccacgcgccacaccgtcgatccggaccgccacatcgagcgggtcaccgagctgcaagaactcttcctcacgcgcgtcgggctcgacatcggcaaggtgtgggtcgcggacgacggcgccgcggtggcggtctggaccacgccggagagcgtcgaagcgggggcggtgttcgccgagatcggcccgcgcatggccgagttgagcggttcccggctggccgcgcagcaacagatggaaggcctcctggcgccgcaccggcccaaggagcccgcgtggttcctggccaccgtcggcgtctcgcccgaccaccagggcaagggtctgggcagcgccgtcgtgctccccggagtggaggcggccgagcgcgccggggtgcccgccttcctggagacctccgcgccccgcaacctccccttctacgagcggctcggcttcaccgtcaccgccgacgtcgaggtgcccgaaggaccgcgcacctggtgcatgacccgcaagcccggtgcctga

SEQ ID NO: 8113 - DNA, 2571 bp, Artificial Sequence
  Synthetic Polynucloetide
atggccttaccagtgaccgccttgctcctgccgctggccttgctgctccacgccgccaggccgagctacgtgctgacacagcctccatccgtgtctgtggctccaggacagaccgccagaatcacatgcggcggcaacaacatcggcagcaagaccgtgcactggtatcagcagccacctggacaggctccagtggtggtggtgtacgacgacagcgatagacctagcggcatccccgagagattcagcggcagcaattccggcaataccgccacactgaccatcagcagagtggaagctggcgacgaggccgtgtactactgccaagtgtgggacagcagcagcgatcacgtggtgtttggcggcggaacaaagctgacagtgcttctcgaggacctgaagaacgtgttcccacctgaggtggccgtgttcgagcctagcgaggccgagatcagccacacccagaaagccaccctcgtgtgcctggctaccggcttctaccccgaccatgtggaactgtcttggtgggtcaacggcaaagaggtgcacagcggcgtgtctaccgacccccagccactgaaagaacagcccgccctgaacgacagccggtactgcctgagcagcagactgagagtgtccgccaccttctggcagaacccccggaaccacttcagatgccaggtgcagttctacggcctgagcgagaacgacgagtggacccaggacagagccaagcccgtgacccagatcgtgtctgccgaagcctggggcagagccgattgcggctttaccagcgagagctaccagcagggcgtgctgagcgccaccatcctgtacgagatcctgctgggcaaggccaccctgtacgccgtgctggtgtctgccctggtgctgatggctatggtcaagcggaaggacagccggggaagggccaagcgatctggatctggagcaacaaacttctcactactcaaacaagcaggtgacgtggaggagaatcccgggcctactagtatggactggatttggcgcatccttttccttgtcggcgctgctaccggcgcgcattccttcgaacaactccagctgcaagagtctggccctggcctggtcaagcctagcgaaacactgagcctgacctgtaccgtgtctggcggctctatcagctccggcagctatttctggggctggatcagacaacctcctggcaaaggactggaatggatcggctccatctactacagcggcatcacctactacaaccccagcctgaagtccagagtgaccatctccgtggacaccagcaagaaccagttctccctgaagctgagcagcgtgacagccgccgataccgccgtgtattattgtgccagacatgacggcgctgtggccggcctgtttgattattggggacagggcaccctggtcaccgtgtcatctgctacgcgtatccagaaccctgatcctgccgtgtaccagctgcgggatagcaagagcagcgacaagagcgtgtgtctgttcaccgacttcgacagccagaccaacgtgtcccagagcaaggactccgacgtgtacatcaccgataagaccgtgctggacatgcggagcatggacttcaagagcaactccgccgtggcctggtccaacaagtccgatttcgcctgcgccaacgccttcaacaacagcattatccccgaggacacattcttcccaagccccgagagcagctgcgacgtgaagctggtggaaaagagcttcgagacagacaccaacctgaacttccagaacctgagcgtgatcggcttcagaatcctgctgctgaaagtggccggctttaacctgctgatgaccctgcggctgtggtccagccgcgccaagagaagcggatctggcgtgaagcagaccctgaatttcgacctgctgaagctggctggcgacgtggaatccaacccaggcccttctagaggccatatgaccgagtacaagcccacggtgcgcctcgccacccgcgacgacgtccccagggccgtacgcaccctcgccgccgcgttcgccgactaccccgccacgcgccacaccgtcgatccggaccgccacatcgagcgggtcaccgagctgcaagaactcttcctcacgcgcgtcgggctcgacatcggcaaggtgtgggtcgcggacgacggcgccgcggtggcggtctggaccacgccggagagcgtcgaagcgggggcggtgttcgccgagatcggcccgcgcatggccgagttgagcggttcccggctggccgcgcagcaacagatggaaggcctcctggcgccgcaccggcccaaggagcccgcgtggttcctggccaccgtcggcgtctcgcccgaccaccagggcaagggtctgggcagcgccgtcgtgctccccggagtggaggcggccgagcgcgccggggtgcccgccttcctggagacctccgcgccccgcaacctccccttctacgagcggctcggcttcaccgtcaccgccgacgtcgaggtgcccgaaggaccgcgcacctggtgcatgacccgcaagcccggtgcctga

SEQ ID NO: 8114 - DNA, 2817 bp, Artificial Sequence
  Synthetic Polynucloetide
atggccttaccagtgaccgccttgctcctgccgctggccttgctgctccacgccgccaggccgagctacgtgctgacacagcctccatccgtgtctgtggctccaggacagaccgccagaatcacatgcggcggcaacaacatcggcagcaagaccgtgcactggtatcagcagccacctggacaggctccagtggtggtggtgtacgacgacagcgatagacctagcggcatccccgagagattcagcggcagcaattccggcaataccgccacactgaccatcagcagagtggaagctggcgacgaggccgtgtactactgccaagtgtgggacagcagcagcgatcacgtggtgtttggcggcggaacaaagctgacagtgcttctcgaggacctgaagaacgtgttcccacctgaggtggccgtgttcgagcctagcgaggccgagatcagccacacccagaaagccaccctcgtgtgcctggctaccggcttctaccccgaccatgtggaactgtcttggtgggtcaacggcaaagaggtgcacagcggcgtgtctaccgacccccagccactgaaagaacagcccgccctgaacgacagccggtactgcctgagcagcagactgagagtgtccgccaccttctggcagaacccccggaaccacttcagatgccaggtgcagttctacggcctgagcgagaacgacgagtggacccaggacagagccaagcccgtgacccagatcgtgtctgccgaagcctggggcagagccgattgcggctttaccagcgagagctaccagcagggcgtgctgagcgccaccatcctgtacgagatcctgctgggcaaggccaccctgtacgccgtgctggtgtctgccctggtgctgatggctatggtcaagcggaaggacagccggggaagggccaagcgatctggatctggagcaacaaacttctcactactcaaacaagcaggtgacgtggaggagaatcccgggcctactagtatggactggatttggcgcatccttttccttgtcggcgctgctaccggcgcgcattccttcgaacaactccagctgcaagagtctggccctggcctggtcaagcctagcgaaacactgagcctgacctgtaccgtgtctggcggctctatcagctccggcagctatttctggggctggatcagacaacctcctggcaaaggactggaatggatcggctccatctactacagcggcatcacctactacaaccccagcctgaagtccagagtgaccatctccgtggacaccagcaagaaccagttctccctgaagctgagcagcgtgacagccgccgataccgccgtgtattattgtgccagacatgacggcgctgtggccggcctgtttgattattggggacagggcaccctggtcaccgtgtcatctgctacgcgtgagcagaaactgatctcggaagaggatgggagcggcaccccattcccttctctggcccctcccatcatgctgctggtggacggcaagcagcagatggtggtcgtgtgcctggtgctggatgtggccccacctggactggacagccccatctggtttagcgccggcaatggctctgccctggacgcctttacctacggcccaagccctgccaccgatggcacctggacaaatctggcccacctgagcctgcccagcgaggaactggcttcttgggagcctctcgtgtgccacacaggacctggcgctgagggacacagcagatccacccagcctatgcacctgtctggcgaggccagcaccgccagaacctgtcctcaggaacctctgagaggcacccctggcggagcactgtggctgggagtgctgagactgctgctgttcaagctgctgctgtttgacctgctgctgacctgctcctgtctgtgcgatcctgccggccctctgccttctcctgccaccaccacaagactgagagccctgggcagccacagactgcaccctgccacagagacaggcggcagagaggccacaagcagccctagaccccagcccagagacagaagatggggcgataccccccctggcagaaagcctggatctccagtccgcgccaagagaagcggatctggcgtgaagcagaccctgaatttcgacctgctgaagctggctggcgacgtggaatccaacccaggcccttctagaggccatatgaccgagtacaagcccacggtgcgcctcgccacccgcgacgacgtccccagggccgtacgcaccctcgccgccgcgttcgccgactaccccgccacgcgccacaccgtcgatccggaccgccacatcgagcgggtcaccgagctgcaagaactcttcctcacgcgcgtcgggctcgacatcggcaaggtgtgggtcgcggacgacggcgccgcggtggcggtctggaccacgccggagagcgtcgaagcgggggcggtgttcgccgagatcggcccgcgcatggccgagttgagcggttcccggctggccgcgcagcaacagatggaaggcctcctggcgccgcaccggcccaaggagcccgcgtggttcctggccaccgtcggcgtctcgcccgaccaccagggcaagggtctgggcagcgccgtcgtgctccccggagtggaggcggccgagcgcgccggggtgcccgccttcctggagacctccgcgccccgcaacctccccttctacgagcggctcggcttcaccgtcaccgccgacgtcgaggtgcccgaaggaccgcgcacctggtgcatgacccgcaagcccggtgcctga

SEQ ID NO: 8115 - DNA, 2871 bp, Artificial Sequence
  Synthetic Polynucloetide
atggccttaccagtgaccgccttgctcctgccgctggccttgctgctccacgccgccaggccgctcgaggacctgaagaacgtgttcccacctgaggtggccgtgttcgagcctagcgaggccgagatcagccacacccagaaagccaccctcgtgtgcctggctaccggcttctaccccgaccatgtggaactgtcttggtgggtcaacggcaaagaggtgcacagcggcgtgtctaccgacccccagccactgaaagaacagcccgccctgaacgacagccggtactgcctgagcagcagactgagagtgtccgccaccttctggcagaacccccggaaccacttcagatgccaggtgcagttctacggcctgagcgagaacgacgagtggacccaggacagagccaagcccgtgacccagatcgtgtctgccgaagcctggggcagagccgattgcggctttaccagcgagagctaccagcagggcgtgctgagcgccaccatcctgtacgagatcctgctgggcaaggccaccctgtacgccgtgctggtgtctgccctggtgctgatggctatggtcaagcggaaggacagccggggaagggccaagcgatctggatctggagcaacaaacttctcactactcaaacaagcaggtgacgtggaggagaatcccgggcctactagcatggccttaccagtgaccgccttgctcctgccgctggccttgctgctccacgccgccaggccgagctacgtgctgacacagcctccatccgtgtctgtggctccaggacagaccgccagaatcacatgcggcggcaacaacatcggcagcaagaccgtgcactggtatcagcagccacctggacaggctccagtggtggtggtgtacgacgacagcgatagacctagcggcatccccgagagattcagcggcagcaattccggcaataccgccacactgaccatcagcagagtggaagctggcgacgaggccgtgtactactgccaagtgtgggacagcagcagcgatcacgtggtgtttggcggcggaacaaagctgacagtgcttggcggaggcggaagtggaggcggaggatctggcggcggaggctctcaactccagctgcaagagtctggccctggcctggtcaagcctagcgaaacactgagcctgacctgtaccgtgtctggcggctctatcagctccggcagctatttctggggctggatcagacaacctcctggcaaaggactggaatggatcggctccatctactacagcggcatcacctactacaaccccagcctgaagtccagagtgaccatctccgtggacaccagcaagaaccagttctccctgaagctgagcagcgtgacagccgccgataccgccgtgtattattgtgccagacatgacggcgctgtggccggcctgtttgattattggggacagggcaccctggtcaccgtgtcatctgctacgcgtgagcagaaactgatctcggaagaggatctggggagcggcaccccattcccttctctggcccctcccatcatgctgctggtggacggcaagcagcagatggtggtcgtgtgcctggtgctggatgtggccccacctggactggacagccccatctggtttagcgccggcaatggctctgccctggacgcctttacctacggcccaagccctgccaccgatggcacctggacaaatctggcccacctgagcctgcccagcgaggaactggcttcttgggagcctctcgtgtgccacacaggacctggcgctgagggacacagcagatccacccagcctatgcacctgtctggcgaggccagcaccgccagaacctgtcctcaggaacctctgagaggcacccctggcggagcactgtggctgggagtgctgagactgctgctgttcaagctgctgctgtttgacctgctgctgacctgctcctgtctgtgcgatcctgccggccctctgccttctcctgccaccaccacaagactgagagccctgggcagccacagactgcaccctgccacagagacaggcggcagagaggccacaagcagccctagaccccagcccagagacagaagatggggcgataccccccctggcagaaagcctggatctccagtccgcgccaagagaagcggatctggcgtgaagcagaccctgaatttcgacctgctgaagctggctggcgacgtggaatccaacccaggcccttctagatctagaggccatatgaccgagtacaagcccacggtgcgcctcgccacccgcgacgacgtccccagggccgtacgcaccctcgccgccgcgttcgccgactaccccgccacgcgccacaccgtcgatccggaccgccacatcgagcgggtcaccgagctgcaagaactcttcctcacgcgcgtcgggctcgacatcggcaaggtgtgggtcgcggacgacggcgccgcggtggcggtctggaccacgccggagagcgtcgaagcgggggcggtgttcgccgagatcggcccgcgcatggccgagttgagcggttcccggctggccgcgcagcaacagatggaaggcctcctggcgccgcaccggcccaaggagcccgcgtggttcctggccaccgtcggcgtctcgcccgaccaccagggcaagggtctgggcagcgccgtcgtgctccccggagtggaggcggccgagcgcgccggggtgcccgccttcctggagacctccgcgccccgcaacctccccttctacgagcggctcggcttcaccgtcaccgccgacgtcgaggtgcccgaaggaccgcgcacctggtgcatgacccgcaagcccggtgcctga

SEQ ID NO: 8116 - DNA, 2682 bp, Artificial Sequence
  Synthetic Polynucloetide
atggccttaccagtgaccgccttgctcctgccgctggccttgctgctccacgccgccaggccgagctacgtgctgacacagcctccatccgtgtctgtggctccaggacagaccgccagaatcacatgcggcggcaacaacatcggcagcaagaccgtgcactggtatcagcagccacctggacaggctccagtggtggtggtgtacgacgacagcgatagacctagcggcatccccgagagattcagcggcagcaattccggcaataccgccacactgaccatcagcagagtggaagctggcgacgaggccgtgtactactgccaagtgtgggacagcagcagcgatcacgtggtgtttggcggcggaacaaagctgacagtgcttctcgaggggaaaccaattcccaaccctcttctgggactggattcaaccggcagcggcgacaagcagctggacgccgacgtgtcccccaagcctaccatcttcctgccctctatcgccgagacaaagctccagaaggccggcacctacctgtgcctgctggaaaagttcttcccagatgtgattaagatccactggcaggaaaagaagtccaacaccatcctgggcagccaggaaggcaacaccatgaagaccaacgacacctacatgaagttcagctggctgaccgtgcccgagaagtccctggacaaagaacacagatgcatcgtgcggcacgaaaacaacaagaacggcgtggaccaggaaatcatcttcccacccatcaagaccgatgtgattacaatggaccccaaggacaactgctccaaggacgccaacgataccctgctgctccagctgaccaacaccagcgcctactacatgtacttgttgctgctgctgaagtccgtggtgtacttcgccatcatcacatgctgcctgctgcggagaaccgccttctgctgcaacggcgagaagtctagggccaagcgatctggatctggagcaacaaacttctcactactcaaacaagcaggtgacgtggaggagaatcccgggcctactagtatggactggatttggcgcatccttttccttgtcggcgctgctaccggcgcgcattccttcgaacaactccagctgcaagagtctggccctggcctggtcaagcctagcgaaacactgagcctgacctgtaccgtgtctggcggctctatcagctccggcagctatttctggggctggatcagacaacctcctggcaaaggactggaatggatcggctccatctactacagcggcatcacctactacaaccccagcctgaagtccagagtgaccatctccgtggacaccagcaagaaccagttctccctgaagctgagcagcgtgacagccgccgataccgccgtgtattattgtgccagacatgacggcgctgtggccggcctgtttgattattggggacagggcaccctggtcaccgtgtcatctgctacgcgtgagcagaaactgatctcggaagaggatgggagcggcagccagcctcacaccaagcccagcgtgttcgtgatgaagaacggcaccaacgtggcctgcctcgtgaaagagttctaccccaaggacatcaggatcaacctggtgtccagcaagaagatcaccgagttcgaccccgccatcgtgatctcccccagcggcaagtacaacgccgtgaagctggggaagtacgaggacagcaacagcgtgacctgctccgtgcagcacgacaacaagaccgtgcacagcaccgactttgaagtgaaaaccgactccaccgaccacgtgaagcccaaagagacagagaacaccaagcagcccagcaagagctgccacaagcccaaggccatcgtgcacaccgagaaagtgaacatgatgagcctgaccgtgctgggcctgcggatgctgttcgccaaaaccgtggccgtgaacttcctgctgaccgccaagctgttcttcctccgcgccaagagaagcggatctggcgtgaagcagaccctgaatttcgacctgctgaagctggctggcgacgtggaatccaacccaggcccttctagaggccatatgaccgagtacaagcccacggtgcgcctcgccacccgcgacgacgtccccagggccgtacgcaccctcgccgccgcgttcgccgactaccccgccacgcgccacaccgtcgatccggaccgccacatcgagcgggtcaccgagctgcaagaactcttcctcacgcgcgtcgggctcgacatcggcaaggtgtgggtcgcggacgacggcgccgcggtggcggtctggaccacgccggagagcgtcgaagcgggggcggtgttcgccgagatcggcccgcgcatggccgagttgagcggttcccggctggccgcgcagcaacagatggaaggcctcctggcgccgcaccggcccaaggagcccgcgtggttcctggccaccgtcggcgtctcgcccgaccaccagggcaagggtctgggcagcgccgtcgtgctccccggagtggaggcggccgagcgcgccggggtgcccgccttcctggagacctccgcgccccgcaacctccccttctacgagcggctcggcttcaccgtcaccgccgacgtcgaggtgcccgaaggaccgcgcacctggtgcatgacccgcaagcccggtgcctga

SEQ ID NO: 8117 - DNA, 1893 bp, Artificial Sequence
  Synthetic Polynucloetide
atggccttaccagtgaccgccttgctcctgccgctggccttgctgctccacgccgccaggccgagctacgtgctgacacagcctccatccgtgtctgtggctccaggacagaccgccagaatcacatgcggcggcaacaacatcggcagcaagaccgtgcactggtatcagcagccacctggacaggctccagtggtggtggtgtacgacgacagcgatagacctagcggcatccccgagagattcagcggcagcaattccggcaataccgccacactgaccatcagcagagtggaagctggcgacgaggccgtgtactactgccaagtgtgggacagcagcagcgatcacgtggtgtttggcggcggaacaaagctgacagtgcttctcgagagccagcctcacaccaagcccagcgtgttcgtgatgaagaacggcaccaacgtggcctgcctcgtgaaagagttctaccccaaggacatcaggatcaacctggtgtccagcaagaagatcaccgagttcgaccccgccatcgtgatctcccccagcggcaagtacaacgccgtgaagctggggaagtacgaggacagcaacagcgtgacctgctccgtgcagcacgacaacaagaccgtgcacagcaccgactttgaagtgaaaaccgactccaccgaccacgtgaagcccaaagagacagagaacaccaagcagcccagcaagagctgccacaagcccaaggccatcgtgcacaccgagaaagtgaacatgatgagcctgaccgtgctgggcctgcggatgctgttcgccaaaaccgtggccgtgaacttcctgctgaccgccaagctgttcttcctcagggccaagcgatctggatctggagcaacaaacttctcactactcaaacaagcaggtgacgtggaggagaatcccgggcctactagtatggactggatttggcgcatccttttccttgtcggcgctgctaccggcgcgcattccttcgaacaactccagctgcaagagtctggccctggcctggtcaagcctagcgaaacactgagcctgacctgtaccgtgtctggcggctctatcagctccggcagctatttctggggctggatcagacaacctcctggcaaaggactggaatggatcggctccatctactacagcggcatcacctactacaaccccagcctgaagtccagagtgaccatctccgtggacaccagcaagaaccagttctccctgaagctgagcagcgtgacagccgccgataccgccgtgtattattgtgccagacatgacggcgctgtggccggcctgtttgattattggggacagggcaccctggtcaccgtgtcatctgctacgcgtgacaagcagctggacgccgacgtgtcccccaagcctaccatcttcctgccctctatcgccgagacaaagctccagaaggccggcacctacctgtgcctgctggaaaagttcttcccagatgtgattaagatccactggcaggaaaagaagtccaacaccatcctgggcagccaggaaggcaacaccatgaagaccaacgacacctacatgaagttcagctggctgaccgtgcccgagaagtccctggacaaagaacacagatgcatcgtgcggcacgaaaacaacaagaacggcgtggaccaggaaatcatcttcccacccatcaagaccgatgtgattacaatggaccccaaggacaactgctccaaggacgccaacgataccctgctgctccagctgaccaacaccagcgcctactacatgtacttgttgctgctgctgaagtccgtggtgtacttcgccatcatcacatgctgcctgctgcggagaaccgccttctgctgcaacggcgagaagtct

SEQ ID NO: 8118 - DNA, 2727 bp, Artificial Sequence
  Synthetic Polynucloetide
atggccttaccagtgaccgccttgctcctgccgctggccttgctgctccacgccgccaggccgctcgaggggaaaccaattcccaaccctcttctgggactggattcaaccggcagcggcgacaagcagctggacgccgacgtgtcccccaagcctaccatcttcctgccctctatcgccgagacaaagctccagaaggccggcacctacctgtgcctgctggaaaagttcttcccagatgtgattaagatccactggcaggaaaagaagtccaacaccatcctgggcagccaggaaggcaacaccatgaagaccaacgacacctacatgaagttcagctggctgaccgtgcccgagaagtccctggacaaagaacacagatgcatcgtgcggcacgaaaacaacaagaacggcgtggaccaggaaatcatcttcccacccatcaagaccgatgtgattacaatggaccccaaggacaactgctccaaggacgccaacgataccctgctgctccagctgaccaacaccagcgcctactacatgtacttgttgctgctgctgaagtccgtggtgtacttcgccatcatcacatgctgcctgctgcggagaaccgccttctgctgcaacggcgagaagtctagggccaagcgatctggatctggagcaacaaacttctcactactcaaacaagcaggtgacgtggaggagaatcccgggcctactagcatggccttaccagtgaccgccttgctcctgccgctggccttgctgctccacgccgccaggccgagctacgtgctgacacagcctccatccgtgtctgtggctccaggacagaccgccagaatcacatgcggcggcaacaacatcggcagcaagaccgtgcactggtatcagcagccacctggacaggctccagtggtggtggtgtacgacgacagcgatagacctagcggcatccccgagagattcagcggcagcaattccggcaataccgccacactgaccatcagcagagtggaagctggcgacgaggccgtgtactactgccaagtgtgggacagcagcagcgatcacgtggtgtttggcggcggaacaaagctgacagtgcttggcggaggcggaagtggaggcggaggatctggcggcggaggctctcaactccagctgcaagagtctggccctggcctggtcaagcctagcgaaacactgagcctgacctgtaccgtgtctggcggctctatcagctccggcagctatttctggggctggatcagacaacctcctggcaaaggactggaatggatcggctccatctactacagcggcatcacctactacaaccccagcctgaagtccagagtgaccatctccgtggacaccagcaagaaccagttctccctgaagctgagcagcgtgacagccgccgataccgccgtgtattattgtgccagacatgacggcgctgtggccggcctgtttgattattggggacagggcaccctggtcaccgtgtcatctgctacgcgtgagcagaaactgatctcggaagaggatgggagcggcagccagcctcacaccaagcccagcgtgttcgtgatgaagaacggcaccaacgtggcctgcctcgtgaaagagttctaccccaaggacatcaggatcaacctggtgtccagcaagaagatcaccgagttcgaccccgccatcgtgatctcccccagcggcaagtacaacgccgtgaagctggggaagtacgaggacagcaacagcgtgacctgctccgtgcagcacgacaacaagaccgtgcacagcaccgactttgaagtgaaaaccgactccaccgaccacgtgaagcccaaagagacagagaacaccaagcagcccagcaagagctgccacaagcccaaggccatcgtgcacaccgagaaagtgaacatgatgagcctgaccgtgctgggcctgcggatgctgttcgccaaaaccgtggccgtgaacttcctgctgaccgccaagctgttcttcctccgcgccaagagaagcggatctggcgtgaagcagaccctgaatttcgacctgctgaagctggctggcgacgtggaatccaacccaggcccttctagaggccatatgaccgagtacaagcccacggtgcgcctcgccacccgcgacgacgtccccagggccgtacgcaccctcgccgccgcgttcgccgactaccccgccacgcgccacaccgtcgatccggaccgccacatcgagcgggtcaccgagctgcaagaactcttcctcacgcgcgtcgggctcgacatcggcaaggtgtgggtcgcggacgacggcgccgcggtggcggtctggaccacgccggagagcgtcgaagcgggggcggtgttcgccgagatcggcccgcgcatggccgagttgagcggttcccggctggccgcgcagcaacagatggaaggcctcctggcgccgcaccggcccaaggagcccgcgtggttcctggccaccgtcggcgtctcgcccgaccaccagggcaagggtctgggcagcgccgtcgtgctccccggagtggaggcggccgagcgcgccggggtgcccgccttcctggagacctccgcgccccgcaacctccccttctacgagcggctcggcttcaccgtcaccgccgacgtcgaggtgcccgaaggaccgcgcacctggtgcatgacccgcaagcccggtgcctga

SEQ ID NO: 8119 - DNA, 3102 bp, Artificial Sequence
  Synthetic Polynucloetide
atggccttaccagtgaccgccttgctcctgccgctggccttgctgctccacgccgccaggccgagctacgtgctgacacagcctccatccgtgtctgtggctccaggacagaccgccagaatcacatgcggcggcaacaacatcggcagcaagaccgtgcactggtatcagcagccacctggacaggctccagtggtggtggtgtacgacgacagcgatagacctagcggcatccccgagagattcagcggcagcaattccggcaataccgccacactgaccatcagcagagtggaagctggcgacgaggccgtgtactactgccaagtgtgggacagcagcagcgatcacgtggtgtttggcggcggaacaaagctgacagtgcttggacagcctaaggccaatcctaccgtgacactgttccctccaagcagcgaagaactccaggccaacaaggccacacttgtgtgcctgatctccgacttctaccctggggctgtgacagtggcttggaaggccgatggatctcctgtgaaagccggcgtggaaaccaccaagccatccaagcagagcaacaacaaatacgccgccagctcctacctgagcctgacacctgagcagtggaagtcccacagatcctacagctgccaagtgacccacgaaggcagcaccgtggaaaagacagtggcccctacagagtgcagcggatcccagagcttcggcctgctggaccccaagctgtgctacctgctggatggcatcctgttcatctacggcgtgatcctgaccgccctgttcctgagagtgaagttcagcagaagcgccgacgcccctgcctaccagcagggacagaaccaactgtacaacgagctgaacctgggcagacgggaagagtacgacgtgctggacaagcggagaggcagggaccctgagatgggcggaaagccccagcggagaaagaacccccaggaaggactgtataacgaactccagaaagacaagatggccgaagcctacagcgagatcggcatgaagggcgagcggagaagaggcaagggccacgatggcctgtaccagggcctgagcaccgccaccaaggacacctatgacgccctgcacatgcaggccctgcctccaagaagggccaagcgatctggatctggagcaacaaacttctcactactcaaacaagcaggtgacgtggaggagaatcccgggcctactagtatggactggatttggcgcatccttttccttgtcggcgctgctaccggcgcgcattccttcgaacaactccagctgcaagagtctggccctggcctggtcaagcctagcgaaacactgagcctgacctgtaccgtgtctggcggctctatcagctccggcagctatttctggggctggatcagacaacctcctggcaaaggactggaatggatcggctccatctactacagcggcatcacctactacaaccccagcctgaagtccagagtgaccatctccgtggacaccagcaagaaccagttctccctgaagctgagcagcgtgacagccgccgataccgccgtgtattattgtgccagacatgacggcgctgtggccggcctgtttgattattggggacagggcaccctggtcaccgtgtcatctgctgcctctacaaagggaccctccgtgtttcctctggctcccagcagcaagtctacaagcggaggaacagccgctctgggctgcctggtcaaggattactttcccgagcctgtgaccgtgtcctggaatagcggagcactgacaagcggcgtgcacacctttccagccgtgctgcaaagcagcggcctgtactctctgagcagcgtggtcacagtgcctagctctagcctgggcacccagacctacatctgcaatgtgaaccacaagcctagcaacaccaaggtggacaagagagtggaacccaagagctgtggtacccagagttttgggttgttggaccctaaattgtgctatctgttggacggaatcctgttcatttacggagtgatcctgaccgcattgttcctgcgggttaagttttccagatccgcagacgcacccgcttaccaacaagggcagaaccaactctacaatgaacttaatttggggcggagggaagagtacgacgttctggacaaaaggaggggacgagatcccgagatgggcggaaagcctcagcgaaggaagaatccgcaagaggggctttataacgaactccagaaagataaaatggcagaagcctatagtgagattgggatgaagggagaaaggaggaggggtaaaggtcacgatgggttgtaccaaggattgagcacagccactaaagatacctatgatgcgctccacatgcaggccctgccgccaagacgcgccaagagaagcggatctggcgtgaagcagaccctgaatttcgacctgctgaagctggctggcgacgtggaatccaacccaggcccttctagaggccatatgaccgagtacaagcccacggtgcgcctcgccacccgcgacgacgtccccagggccgtacgcaccctcgccgccgcgttcgccgactaccccgccacgcgccacaccgtcgatccggaccgccacatcgagcgggtcaccgagctgcaagaactcttcctcacgcgcgtcgggctcgacatcggcaaggtgtgggtcgcggacgacggcgccgcggtggcggtctggaccacgccggagagcgtcgaagcgggggcggtgttcgccgagatcggcccgcgcatggccgagttgagcggttcccggctggccgcgcagcaacagatggaaggcctcctggcgccgcaccggcccaaggagcccgcgtggttcctggccaccgtcggcgtctcgcccgaccaccagggcaagggtctgggcagcgccgtcgtgctccccggagtggaggcggccgagcgcgccggggtgcccgccttcctggagacctccgcgccccgcaacctccccttctacgagcggctcggcttcaccgtcaccgccgacgtcgaggtgcccgaaggaccgcgcacctggtgcatgacccgcaagcccggtgcctga

SEQ ID NO: 8120 - DNA, 2457 bp, Artificial Sequence
  Synthetic Polynucloetide
atggccttaccagtgaccgccttgctcctgccgctggccttgctgctccacgccgccaggccgagctacgtgctgacacagcctccatccgtgtctgtggctccaggacagaccgccagaatcacatgcggcggcaacaacatcggcagcaagaccgtgcactggtatcagcagccacctggacaggctccagtggtggtggtgtacgacgacagcgatagacctagcggcatccccgagagattcagcggcagcaattccggcaataccgccacactgaccatcagcagagtggaagctggcgacgaggccgtgtactactgccaagtgtgggacagcagcagcgatcacgtggtgtttggcggcggaacaaagctgacagtgcttctcgaggacctgaagaacgtgttcccacctgaggtggccgtgttcgagcctagcgaggccgagatcagccacacccagaaagccaccctcgtgtgcctggctaccggcttctaccccgaccatgtggaactgtcttggtgggtcaacggcaaagaggtgcacagcggcgtgtctaccgacccccagccactgaaagaacagcccgccctgaacgacagccggtactgcctgagcagcagactgagagtgtccgccaccttctggcagaacccccggaaccacttcagatgccaggtgcagttctacggcctgagcgagaacgacgagtggacccaggacagagccaagcccgtgacccagatcgtgtctgccgaagcctggggcagagccgattgcggatcccagagcttcggcctgctggaccccaagctgtgctacctgctggatggcatcctgttcatctacggcgtgatcctgaccgccctgttcctgagagtgaagttcagcagaagcgccgacgcccctgcctaccagcagggacagaaccaactgtacaacgagctgaacctgggcagacgggaagagtacgacgtgctggacaagcggagaggcagggaccctgagatgggcggaaagccccagcggagaaagaacccccaggaaggactgtataacgaactccagaaagacaagatggccgaagcctacagcgagatcggcatgaagggcgagcggagaagaggcaagggccacgatggcctgtaccagggcctgagcaccgccaccaaggacacctatgacgccctgcacatgcaggccctgcctccaagaagggccaagcgatctggatctggagcaacaaacttctcactactcaaacaagcaggtgacgtggaggagaatcccgggcctactagtatggactggatttggcgcatccttttccttgtcggcgctgctaccggcgcgcattccttcgaacaactccagctgcaagagtctggccctggcctggtcaagcctagcgaaacactgagcctgacctgtaccgtgtctggcggctctatcagctccggcagctatttctggggctggatcagacaacctcctggcaaaggactggaatggatcggctccatctactacagcggcatcacctactacaaccccagcctgaagtccagagtgaccatctccgtggacaccagcaagaaccagttctccctgaagctgagcagcgtgacagccgccgataccgccgtgtattattgtgccagacatgacggcgctgtggccggcctgtttgattattggggacagggcaccctggtcaccgtgtcatctgctacgcgtatccagaaccctgatcctgccgtgtaccagctgcgggatagcaagagcagcgacaagagcgtgtgtctgttcaccgacttcgacagccagaccaacgtgtcccagagcaaggactccgacgtgtacatcaccgataagaccgtgctggacatgcggagcatggacttcaagagcaactccgccgtggcctggtccaacaagtccgatttcgcctgcgccaacgccttcaacaacagcattatccccgaggacacattcttcccaagccccgagagcagctgcggtacccagagttttgggttgttggaccctaaattgtgctatctgttggacggaatcctgttcatttacggagtgatcctgaccgcattgttcctgcgggttaagttttccagatccgcagacgcacccgcttaccaacaagggcagaaccaactctacaatgaacttaatttggggcggagggaagagtacgacgttctggacaaaaggaggggacgagatcccgagatgggcggaaagcctcagcgaaggaagaatccgcaagaggggctttataacgaactccagaaagataaaatggcagaagcctatagtgagattgggatgaagggagaaaggaggaggggtaaaggtcacgatgggttgtaccaaggattgagcacagccactaaagatacctatgatgcgctccacatgcaggccctgccgccaaga

SEQ ID NO: 8121 - DNA, 2457 bp, Artificial Sequence
  Synthetic Polynucloetide
atggccttaccagtgaccgccttgctcctgccgctggccttgctgctccacgccgccaggccgagctacgtgctgacacagcctccatccgtgtctgtggctccaggacagaccgccagaatcacatgcggcggcaacaacatcggcagcaagaccgtgcactggtatcagcagccacctggacaggctccagtggtggtggtgtacgacgacagcgatagacctagcggcatccccgagagattcagcggcagcaattccggcaataccgccacactgaccatcagcagagtggaagctggcgacgaggccgtgtactactgccaagtgtgggacagcagcagcgatcacgtggtgtttggcggcggaacaaagctgacagtgcttctcgaggacctgaagaacgtgttcccacctgaggtggccgtgttcgagcctagcaaggccgagatcgcccacacccagaaagccaccctcgtgtgcctggctaccggcttctaccccgaccatgtggaactgtcttggtgggtcaacggcaaagaggtgcacagcggcgtgtgtaccgacccccagccactgaaagaacagcccgccctgaacgacagccggtactgcctgagcagcagactgagagtgtccgccaccttctggcagaacccccggaaccacttcagatgccaggtgcagttctacggcctgagcgagaacgacgagtggacccaggacagagccaagcccgtgacccagatcgtgtctgccgaagcctggggcagagccgattgcggatcccagagcttcggcctgctggaccccaagctgtgctacctgctggatggcatcctgttcatctacggcgtgatcctgaccgccctgttcctgagagtgaagttcagcagaagcgccgacgcccctgcctaccagcagggacagaaccaactgtacaacgagctgaacctgggcagacgggaagagtacgacgtgctggacaagcggagaggcagggaccctgagatgggcggaaagccccagcggagaaagaacccccaggaaggactgtataacgaactccagaaagacaagatggccgaagcctacagcgagatcggcatgaagggcgagcggagaagaggcaagggccacgatggcctgtaccagggcctgagcaccgccaccaaggacacctatgacgccctgcacatgcaggccctgcctccaagaagggccaagcgatctggatctggagcaacaaacttctcactactcaaacaagcaggtgacgtggaggagaatcccgggcctactagtatggactggatttggcgcatccttttccttgtcggcgctgctaccggcgcgcattccttcgaacaactccagctgcaagagtctggccctggcctggtcaagcctagcgaaacactgagcctgacctgtaccgtgtctggcggctctatcagctccggcagctatttctggggctggatcagacaacctcctggcaaaggactggaatggatcggctccatctactacagcggcatcacctactacaaccccagcctgaagtccagagtgaccatctccgtggacaccagcaagaaccagttctccctgaagctgagcagcgtgacagccgccgataccgccgtgtattattgtgccagacatgacggcgctgtggccggcctgtttgattattggggacagggcaccctggtcaccgtgtcatctgctacgcgtatccagaaccctgatcctgccgtgtaccagctgcgggatagcaagagcagcgacaagagcgtgtgtctgttcaccgacttcgacagccagaccaacgtgtcccagagcaaggactccgacgtgtacatcaccgataagtgcgtgctggacatgcggagcatggacttcaagagcaactccgccgtggcctggtccaacaagtccgatttcgcctgcgccaacgccttcaacaacagcattatccccgaggacacattcttcccaagcagcgacgtgccctgcggtacccagagttttgggttgttggaccctaaattgtgctatctgttggacggaatcctgttcatttacggagtgatcctgaccgcattgttcctgcgggttaagttttccagatccgcagacgcacccgcttaccaacaagggcagaaccaactctacaatgaacttaatttggggcggagggaagagtacgacgttctggacaaaaggaggggacgagatcccgagatgggcggaaagcctcagcgaaggaagaatccgcaagaggggctttataacgaactccagaaagataaaatggcagaagcctatagtgagattgggatgaagggagaaaggaggaggggtaaaggtcacgatgggttgtaccaaggattgagcacagccactaaagatacctatgatgcgctccacatgcaggccctgccgccaaga

SEQ ID NO: 8122 - DNA, 2670 bp, Artificial Sequence
  Synthetic Polynucloetide
atggccttaccagtgaccgccttgctcctgccgctggccttgctgctccacgccgccaggccgagctacgtgctgacacagcctccatccgtgtctgtggctccaggacagaccgccagaatcacatgcggcggcaacaacatcggcagcaagaccgtgcactggtatcagcagccacctggacaggctccagtggtggtggtgtacgacgacagcgatagacctagcggcatccccgagagattcagcggcagcaattccggcaataccgccacactgaccatcagcagagtggaagctggcgacgaggccgtgtactactgccaagtgtgggacagcagcagcgatcacgtggtgtttggcggcggaacaaagctgacagtgcttctcgaggggaaaccaattcccaaccctcttctgggactggattcaaccggcagcggcgaggacctgaagaacgtgttcccacctgaggtggccgtgttcgagcctagcgaggccgagatcagccacacccagaaagccaccctcgtgtgcctggctaccggcttctaccccgaccatgtggaactgtcttggtgggtcaacggcaaagaggtgcacagcggcgtgtctaccgacccccagccactgaaagaacagcccgccctgaacgacagccggtactgcctgagcagcagactgagagtgtccgccaccttctggcagaacccccggaaccacttcagatgccaggtgcagttctacggcctgagcgagaacgacgagtggacccaggacagagccaagcccgtgacccagatcgtgtctgccgaagcctggggcagagccgattgcggatcccagagcttcggcctgctggaccccaagctgtgctacctgctggatggcatcctgttcatctacggcgtgatcctgaccgccctgttcctgagagtgaagttcagcagaagcgccgacgcccctgcctaccagcagggacagaaccaactgtacaacgagctgaacctgggcagacgggaagagtacgacgtgctggacaagcggagaggcagggaccctgagatgggcggaaagccccagcggagaaagaacccccaggaaggactgtataacgaactccagaaagacaagatggccgaagcctacagcgagatcggcatgaagggcgagcggagaagaggcaagggccacgatggcctgtaccagggcctgagcaccgccaccaaggacacctatgacgccctgcacatgcaggccctgcctccaagaagggccaagcgatctggatctggagcaacaaacttctcactactcaaacaagcaggtgacgtggaggagaatcccgggcctactagtatggactggatttggcgcatccttttccttgtcggcgctgctaccggcgcgcattccttcgaacaactccagctgcaagagtctggccctggcctggtcaagcctagcgaaacactgagcctgacctgtaccgtgtctggcggctctatcagctccggcagctatttctggggctggatcagacaacctcctggcaaaggactggaatggatcggctccatctactacagcggcatcacctactacaaccccagcctgaagtccagagtgaccatctccgtggacaccagcaagaaccagttctccctgaagctgagcagcgtgacagccgccgataccgccgtgtattattgtgccagacatgacggcgctgtggccggcctgtttgattattggggacagggcaccctggtcaccgtgtcatctgctacgcgtgagcagaaactgatctcggaagaggatgggagcggcatccagaaccctgatcctgccgtgtaccagctgcgggatagcaagagcagcgacaagagcgtgtgtctgttcaccgacttcgacagccagaccaacgtgtcccagagcaaggactccgacgtgtacatcaccgataagaccgtgctggacatgcggagcatggacttcaagagcaactccgccgtggcctggtccaacaagtccgatttcgcctgcgccaacgccttcaacaacagcattatccccgaggacacattcttcccaagccccgagagcagctgcggtacccagagttttgggttgttggaccctaaattgtgctatctgttggacggaatcctgttcatttacggagtgatcctgaccgcattgttcctgaggagcaagcggtcacggctgctccacagcgattacatgaatatgacaccacgaagaccgggtcctactcgcaaacactaccaaccctacgcacctccccgcgactttgcagcgtaccgatctcgggttaagttttccagatccgcagacgcacccgcttaccaacaagggcagaaccaactctacaatgaacttaatttggggcggagggaagagtacgacgttctggacaaaaggaggggacgagatcccgagatgggcggaaagcctcagcgaaggaagaatccgcaagaggggctttataacgaactccagaaagataaaatggcagaagcctatagtgagattgggatgaagggagaaaggaggaggggtaaaggtcacgatgggttgtaccaaggattgagcacagccactaaagatacctatgatgcgctccacatgcaggccctgccgccaaga

SEQ ID NO: 8123 - DNA, 2793 bp, Artificial Sequence
  Synthetic Polynucloetide
atggccttaccagtgaccgccttgctcctgccgctggccttgctgctccacgccgccaggccgagctacgtgctgacacagcctccatccgtgtctgtggctccaggacagaccgccagaatcacatgcggcggcaacaacatcggcagcaagaccgtgcactggtatcagcagccacctggacaggctccagtggtggtggtgtacgacgacagcgatagacctagcggcatccccgagagattcagcggcagcaattccggcaataccgccacactgaccatcagcagagtggaagctggcgacgaggccgtgtactactgccaagtgtgggacagcagcagcgatcacgtggtgtttggcggcggaacaaagctgacagtgcttctcgaggggaaaccaattcccaaccctcttctgggactggattcaaccggcagcggcgaggacctgaagaacgtgttcccacctgaggtggccgtgttcgagcctagcgaggccgagatcagccacacccagaaagccaccctcgtgtgcctggctaccggcttctaccccgaccatgtggaactgtcttggtgggtcaacggcaaagaggtgcacagcggcgtgtctaccgacccccagccactgaaagaacagcccgccctgaacgacagccggtactgcctgagcagcagactgagagtgtccgccaccttctggcagaacccccggaaccacttcagatgccaggtgcagttctacggcctgagcgagaacgacgagtggacccaggacagagccaagcccgtgacccagatcgtgtctgccgaagcctggggcagagccgattgcggatcccagagcttcggcctgctggaccccaagctgtgctacctgctggatggcatcctgttcatctacggcgtgatcctgaccgccctgttcctgaggagtaagaggagcaggctcctgcacagtgactacatgaacatgactccacgccgccccggacccacccgcaagcattaccagccctatgccccaccacgcgacttcgcagcctatcgctccagagtgaagttcagcagaagcgccgacgcccctgcctaccagcagggacagaaccaactgtacaacgagctgaacctgggcagacgggaagagtacgacgtgctggacaagcggagaggcagggaccctgagatgggcggaaagccccagcggagaaagaacccccaggaaggactgtataacgaactccagaaagacaagatggccgaagcctacagcgagatcggcatgaagggcgagcggagaagaggcaagggccacgatggcctgtaccagggcctgagcaccgccaccaaggacacctatgacgccctgcacatgcaggccctgcctccaagaagggccaagcgatctggatctggagcaacaaacttctcactactcaaacaagcaggtgacgtggaggagaatcccgggcctactagtatggactggatttggcgcatccttttccttgtcggcgctgctaccggcgcgcattccttcgaacaactccagctgcaagagtctggccctggcctggtcaagcctagcgaaacactgagcctgacctgtaccgtgtctggcggctctatcagctccggcagctatttctggggctggatcagacaacctcctggcaaaggactggaatggatcggctccatctactacagcggcatcacctactacaaccccagcctgaagtccagagtgaccatctccgtggacaccagcaagaaccagttctccctgaagctgagcagcgtgacagccgccgataccgccgtgtattattgtgccagacatgacggcgctgtggccggcctgtttgattattggggacagggcaccctggtcaccgtgtcatctgctacgcgtgagcagaaactgatctcggaagaggatgggagcggcatccagaaccctgatcctgccgtgtaccagctgcgggatagcaagagcagcgacaagagcgtgtgtctgttcaccgacttcgacagccagaccaacgtgtcccagagcaaggactccgacgtgtacatcaccgataagaccgtgctggacatgcggagcatggacttcaagagcaactccgccgtggcctggtccaacaagtccgatttcgcctgcgccaacgccttcaacaacagcattatccccgaggacacattcttcccaagccccgagagcagctgcggtacccagagttttgggttgttggaccctaaattgtgctatctgttggacggaatcctgttcatttacggagtgatcctgaccgcattgttcctgaggagcaagcggtcacggctgctccacagcgattacatgaatatgacaccacgaagaccgggtcctactcgcaaacactaccaaccctacgcacctccccgcgactttgcagcgtaccgatctcgggttaagttttccagatccgcagacgcacccgcttaccaacaagggcagaaccaactctacaatgaacttaatttggggcggagggaagagtacgacgttctggacaaaaggaggggacgagatcccgagatgggcggaaagcctcagcgaaggaagaatccgcaagaggggctttataacgaactccagaaagataaaatggcagaagcctatagtgagattgggatgaagggagaaaggaggaggggtaaaggtcacgatgggttgtaccaaggattgagcacagccactaaagatacctatgatgcgctccacatgcaggccctgccgccaaga

SEQ ID NO: 8124 - DNA, 2676 bp, Artificial Sequence
  Synthetic Polynucloetide
atggccttaccagtgaccgccttgctcctgccgctggccttgctgctccacgccgccaggccgagctacgtgctgacacagcctccatccgtgtctgtggctccaggacagaccgccagaatcacatgcggcggcaacaacatcggcagcaagaccgtgcactggtatcagcagccacctggacaggctccagtggtggtggtgtacgacgacagcgatagacctagcggcatccccgagagattcagcggcagcaattccggcaataccgccacactgaccatcagcagagtggaagctggcgacgaggccgtgtactactgccaagtgtgggacagcagcagcgatcacgtggtgtttggcggcggaacaaagctgacagtgcttctcgaggggaaaccaattcccaaccctcttctgggactggattcaaccggcagcggcgaggacctgaagaacgtgttcccacctgaggtggccgtgttcgagcctagcgaggccgagatcagccacacccagaaagccaccctcgtgtgcctggctaccggcttctaccccgaccatgtggaactgtcttggtgggtcaacggcaaagaggtgcacagcggcgtgtctaccgacccccagccactgaaagaacagcccgccctgaacgacagccggtactgcctgagcagcagactgagagtgtccgccaccttctggcagaacccccggaaccacttcagatgccaggtgcagttctacggcctgagcgagaacgacgagtggacccaggacagagccaagcccgtgacccagatcgtgtctgccgaagcctggggcagagccgattgcggatcccagagcttcggcctgctggaccccaagctgtgctacctgctggatggcatcctgttcatctacggcgtgatcctgaccgccctgttcctgagagtgaagttcagcagaagcgccgacgcccctgcctaccagcagggacagaaccaactgtacaacgagctgaacctgggcagacgggaagagtacgacgtgctggacaagcggagaggcagggaccctgagatgggcggaaagccccagcggagaaagaacccccaggaaggactgtataacgaactccagaaagacaagatggccgaagcctacagcgagatcggcatgaagggcgagcggagaagaggcaagggccacgatggcctgtaccagggcctgagcaccgccaccaaggacacctatgacgccctgcacatgcaggccctgcctccaagaagggccaagcgatctggatctggagcaacaaacttctcactactcaaacaagcaggtgacgtggaggagaatcccgggcctactagtatggactggatttggcgcatccttttccttgtcggcgctgctaccggcgcgcattccttcgaacaactccagctgcaagagtctggccctggcctggtcaagcctagcgaaacactgagcctgacctgtaccgtgtctggcggctctatcagctccggcagctatttctggggctggatcagacaacctcctggcaaaggactggaatggatcggctccatctactacagcggcatcacctactacaaccccagcctgaagtccagagtgaccatctccgtggacaccagcaagaaccagttctccctgaagctgagcagcgtgacagccgccgataccgccgtgtattattgtgccagacatgacggcgctgtggccggcctgtttgattattggggacagggcaccctggtcaccgtgtcatctgctacgcgtgagcagaaactgatctcggaagaggatctggggagcggcatccagaaccctgatcctgccgtgtaccagctgcgggatagcaagagcagcgacaagagcgtgtgtctgttcaccgacttcgacagccagaccaacgtgtcccagagcaaggactccgacgtgtacatcaccgataagaccgtgctggacatgcggagcatggacttcaagagcaactccgccgtggcctggtccaacaagtccgatttcgcctgcgccaacgccttcaacaacagcattatccccgaggacacattcttcccaagccccgagagcagctgcggtacccagagttttgggttgttggaccctaaattgtgctatctgttggacggaatcctgttcatttacggagtgatcctgaccgcattgttcctgaagagaggccggaagaagctgctgtacatcttcaagcagcctttcatgcggcccgtgcagaccacccaggaagaggacggctgctcctgccggttccccgaggaagaagaaggcggctgcgagctgcgggttaagttttccagatccgcagacgcacccgcttaccaacaagggcagaaccaactctacaatgaacttaatttggggcggagggaagagtacgacgttctggacaaaaggaggggacgagatcccgagatgggcggaaagcctcagcgaaggaagaatccgcaagaggggctttataacgaactccagaaagataaaatggcagaagcctatagtgagattgggatgaagggagaaaggaggaggggtaaaggtcacgatgggttgtaccaaggattgagcacagccactaaagatacctatgatgcgctccacatgcaggccctgccgccaaga

SEQ ID NO: 8125 - DNA, 2802 bp, Artificial Sequence
  Synthetic Polynucloetide
atggccttaccagtgaccgccttgctcctgccgctggccttgctgctccacgccgccaggccgagctacgtgctgacacagcctccatccgtgtctgtggctccaggacagaccgccagaatcacatgcggcggcaacaacatcggcagcaagaccgtgcactggtatcagcagccacctggacaggctccagtggtggtggtgtacgacgacagcgatagacctagcggcatccccgagagattcagcggcagcaattccggcaataccgccacactgaccatcagcagagtggaagctggcgacgaggccgtgtactactgccaagtgtgggacagcagcagcgatcacgtggtgtttggcggcggaacaaagctgacagtgcttctcgaggggaaaccaattcccaaccctcttctgggactggattcaaccggcagcggcgaggacctgaagaacgtgttcccacctgaggtggccgtgttcgagcctagcgaggccgagatcagccacacccagaaagccaccctcgtgtgcctggctaccggcttctaccccgaccatgtggaactgtcttggtgggtcaacggcaaagaggtgcacagcggcgtgtctaccgacccccagccactgaaagaacagcccgccctgaacgacagccggtactgcctgagcagcagactgagagtgtccgccaccttctggcagaacccccggaaccacttcagatgccaggtgcagttctacggcctgagcgagaacgacgagtggacccaggacagagccaagcccgtgacccagatcgtgtctgccgaagcctggggcagagccgattgcggatcccagagcttcggcctgctggaccccaagctgtgctacctgctggatggcatcctgttcatctacggcgtgatcctgaccgccctgttcctgaaacggggcagaaagaaactcctgtatatattcaaacaaccatttatgagaccagtacaaactactcaagaggaagatggctgtagctgccgatttccagaagaagaagaaggaggatgtgaactgagagtgaagttcagcagaagcgccgacgcccctgcctaccagcagggacagaaccaactgtacaacgagctgaacctgggcagacgggaagagtacgacgtgctggacaagcggagaggcagggaccctgagatgggcggaaagccccagcggagaaagaacccccaggaaggactgtataacgaactccagaaagacaagatggccgaagcctacagcgagatcggcatgaagggcgagcggagaagaggcaagggccacgatggcctgtaccagggcctgagcaccgccaccaaggacacctatgacgccctgcacatgcaggccctgcctccaagaagggccaagcgatctggatctggagcaacaaacttctcactactcaaacaagcaggtgacgtggaggagaatcccgggcctactagtatggactggatttggcgcatccttttccttgtcggcgctgctaccggcgcgcattccttcgaacaactccagctgcaagagtctggccctggcctggtcaagcctagcgaaacactgagcctgacctgtaccgtgtctggcggctctatcagctccggcagctatttctggggctggatcagacaacctcctggcaaaggactggaatggatcggctccatctactacagcggcatcacctactacaaccccagcctgaagtccagagtgaccatctccgtggacaccagcaagaaccagttctccctgaagctgagcagcgtgacagccgccgataccgccgtgtattattgtgccagacatgacggcgctgtggccggcctgtttgattattggggacagggcaccctggtcaccgtgtcatctgctacgcgtgagcagaaactgatctcggaagaggatctggggagcggcatccagaaccctgatcctgccgtgtaccagctgcgggatagcaagagcagcgacaagagcgtgtgtctgttcaccgacttcgacagccagaccaacgtgtcccagagcaaggactccgacgtgtacatcaccgataagaccgtgctggacatgcggagcatggacttcaagagcaactccgccgtggcctggtccaacaagtccgatttcgcctgcgccaacgccttcaacaacagcattatccccgaggacacattcttcccaagccccgagagcagctgcggtacccagagttttgggttgttggaccctaaattgtgctatctgttggacggaatcctgttcatttacggagtgatcctgaccgcattgttcctgaagagaggccggaagaagctgctgtacatcttcaagcagcctttcatgcggcccgtgcagaccacccaggaagaggacggctgctcctgccggttccccgaggaagaagaaggcggctgcgagctgcgggttaagttttccagatccgcagacgcacccgcttaccaacaagggcagaaccaactctacaatgaacttaatttggggcggagggaagagtacgacgttctggacaaaaggaggggacgagatcccgagatgggcggaaagcctcagcgaaggaagaatccgcaagaggggctttataacgaactccagaaagataaaatggcagaagcctatagtgagattgggatgaagggagaaaggaggaggggtaaaggtcacgatgggttgtaccaaggattgagcacagccactaaagatacctatgatgcgctccacatgcaggccctgccgccaaga

SEQ ID NO: 8126 - DNA, 2475 bp, Artificial Sequence
  Synthetic Polynucloetide
atggccttaccagtgaccgccttgctcctgccgctggccttgctgctccacgccgccaggccgagctacgtgctgacacagcctccatccgtgtctgtggctccaggacagaccgccagaatcacatgcggcggcaacaacatcggcagcaagaccgtgcactggtatcagcagccacctggacaggctccagtggtggtggtgtacgacgacagcgatagacctagcggcatccccgagagattcagcggcagcaattccggcaataccgccacactgaccatcagcagagtggaagctggcgacgaggccgtgtactactgccaagtgtgggacagcagcagcgatcacgtggtgtttggcggcggaacaaagctgacagtgcttctcgagcagagcttcggcctgctggaccccaagctgtgctacctgctggatggcatcctgttcatctacggcgtgatcctgaccgccctgttcctgagagtgaagttcagcagaagcgccgacgcccctgcctaccagcagggacagaaccaactgtacaacgagctgaacctgggcagacgggaagagtacgacgtgctggacaagcggagaggcagggaccctgagatgggcggaaagccccagcggagaaagaacccccaggaaggactgtataacgaactccagaaagacaagatggccgaagcctacagcgagatcggcatgaagggcgagcggagaagaggcaagggccacgatggcctgtaccagggcctgagcaccgccaccaaggacacctatgacgccctgcacatgcaggccctgcctccaagaagggccaagcgatctggatctggagcaacaaacttctcactactcaaacaagcaggtgacgtggaggagaatcccgggcctactagtatggactggatttggcgcatccttttccttgtcggcgctgctaccggcgcgcattccttcgaacaactccagctgcaagagtctggccctggcctggtcaagcctagcgaaacactgagcctgacctgtaccgtgtctggcggctctatcagctccggcagctatttctggggctggatcagacaacctcctggcaaaggactggaatggatcggctccatctactacagcggcatcacctactacaaccccagcctgaagtccagagtgaccatctccgtggacaccagcaagaaccagttctccctgaagctgagcagcgtgacagccgccgataccgccgtgtattattgtgccagacatgacggcgctgtggccggcctgtttgattattggggacagggcaccctggtcaccgtgtcatctgctacgcgtcagagttttgggttgttggaccctaaattgtgctatctgttggacggaatcctgttcatttacggagtgatcctgaccgcattgttcctgcgggttaagttttccagatccgcagacgcacccgcttaccaacaagggcagaaccaactctacaatgaacttaatttggggcggagggaagagtacgacgttctggacaaaaggaggggacgagatcccgagatgggcggaaagcctcagcgaaggaagaatccgcaagaggggctttataacgaactccagaaagataaaatggcagaagcctatagtgagattgggatgaagggagaaaggaggaggggtaaaggtcacgatgggttgtaccaaggattgagcacagccactaaagatacctatgatgcgctccacatgcaggccctgccgccaagacgcgccaagagaagcggatctggcgtgaagcagaccctgaatttcgacctgctgaagctggctggcgacgtggaatccaacccaggcccttctagaggccatatgaccgagtacaagcccacggtgcgcctcgccacccgcgacgacgtccccagggccgtacgcaccctcgccgccgcgttcgccgactaccccgccacgcgccacaccgtcgatccggaccgccacatcgagcgggtcaccgagctgcaagaactcttcctcacgcgcgtcgggctcgacatcggcaaggtgtgggtcgcggacgacggcgccgcggtggcggtctggaccacgccggagagcgtcgaagcgggggcggtgttcgccgagatcggcccgcgcatggccgagttgagcggttcccggctggccgcgcagcaacagatggaaggcctcctggcgccgcaccggcccaaggagcccgcgtggttcctggccaccgtcggcgtctcgcccgaccaccagggcaagggtctgggcagcgccgtcgtgctccccggagtggaggcggccgagcgcgccggggtgcccgccttcctggagacctccgcgccccgcaacctccccttctacgagcggctcggcttcaccgtcaccgccgacgtcgaggtgcccgaaggaccgcgcacctggtgcatgacccgcaagcccggtgcctga

SEQ ID NO: 8127 - DNA, 1947 bp, Artificial Sequence
  Synthetic Polynucloetide
atggccttaccagtgaccgccttgctcctgccgctggccttgctgctccacgccgccaggccgagctacgtgctgacacagcctccatccgtgtctgtggctccaggacagaccgccagaatcacatgcggcggcaacaacatcggcagcaagaccgtgcactggtatcagcagccacctggacaggctccagtggtggtggtgtacgacgacagcgatagacctagcggcatccccgagagattcagcggcagcaattccggcaataccgccacactgaccatcagcagagtggaagctggcgacgaggccgtgtactactgccaagtgtgggacagcagcagcgatcacgtggtgtttggcggcggaacaaagctgacagtgcttctcgagggacagcctaaggccaatcctaccgtgacactgttccctccaagcagcgaagaactccaggccaacaaggccacacttgtgtgcctgatctccgacttctaccctggggctgtgacagtggcttggaaggccgatggatctcctgtgaaagccggcgtggaaaccaccaagccatccaagcagagcaacaacaaatacgccgccagctcctacctgagcctgacacctgagcagtggaagtcccacagatcctacagctgccaagtgacccacgaaggcagcaccgtggaaaagacagtggcccctacagagtgcagccccatcaagaccgatgtgattacaatggaccccaaggacaactgctccaaggacgccaacgataccctgctgctccagctgaccaacaccagcgcctactacatgtacttgttgctgctgctgaagtccgtggtgtacttcgccatcatcacatgctgcctgctgcggagaaccgccttctgctgcaacggcgagaagtctagggccaagcgatctggatctggagcaacaaacttctcactactcaaacaagcaggtgacgtggaggagaatcccgggcctactagtatggactggatttggcgcatccttttccttgtcggcgctgctaccggcgcgcattccttcgaacaactccagctgcaagagtctggccctggcctggtcaagcctagcgaaacactgagcctgacctgtaccgtgtctggcggctctatcagctccggcagctatttctggggctggatcagacaacctcctggcaaaggactggaatggatcggctccatctactacagcggcatcacctactacaaccccagcctgaagtccagagtgaccatctccgtggacaccagcaagaaccagttctccctgaagctgagcagcgtgacagccgccgataccgccgtgtattattgtgccagacatgacggcgctgtggccggcctgtttgattattggggacagggcaccctggtcaccgtgtcatctgctacgcgtgcctctacaaagggaccctccgtgtttcctctggctcccagcagcaagtctacaagcggaggaacagccgctctgggctgcctggtcaaggattactttcccgagcctgtgaccgtgtcctggaatagcggagcactgacaagcggcgtgcacacctttccagccgtgctgcaaagcagcggcctgtactctctgagcagcgtggtcacagtgcctagctctagcctgggcacccagacctacatctgcaatgtgaaccacaagcctagcaacaccaaggtggacaagagagtggaacccaagagctgtgaagtgaaaaccgactccaccgaccacgtgaagcccaaagagacagagaacaccaagcagcccagcaagagctgccacaagcccaaggccatcgtgcacaccgagaaagtgaacatgatgagcctgaccgtgctgggcctgcggatgctgttcgccaaaaccgtggccgtgaacttcctgctgaccgccaagctgttcttcctc

SEQ ID NO: 8128 - DNA, 1881 bp, Artificial Sequence
  Synthetic Polynucloetide
atggccttaccagtgaccgccttgctcctgccgctggccttgctgctccacgccgccaggccgagctacgtgctgacacagcctccatccgtgtctgtggctccaggacagaccgccagaatcacatgcggcggcaacaacatcggcagcaagaccgtgcactggtatcagcagccacctggacaggctccagtggtggtggtgtacgacgacagcgatagacctagcggcatccccgagagattcagcggcagcaattccggcaataccgccacactgaccatcagcagagtggaagctggcgacgaggccgtgtactactgccaagtgtgggacagcagcagcgatcacgtggtgtttggcggcggaacaaagctgacagtgcttctcgagggacagcctaaggccaatcctaccgtgacactgttccctccaagcagcgaagaactccaggccaacaaggccacacttgtgtgcctgatctccgacttctaccctggggctgtgacagtggcttggaaggccgatggatctcctgtgaaagccggcgtggaaaccaccaagccatccaagcagagcaacaacaaatacgccgccagctcctacctgagcctgacacctgagcagtggaagtcccacagatcctacagctgccaagtgacccacgaaggcagcaccgtggaaaagacagtggcccctacagagtgcagcggcagagccgattgcggcatcaccagcgccagctaccaccagggcgtgctgagcgccaccatcctgtacgagatcctgctgggcaaggccaccctgtacgccgtgctggtgtctgccctggtgctgatggctatggtcaagcggaaggacagccggggaagggccaagcgatctggatctggagcaacaaacttctcactactcaaacaagcaggtgacgtggaggagaatcccgggcctactagtatggactggatttggcgcatccttttccttgtcggcgctgctaccggcgcgcattccttcgaacaactccagctgcaagagtctggccctggcctggtcaagcctagcgaaacactgagcctgacctgtaccgtgtctggcggctctatcagctccggcagctatttctggggctggatcagacaacctcctggcaaaggactggaatggatcggctccatctactacagcggcatcacctactacaaccccagcctgaagtccagagtgaccatctccgtggacaccagcaagaaccagttctccctgaagctgagcagcgtgacagccgccgataccgccgtgtattattgtgccagacatgacggcgctgtggccggcctgtttgattattggggacagggcaccctggtcaccgtgtcatctgctacgcgtgcctctacaaagggaccctccgtgtttcctctggctcccagcagcaagtctacaagcggaggaacagccgctctgggctgcctggtcaaggattactttcccgagcctgtgaccgtgtcctggaatagcggagcactgacaagcggcgtgcacacctttccagccgtgctgcaaagcagcggcctgtactctctgagcagcgtggtcacagtgcctagctctagcctgggcacccagacctacatctgcaatgtgaaccacaagcctagcaacaccaaggtggacaagagagtggaacccaagagctgtatccccgaggacacattcttcccaagcagcgacgtgccctgcgacgtgaagctggtggaaaagagcttcgagacagacaccaacctgaacttccagaacctgagcgtgatcggcttcagaatcctgctgctgaaagtggccggctttaacctgctgatgaccctgcggctgtggtccagc

SEQ ID NO: 8129 - DNA, 1881 bp, Artificial Sequence
  Synthetic Polynucloetide
atggccttaccagtgaccgccttgctcctgccgctggccttgctgctccacgccgccaggccgagctacgtgctgacacagcctccatccgtgtctgtggctccaggacagaccgccagaatcacatgcggcggcaacaacatcggcagcaagaccgtgcactggtatcagcagccacctggacaggctccagtggtggtggtgtacgacgacagcgatagacctagcggcatccccgagagattcagcggcagcaattccggcaataccgccacactgaccatcagcagagtggaagctggcgacgaggccgtgtactactgccaagtgtgggacagcagcagcgatcacgtggtgtttggcggcggaacaaagctgacagtgcttctcgagggacagcctaaggccaatcctaccgtgacactgttccctccaagcagcgaagaactccaggccaacaaggccacacttgtgtgcctgatctccgacttctaccctggggctgtgacagtggcttggaaggccgatggatctcctgtgaaagccggcgtggaaaccaccaagccatccaagcagagcaacaacaaatacgccgccagctcctacctgagcctgacacctgagcagtggaagtcccacagatcctacagctgccaagtgacccacgaaggcagcaccgtggaaaagacagtggcccctacagagtgcagcggcagagccgattgcggctttaccagcgagagctaccagcagggcgtgctgagcgccaccatcctgtacgagatcctgctgggcaaggccaccctgtacgccgtgctggtgtctgccctggtgctgatggctatggtcaagcggaaggacagccggggaagggccaagcgatctggatctggagcaacaaacttctcactactcaaacaagcaggtgacgtggaggagaatcccgggcctactagtatggactggatttggcgcatccttttccttgtcggcgctgctaccggcgcgcattccttcgaacaactccagctgcaagagtctggccctggcctggtcaagcctagcgaaacactgagcctgacctgtaccgtgtctggcggctctatcagctccggcagctatttctggggctggatcagacaacctcctggcaaaggactggaatggatcggctccatctactacagcggcatcacctactacaaccccagcctgaagtccagagtgaccatctccgtggacaccagcaagaaccagttctccctgaagctgagcagcgtgacagccgccgataccgccgtgtattattgtgccagacatgacggcgctgtggccggcctgtttgattattggggacagggcaccctggtcaccgtgtcatctgctacgcgtgcctctacaaagggaccctccgtgtttcctctggctcccagcagcaagtctacaagcggaggaacagccgctctgggctgcctggtcaaggattactttcccgagcctgtgaccgtgtcctggaatagcggagcactgacaagcggcgtgcacacctttccagccgtgctgcaaagcagcggcctgtactctctgagcagcgtggtcacagtgcctagctctagcctgggcacccagacctacatctgcaatgtgaaccacaagcctagcaacaccaaggtggacaagagagtggaacccaagagctgtatccccgaggacacattcttcccaagccccgagagcagctgcgacgtgaagctggtggaaaagagcttcgagacagacaccaacctgaacttccagaacctgagcgtgatcggcttcagaatcctgctgctgaaagtggccggctttaacctgctgatgaccctgcggctgtggtccagc

SEQ ID NO: 8130 - DNA, 1359 bp, Artificial Sequence
  Synthetic Polynucloetide
atggccttaccagtgaccgccttgctcctgccgctggccttgctgctccacgccgccaggccgagctacgtgctgacacagcctccatccgtgtctgtggctccaggacagaccgccagaatcacatgcggcggcaacaacatcggcagcaagaccgtgcactggtatcagcagccacctggacaggctccagtggtggtggtgtacgacgacagcgatagacctagcggcatccccgagagattcagcggcagcaattccggcaataccgccacactgaccatcagcagagtggaagctggcgacgaggccgtgtactactgccaagtgtgggacagcagcagcgatcacgtggtgtttggcggcggaacaaagctgacagtgcttggcggaggcggaagtggaggcggaggatctggcggcggaggctctcaactccagctgcaagagtctggccctggcctggtcaagcctagcgaaacactgagcctgacctgtaccgtgtctggcggctctatcagctccggcagctatttctggggctggatcagacaacctcctggcaaaggactggaatggatcggctccatctactacagcggcatcacctactacaaccccagcctgaagtccagagtgaccatctccgtggacaccagcaagaaccagttctccctgaagctgagcagcgtgacagccgccgataccgccgtgtattattgtgccagacatgacggcgctgtggccggcctgtttgattattggggacagggcaccctggtcaccgtgtcatctgctacgcgtgacggtaacgaggagatgggaggaatcactcaaaccccttacaaagtctcaatttcaggaacaactgttatccttacatgtccccagtatcctggcagcgagatcctttggcagcataacgacaagaatatagggggagatgaagacgataagaatatcggatctgacgaggatcacttgagcctgaaagagttctccgagcttgaacaaagcggatattatgtgtgctatccgcgcgggtcaaagccggaagacgctaacttttacctttatctccgagccagagtgtgcgaaaattgcatggaaatggacgttatgtccgttgctacaatagttatcgtagatatatgcatcacgggtggactgcttctgctggtttattattggtccaagaatagaaaggccaaagctaaacccgtgaccagaggcgctggcgcaggcggaaggcaaaggggacaaaacaaagaacggccaccaccagtgccaaatccagattatgagcctattcggaaaggacagagggacctgtactctggcctgaatcagagaagaatc

SEQ ID NO: 8131 - DNA, 1254 bp, Artificial Sequence
  Synthetic Polynucloetide
atggccttaccagtgaccgccttgctcctgccgctggccttgctgctccacgccgccaggccgagctacgtgctgacacagcctccatccgtgtctgtggctccaggacagaccgccagaatcacatgcggcggcaacaacatcggcagcaagaccgtgcactggtatcagcagccacctggacaggctccagtggtggtggtgtacgacgacagcgatagacctagcggcatccccgagagattcagcggcagcaattccggcaataccgccacactgaccatcagcagagtggaagctggcgacgaggccgtgtactactgccaagtgtgggacagcagcagcgatcacgtggtgtttggcggcggaacaaagctgacagtgcttggcggaggcggaagtggaggcggaggatctggcggcggaggctctcaactccagctgcaagagtctggccctggcctggtcaagcctagcgaaacactgagcctgacctgtaccgtgtctggcggctctatcagctccggcagctatttctggggctggatcagacaacctcctggcaaaggactggaatggatcggctccatctactacagcggcatcacctactacaaccccagcctgaagtccagagtgaccatctccgtggacaccagcaagaaccagttctccctgaagctgagcagcgtgacagccgccgataccgccgtgtattattgtgccagacatgacggcgctgtggccggcctgtttgattattggggacagggcaccctggtcaccgtgtcatctgctacgcgtttcaagatccccatcgaggaactggaagatcgggtgttcgtgaactgcaacacctctatcacctgggtggaaggcaccgtgggaacactgctgagcgacatcaccagactggacctcggcaagcggattctggaccctcggggcatctacagatgcaacggcaccgacatctacaaggacaaagaaagcaccgtgcaggtccactacagaatgtgccagtcctgcgtggaactggaccctgctacagtggccggcatcatcgtgaccgatgtgatcgctactctgctgctggctctgggagtgttctgcttcgccggacacgaaacaggcagactgtctggcgctgccgatacacaggccctgctgagaaacgaccaagtgtatcagcccctgcgcgacagagatgatgcccagtattctcacctcggcggcaactgggctagaaacaag

SEQ ID NO: 8132 - DNA, 1284 bp, Artificial Sequence
  Synthetic Polynucloetide
atggccttaccagtgaccgccttgctcctgccgctggccttgctgctccacgccgccaggccgagctacgtgctgacacagcctccatccgtgtctgtggctccaggacagaccgccagaatcacatgcggcggcaacaacatcggcagcaagaccgtgcactggtatcagcagccacctggacaggctccagtggtggtggtgtacgacgacagcgatagacctagcggcatccccgagagattcagcggcagcaattccggcaataccgccacactgaccatcagcagagtggaagctggcgacgaggccgtgtactactgccaagtgtgggacagcagcagcgatcacgtggtgtttggcggcggaacaaagctgacagtgcttggcggaggcggaagtggaggcggaggatctggcggcggaggctctcaactccagctgcaagagtctggccctggcctggtcaagcctagcgaaacactgagcctgacctgtaccgtgtctggcggctctatcagctccggcagctatttctggggctggatcagacaacctcctggcaaaggactggaatggatcggctccatctactacagcggcatcacctactacaaccccagcctgaagtccagagtgaccatctccgtggacaccagcaagaaccagttctccctgaagctgagcagcgtgacagccgccgataccgccgtgtattattgtgccagacatgacggcgctgtggccggcctgtttgattattggggacagggcaccctggtcaccgtgtcatctgctacgcgtcagagcatcaagggcaaccacctggtcaaggtgtacgactaccaagaggacggcagcgtgctgctgacatgtgatgccgaggccaagaacatcacctggtttaaggacggcaagatgatcggcttcctgaccgaggacaagaagaagtggaacctgggcagcaacgctaaggaccccagaggcatgtatcagtgcaagggcagccagaacaagagcaagcccctccaggtgtactaccggatgtgccagaactgcatcgagctgaacgccgctaccatcagcggctttctgttcgccgagatcgtgtccatcttcgtgctggccgtgggcgtgtactttatcgctggacaggatggcgtgcggcagagcagagcttccgataagcaaaccctgctgcctaacgaccagctgtaccagcctctgaaggacagagaggacgaccagtacagccacctccagggcaatcagctgagaagaaac

SEQ ID NO: 8133 - DNA, 1233 bp, Artificial Sequence
  Synthetic Polynucloetide
atggccttaccagtgaccgccttgctcctgccgctggccttgctgctccacgccgccaggccgagctacgtgctgacacagcctccatccgtgtctgtggctccaggacagaccgccagaatcacatgcggcggcaacaacatcggcagcaagaccgtgcactggtatcagcagccacctggacaggctccagtggtggtggtgtacgacgacagcgatagacctagcggcatccccgagagattcagcggcagcaattccggcaataccgccacactgaccatcagcagagtggaagctggcgacgaggccgtgtactactgccaagtgtgggacagcagcagcgatcacgtggtgtttggcggcggaacaaagctgacagtgcttggcggaggcggaagtggaggcggaggatctggcggcggaggctctcaactccagctgcaagagtctggccctggcctggtcaagcctagcgaaacactgagcctgacctgtaccgtgtctggcggctctatcagctccggcagctatttctggggctggatcagacaacctcctggcaaaggactggaatggatcggctccatctactacagcggcatcacctactacaaccccagcctgaagtccagagtgaccatctccgtggacaccagcaagaaccagttctccctgaagctgagcagcgtgacagccgccgataccgccgtgtattattgtgccagacatgacggcgctgtggccggcctgtttgattattggggacagggcaccctggtcaccgtgtcatctgctacgcgtcagagttttgggttgttggaccctaaattgtgctatctgttggacggaatcctgttcatttacggagtgatcctgaccgcattgttcctgcgggttaagttttccagatccgcagacgcacccgcttaccaacaagggcagaaccaactctacaatgaacttaatttggggcggagggaagagtacgacgttctggacaaaaggaggggacgagatcccgagatgggcggaaagcctcagcgaaggaagaatccgcaagaggggctttataacgaactccagaaagataaaatggcagaagcctatagtgagattgggatgaagggagaaaggaggaggggtaaaggtcacgatgggttgtaccaaggattgagcacagccactaaagatacctatgatgcgctccacatgcaggccctgccgccaaga

SEQ ID NO: 8134 - DNA, 1359 bp, Artificial Sequence
  Synthetic Polynucloetide
atggccttaccagtgaccgccttgctcctgccgctggccttgctgctccacgccgccaggccgcaactccagctgcaagagtctggccctggcctggtcaagcctagcgaaacactgagcctgacctgtaccgtgtctggcggctctatcagctccggcagctatttctggggctggatcagacaacctcctggcaaaggactggaatggatcggctccatctactacagcggcatcacctactacaaccccagcctgaagtccagagtgaccatctccgtggacaccagcaagaaccagttctccctgaagctgagcagcgtgacagccgccgataccgccgtgtattattgtgccagacatgacggcgctgtggccggcctgtttgattattggggacagggcaccctggtcaccgtgtcatctgctggcggaggcggaagtggaggcggaggatctggcggcggaggctctagctacgtgctgacacagcctccatccgtgtctgtggctccaggacagaccgccagaatcacatgcggcggcaacaacatcggcagcaagaccgtgcactggtatcagcagccacctggacaggctccagtggtggtggtgtacgacgacagcgatagacctagcggcatccccgagagattcagcggcagcaattccggcaataccgccacactgaccatcagcagagtggaagctggcgacgaggccgtgtactactgccaagtgtgggacagcagcagcgatcacgtggtgtttggcggcggaacaaagctgacagtgcttacgcgtgacggtaacgaggagatgggaggaatcactcaaaccccttacaaagtctcaatttcaggaacaactgttatccttacatgtccccagtatcctggcagcgagatcctttggcagcataacgacaagaatatagggggagatgaagacgataagaatatcggatctgacgaggatcacttgagcctgaaagagttctccgagcttgaacaaagcggatattatgtgtgctatccgcgcgggtcaaagccggaagacgctaacttttacctttatctccgagccagagtgtgcgaaaattgcatggaaatggacgttatgtccgttgctacaatagttatcgtagatatatgcatcacgggtggactgcttctgctggtttattattggtccaagaatagaaaggccaaagctaaacccgtgaccagaggcgctggcgcaggcggaaggcaaaggggacaaaacaaagaacggccaccaccagtgccaaatccagattatgagcctattcggaaaggacagagggacctgtactctggcctgaatcagagaagaatc

SEQ ID NO: 8135 - DNA, 1254 bp, Artificial Sequence
  Synthetic Polynucloetide
atggccttaccagtgaccgccttgctcctgccgctggccttgctgctccacgccgccaggccgcaactccagctgcaagagtctggccctggcctggtcaagcctagcgaaacactgagcctgacctgtaccgtgtctggcggctctatcagctccggcagctatttctggggctggatcagacaacctcctggcaaaggactggaatggatcggctccatctactacagcggcatcacctactacaaccccagcctgaagtccagagtgaccatctccgtggacaccagcaagaaccagttctccctgaagctgagcagcgtgacagccgccgataccgccgtgtattattgtgccagacatgacggcgctgtggccggcctgtttgattattggggacagggcaccctggtcaccgtgtcatctgctggcggaggcggaagtggaggcggaggatctggcggcggaggctctagctacgtgctgacacagcctccatccgtgtctgtggctccaggacagaccgccagaatcacatgcggcggcaacaacatcggcagcaagaccgtgcactggtatcagcagccacctggacaggctccagtggtggtggtgtacgacgacagcgatagacctagcggcatccccgagagattcagcggcagcaattccggcaataccgccacactgaccatcagcagagtggaagctggcgacgaggccgtgtactactgccaagtgtgggacagcagcagcgatcacgtggtgtttggcggcggaacaaagctgacagtgcttacgcgtttcaagatccccatcgaggaactggaagatcgggtgttcgtgaactgcaacacctctatcacctgggtggaaggcaccgtgggaacactgctgagcgacatcaccagactggacctcggcaagcggattctggaccctcggggcatctacagatgcaacggcaccgacatctacaaggacaaagaaagcaccgtgcaggtccactacagaatgtgccagtcctgcgtggaactggaccctgctacagtggccggcatcatcgtgaccgatgtgatcgctactctgctgctggctctgggagtgttctgcttcgccggacacgaaacaggcagactgtctggcgctgccgatacacaggccctgctgagaaacgaccaagtgtatcagcccctgcgcgacagagatgatgcccagtattctcacctcggcggcaactgggctagaaacaag

SEQ ID NO: 8136 - DNA, 1284 bp, Artificial Sequence
  Synthetic Polynucloetide
atggccttaccagtgaccgccttgctcctgccgctggccttgctgctccacgccgccaggccgcaactccagctgcaagagtctggccctggcctggtcaagcctagcgaaacactgagcctgacctgtaccgtgtctggcggctctatcagctccggcagctatttctggggctggatcagacaacctcctggcaaaggactggaatggatcggctccatctactacagcggcatcacctactacaaccccagcctgaagtccagagtgaccatctccgtggacaccagcaagaaccagttctccctgaagctgagcagcgtgacagccgccgataccgccgtgtattattgtgccagacatgacggcgctgtggccggcctgtttgattattggggacagggcaccctggtcaccgtgtcatctgctggcggaggcggaagtggaggcggaggatctggcggcggaggctctagctacgtgctgacacagcctccatccgtgtctgtggctccaggacagaccgccagaatcacatgcggcggcaacaacatcggcagcaagaccgtgcactggtatcagcagccacctggacaggctccagtggtggtggtgtacgacgacagcgatagacctagcggcatccccgagagattcagcggcagcaattccggcaataccgccacactgaccatcagcagagtggaagctggcgacgaggccgtgtactactgccaagtgtgggacagcagcagcgatcacgtggtgtttggcggcggaacaaagctgacagtgcttacgcgtcagagcatcaagggcaaccacctggtcaaggtgtacgactaccaagaggacggcagcgtgctgctgacatgtgatgccgaggccaagaacatcacctggtttaaggacggcaagatgatcggcttcctgaccgaggacaagaagaagtggaacctgggcagcaacgctaaggaccccagaggcatgtatcagtgcaagggcagccagaacaagagcaagcccctccaggtgtactaccggatgtgccagaactgcatcgagctgaacgccgctaccatcagcggctttctgttcgccgagatcgtgtccatcttcgtgctggccgtgggcgtgtactttatcgctggacaggatggcgtgcggcagagcagagcttccgataagcaaaccctgctgcctaacgaccagctgtaccagcctctgaaggacagagaggacgaccagtacagccacctccagggcaatcagctgagaagaaac

SEQ ID NO: 8137 - DNA, 1233 bp, Artificial Sequence
  Synthetic Polynucloetide
atggccttaccagtgaccgccttgctcctgccgctggccttgctgctccacgccgccaggccgcaactccagctgcaagagtctggccctggcctggtcaagcctagcgaaacactgagcctgacctgtaccgtgtctggcggctctatcagctccggcagctatttctggggctggatcagacaacctcctggcaaaggactggaatggatcggctccatctactacagcggcatcacctactacaaccccagcctgaagtccagagtgaccatctccgtggacaccagcaagaaccagttctccctgaagctgagcagcgtgacagccgccgataccgccgtgtattattgtgccagacatgacggcgctgtggccggcctgtttgattattggggacagggcaccctggtcaccgtgtcatctgctggcggaggcggaagtggaggcggaggatctggcggcggaggctctagctacgtgctgacacagcctccatccgtgtctgtggctccaggacagaccgccagaatcacatgcggcggcaacaacatcggcagcaagaccgtgcactggtatcagcagccacctggacaggctccagtggtggtggtgtacgacgacagcgatagacctagcggcatccccgagagattcagcggcagcaattccggcaataccgccacactgaccatcagcagagtggaagctggcgacgaggccgtgtactactgccaagtgtgggacagcagcagcgatcacgtggtgtttggcggcggaacaaagctgacagtgcttacgcgtcagagttttgggttgttggaccctaaattgtgctatctgttggacggaatcctgttcatttacggagtgatcctgaccgcattgttcctgcgggttaagttttccagatccgcagacgcacccgcttaccaacaagggcagaaccaactctacaatgaacttaatttggggcggagggaagagtacgacgttctggacaaaaggaggggacgagatcccgagatgggcggaaagcctcagcgaaggaagaatccgcaagaggggctttataacgaactccagaaagataaaatggcagaagcctatagtgagattgggatgaagggagaaaggaggaggggtaaaggtcacgatgggttgtaccaaggattgagcacagccactaaagatacctatgatgcgctccacatgcaggccctgccgccaaga

SEQ ID NO: 8138 - DNA, 1935 bp, Artificial Sequence
  Synthetic Polynucloetide
atggccttaccagtgaccgccttgctcctgccgctggccttgctgctccacgccgccaggccgagctacgtgctgacacagcctccatccgtgtctgtggctccaggacagaccgccagaatcacatgcggcggcaacaacatcggcagcaagaccgtgcactggtatcagcagccacctggacaggctccagtggtggtggtgtacgacgacagcgatagacctagcggcatccccgagagattcagcggcagcaattccggcaataccgccacactgaccatcagcagagtggaagctggcgacgaggccgtgtactactgccaagtgtgggacagcagcagcgatcacgtggtgtttggcggcggaacaaagctgacagtgcttggcggaggcggaagtggaggcggaggatctggcggcggaggctctcaactccagctgcaagagtctggccctggcctggtcaagcctagcgaaacactgagcctgacctgtaccgtgtctggcggctctatcagctccggcagctatttctggggctggatcagacaacctcctggcaaaggactggaatggatcggctccatctactacagcggcatcacctactacaaccccagcctgaagtccagagtgaccatctccgtggacaccagcaagaaccagttctccctgaagctgagcagcgtgacagccgccgataccgccgtgtattattgtgccagacatgacggcgctgtggccggcctgtttgattattggggacagggcaccctggtcaccgtgtcatctgctacgcgtgggagcggcatccagaaccctgatcctgccgtgtaccagctgcgggatagcaagagcagcgacaagagcgtgtgtctgttcaccgacttcgacagccagaccaacgtgtcccagagcaaggactccgacgtgtacatcaccgataagaccgtgctggacatgcggagcatggacttcaagagcaactccgccgtggcctggtccaacaagtccgatttcgcctgcgccaacgccttcaacaacagcattatccccgaggacacattcttcccaagccccgagagcagctgcgacgtgaagctggtggaaaagagcttcgagacagacaccaacctgaacttccagaacctgagcgtgatcggcttcagaatcctgctgctgaaagtggccggctttaacctgctgatgaccctgcggctgtggtccagccgcgccaagagaagcggatctggcgtgaagcagaccctgaatttcgacctgctgaagctggctggcgacgtggaatccaacccaggcccttctagaggccatatgaccgagtacaagcccacggtgcgcctcgccacccgcgacgacgtccccagggccgtacgcaccctcgccgccgcgttcgccgactaccccgccacgcgccacaccgtcgatccggaccgccacatcgagcgggtcaccgagctgcaagaactcttcctcacgcgcgtcgggctcgacatcggcaaggtgtgggtcgcggacgacggcgccgcggtggcggtctggaccacgccggagagcgtcgaagcgggggcggtgttcgccgagatcggcccgcgcatggccgagttgagcggttcccggctggccgcgcagcaacagatggaaggcctcctggcgccgcaccggcccaaggagcccgcgtggttcctggccaccgtcggcgtctcgcccgaccaccagggcaagggtctgggcagcgccgtcgtgctccccggagtggaggcggccgagcgcgccggggtgcccgccttcctggagacctccgcgccccgcaacctccccttctacgagcggctcggcttcaccgtcaccgccgacgtcgaggtgcccgaaggaccgcgcacctggtgcatgacccgcaagcccggtgcctga

SEQ ID NO: 8139 - DNA, 2031 bp, Artificial Sequence
  Synthetic Polynucloetide
atggccttaccagtgaccgccttgctcctgccgctggccttgctgctccacgccgccaggccgagctacgtgctgacacagcctccatccgtgtctgtggctccaggacagaccgccagaatcacatgcggcggcaacaacatcggcagcaagaccgtgcactggtatcagcagccacctggacaggctccagtggtggtggtgtacgacgacagcgatagacctagcggcatccccgagagattcagcggcagcaattccggcaataccgccacactgaccatcagcagagtggaagctggcgacgaggccgtgtactactgccaagtgtgggacagcagcagcgatcacgtggtgtttggcggcggaacaaagctgacagtgcttggcggaggcggaagtggaggcggaggatctggcggcggaggctctcaactccagctgcaagagtctggccctggcctggtcaagcctagcgaaacactgagcctgacctgtaccgtgtctggcggctctatcagctccggcagctatttctggggctggatcagacaacctcctggcaaaggactggaatggatcggctccatctactacagcggcatcacctactacaaccccagcctgaagtccagagtgaccatctccgtggacaccagcaagaaccagttctccctgaagctgagcagcgtgacagccgccgataccgccgtgtattattgtgccagacatgacggcgctgtggccggcctgtttgattattggggacagggcaccctggtcaccgtgtcatctgctctcgaggacctgaagaacgtgttcccacctgaggtggccgtgttcgagcctagcgaggccgagatcagccacacccagaaagccaccctcgtgtgcctggctaccggcttctaccccgaccatgtggaactgtcttggtgggtcaacggcaaagaggtgcacagcggcgtgtctaccgacccccagccactgaaagaacagcccgccctgaacgacagccggtactgcctgagcagcagactgagagtgtccgccaccttctggcagaacccccggaaccacttcagatgccaggtgcagttctacggcctgagcgagaacgacgagtggacccaggacagagccaagcccgtgacccagatcgtgtctgccgaagcctggggcagagccgattgcggctttaccagcgagagctaccagcagggcgtgctgagcgccaccatcctgtacgagatcctgctgggcaaggccaccctgtacgccgtgctggtgtctgccctggtgctgatggctatggtcaagcggaaggacagccggggaagggccaagcgatctggatctggagcaacaaacttctcactactcaaacaagcaggtgacgtggaggagaatcccgggcctactagaggccatatgaccgagtacaagcccacggtgcgcctcgccacccgcgacgacgtccccagggccgtacgcaccctcgccgccgcgttcgccgactaccccgccacgcgccacaccgtcgatccggaccgccacatcgagcgggtcaccgagctgcaagaactcttcctcacgcgcgtcgggctcgacatcggcaaggtgtgggtcgcggacgacggcgccgcggtggcggtctggaccacgccggagagcgtcgaagcgggggcggtgttcgccgagatcggcccgcgcatggccgagttgagcggttcccggctggccgcgcagcaacagatggaaggcctcctggcgccgcaccggcccaaggagcccgcgtggttcctggccaccgtcggcgtctcgcccgaccaccagggcaagggtctgggcagcgccgtcgtgctccccggagtggaggcggccgagcgcgccggggtgcccgccttcctggagacctccgcgccccgcaacctccccttctacgagcggctcggcttcaccgtcaccgccgacgtcgaggtgcccgaaggaccgcgcacctggtgcatgacccgcaagcccggtgcctga

SEQ ID NO: 8140 - DNA, 2181 bp, Artificial Sequence
  Synthetic Polynucloetide
atggccttaccagtgaccgccttgctcctgccgctggccttgctgctccacgccgccaggccgagctacgtgctgacacagcctccatccgtgtctgtggctccaggacagaccgccagaatcacatgcggcggcaacaacatcggcagcaagaccgtgcactggtatcagcagccacctggacaggctccagtggtggtggtgtacgacgacagcgatagacctagcggcatccccgagagattcagcggcagcaattccggcaataccgccacactgaccatcagcagagtggaagctggcgacgaggccgtgtactactgccaagtgtgggacagcagcagcgatcacgtggtgtttggcggcggaacaaagctgacagtgcttggcggaggcggaagtggaggcggaggatctggcggcggaggctctcaactccagctgcaagagtctggccctggcctggtcaagcctagcgaaacactgagcctgacctgtaccgtgtctggcggctctatcagctccggcagctatttctggggctggatcagacaacctcctggcaaaggactggaatggatcggctccatctactacagcggcatcacctactacaaccccagcctgaagtccagagtgaccatctccgtggacaccagcaagaaccagttctccctgaagctgagcagcgtgacagccgccgataccgccgtgtattattgtgccagacatgacggcgctgtggccggcctgtttgattattggggacagggcaccctggtcaccgtgtcatctgctacgcgtgagcagaaactgatctcggaagaggatctggggagcggcaccccattcccttctctggcccctcccatcatgctgctggtggacggcaagcagcagatggtggtcgtgtgcctggtgctggatgtggccccacctggactggacagccccatctggtttagcgccggcaatggctctgccctggacgcctttacctacggcccaagccctgccaccgatggcacctggacaaatctggcccacctgagcctgcccagcgaggaactggcttcttgggagcctctcgtgtgccacacaggacctggcgctgagggacacagcagatccacccagcctatgcacctgtctggcgaggccagcaccgccagaacctgtcctcaggaacctctgagaggcacccctggcggagcactgtggctgggagtgctgagactgctgctgttcaagctgctgctgtttgacctgctgctgacctgctcctgtctgtgcgatcctgccggccctctgccttctcctgccaccaccacaagactgagagccctgggcagccacagactgcaccctgccacagagacaggcggcagagaggccacaagcagccctagaccccagcccagagacagaagatggggcgataccccccctggcagaaagcctggatctccagtccgcgccaagagaagcggatctggcgtgaagcagaccctgaatttcgacctgctgaagctggctggcgacgtggaatccaacccaggcccttctagatctagaggccatatgaccgagtacaagcccacggtgcgcctcgccacccgcgacgacgtccccagggccgtacgcaccctcgccgccgcgttcgccgactaccccgccacgcgccacaccgtcgatccggaccgccacatcgagcgggtcaccgagctgcaagaactcttcctcacgcgcgtcgggctcgacatcggcaaggtgtgggtcgcggacgacggcgccgcggtggcggtctggaccacgccggagagcgtcgaagcgggggcggtgttcgccgagatcggcccgcgcatggccgagttgagcggttcccggctggccgcgcagcaacagatggaaggcctcctggcgccgcaccggcccaaggagcccgcgtggttcctggccaccgtcggcgtctcgcccgaccaccagggcaagggtctgggcagcgccgtcgtgctccccggagtggaggcggccgagcgcgccggggtgcccgccttcctggagacctccgcgccccgcaacctccccttctacgagcggctcggcttcaccgtcaccgccgacgtcgaggtgcccgaaggaccgcgcacctggtgcatgacccgcaagcccggtgcctga

SEQ ID NO: 8141 - DNA, 1620 bp, Artificial Sequence
  Synthetic Polynucloetide
atggccttaccagtgaccgccttgctcctgccgctggccttgctgctccacgccgccaggccgagctacgtgctgacacagcctccatccgtgtctgtggctccaggacagaccgccagaatcacatgcggcggcaacaacatcggcagcaagaccgtgcactggtatcagcagccacctggacaggctccagtggtggtggtgtacgacgacagcgatagacctagcggcatccccgagagattcagcggcagcaattccggcaataccgccacactgaccatcagcagagtggaagctggcgacgaggccgtgtactactgccaagtgtgggacagcagcagcgatcacgtggtgtttggcggcggaacaaagctgacagtgcttctcgaggacctgaagaacgtgttcccacctgaggtggccgtgttcgagcctagcgaggccgagatcagccacacccagaaagccaccctcgtgtgcctggctaccggcttctaccccgaccatgtggaactgtcttggtgggtcaacggcaaagaggtgcacagcggcgtgtctaccgacccccagccactgaaagaacagcccgccctgaacgacagccggtactgcctgagcagcagactgagagtgtccgccaccttctggcagaacccccggaaccacttcagatgccaggtgcagttctacggcctgagcgagaacgacgagtggacccaggacagagccaagcccgtgacccagatcgtgtctgccgaagcctggggcagagccgattgcggctttaccagcgagagctaccagcagggcgtgctgagcgccaccatcctgtacgagatcctgctgggcaaggccaccctgtacgccgtgctggtgtctgccctggtgctgatggctatggtcaagcggaaggacagccggggaagggccaagcgatctggatctggagcaacaaacttctcactactcaaacaagcaggtgacgtggaggagaatcccgggcctactagaggccatatgaccgagtacaagcccacggtgcgcctcgccacccgcgacgacgtccccagggccgtacgcaccctcgccgccgcgttcgccgactaccccgccacgcgccacaccgtcgatccggaccgccacatcgagcgggtcaccgagctgcaagaactcttcctcacgcgcgtcgggctcgacatcggcaaggtgtgggtcgcggacgacggcgccgcggtggcggtctggaccacgccggagagcgtcgaagcgggggcggtgttcgccgagatcggcccgcgcatggccgagttgagcggttcccggctggccgcgcagcaacagatggaaggcctcctggcgccgcaccggcccaaggagcccgcgtggttcctggccaccgtcggcgtctcgcccgaccaccagggcaagggtctgggcagcgccgtcgtgctccccggagtggaggcggccgagcgcgccggggtgcccgccttcctggagacctccgcgccccgcaacctccccttctacgagcggctcggcttcaccgtcaccgccgacgtcgaggtgcccgaaggaccgcgcacctggtgcatgacccgcaagcccggtgcctga

SEQ ID NO: 8142 - DNA, 927 bp, Artificial Sequence
  Synthetic Polynucloetide
atggccttaccagtgaccgccttgctcctgccgctggccttgctgctccacgccgccaggccgagctacgtgctgacacagcctccatccgtgtctgtggctccaggacagaccgccagaatcacatgcggcggcaacaacatcggcagcaagaccgtgcactggtatcagcagccacctggacaggctccagtggtggtggtgtacgacgacagcgatagacctagcggcatccccgagagattcagcggcagcaattccggcaataccgccacactgaccatcagcagagtggaagctggcgacgaggccgtgtactactgccaagtgtgggacagcagcagcgatcacgtggtgtttggcggcggaacaaagctgacagtgcttctcgaggacctgaagaacgtgttcccacctgaggtggccgtgttcgagcctagcgaggccgagatcagccacacccagaaagccaccctcgtgtgcctggctaccggcttctaccccgaccatgtggaactgtcttggtgggtcaacggcaaagaggtgcacagcggcgtgtctaccgacccccagccactgaaagaacagcccgccctgaacgacagccggtactgcctgagcagcagactgagagtgtccgccaccttctggcagaacccccggaaccacttcagatgccaggtgcagttctacggcctgagcgagaacgacgagtggacccaggacagagccaagcccgtgacccagatcgtgtctgccgaagcctggggcagagccgattgcggctttaccagcgagagctaccagcagggcgtgctgagcgccaccatcctgtacgagatcctgctgggcaaggccaccctgtacgccgtgctggtgtctgccctggtgctgatggctatggtcaagcggaaggacagccgggga

SEQ ID NO: 8143 - DNA, 1356 bp, Artificial Sequence; identical to SEQ ID NO: 7936
  Synthetic Polynucloetide

SEQ ID NO: 8144 - DNA, 855 bp, Artificial Sequence; identical to SEQ ID NO: 7937
  Synthetic Polynucloetide

SEQ ID NO: 8145 - DNA, 1674 bp, Artificial Sequence
  Synthetic Polynucloetide
atggccttaccagtgaccgccttgctcctgccgctggccttgctgctccacgccgccaggccgagctacgtgctgacacagcctccatccgtgtctgtggctccaggacagaccgccagaatcacatgcggcggcaacaacatcggcagcaagaccgtgcactggtatcagcagccacctggacaggctccagtggtggtggtgtacgacgacagcgatagacctagcggcatccccgagagattcagcggcagcaattccggcaataccgccacactgaccatcagcagagtggaagctggcgacgaggccgtgtactactgccaagtgtgggacagcagcagcgatcacgtggtgtttggcggcggaacaaagctgacagtgcttctcgaggggaaaccaattcccaaccctcttctgggactggattcaaccggcagcggcgaggacctgaagaacgtgttcccacctgaggtggccgtgttcgagcctagcgaggccgagatcagccacacccagaaagccaccctcgtgtgcctggctaccggcttctaccccgaccatgtggaactgtcttggtgggtcaacggcaaagaggtgcacagcggcgtgtgtaccgacccccagccactgaaagaacagcccgccctgaacgacagccggtactgcctgagcagcagactgagagtgtccgccaccttctggcagaacccccggaaccacttcagatgccaggtgcagttctacggcctgagcgagaacgacgagtggacccaggacagagccaagcccgtgacccagatcgtgtctgccgaagcctggggcagagccgattgcggctttaccagcgagagctaccagcagggcgtgctgagcgccaccatcctgtacgagatcctgctgggcaaggccaccctgtacgccgtgctggtgtctgccctggtgctgatggctatggtcaagcggaaggacagccggggaagggccaagcgatctggatctggagcaacaaacttctcactactcaaacaagcaggtgacgtggaggagaatcccgggcctactagaggccatatgaccgagtacaagcccacggtgcgcctcgccacccgcgacgacgtccccagggccgtacgcaccctcgccgccgcgttcgccgactaccccgccacgcgccacaccgtcgatccggaccgccacatcgagcgggtcaccgagctgcaagaactcttcctcacgcgcgtcgggctcgacatcggcaaggtgtgggtcgcggacgacggcgccgcggtggcggtctggaccacgccggagagcgtcgaagcgggggcggtgttcgccgagatcggcccgcgcatggccgagttgagcggttcccggctggccgcgcagcaacagatggaaggcctcctggcgccgcaccggcccaaggagcccgcgtggttcctggccaccgtcggcgtctcgcccgaccaccagggcaagggtctgggcagcgccgtcgtgctccccggagtggaggcggccgagcgcgccggggtgcccgccttcctggagacctccgcgccccgcaacctccccttctacgagcggctcggcttcaccgtcaccgccgacgtcgaggtgcccgaaggaccgcgcacctggtgcatgacccgcaagcccggtgcctga

SEQ ID NO: 8146 - DNA, 984 bp, Artificial Sequence
  Synthetic Polynucloetide
atggccttaccagtgaccgccttgctcctgccgctggccttgctgctccacgccgccaggccgagctacgtgctgacacagcctccatccgtgtctgtggctccaggacagaccgccagaatcacatgcggcggcaacaacatcggcagcaagaccgtgcactggtatcagcagccacctggacaggctccagtggtggtggtgtacgacgacagcgatagacctagcggcatccccgagagattcagcggcagcaattccggcaataccgccacactgaccatcagcagagtggaagctggcgacgaggccgtgtactactgccaagtgtgggacagcagcagcgatcacgtggtgtttggcggcggaacaaagctgacagtgcttctcgaggggaaaccaattcccaaccctcttctgggactggattcaaccggcagcggcgaggacctgaagaacgtgttcccacctgaggtggccgtgttcgagcctagcgaggccgagatcagccacacccagaaagccaccctcgtgtgcctggctaccggcttctaccccgaccatgtggaactgtcttggtgggtcaacggcaaagaggtgcacagcggcgtgtgtaccgacccccagccactgaaagaacagcccgccctgaacgacagccggtactgcctgagcagcagactgagagtgtccgccaccttctggcagaacccccggaaccacttcagatgccaggtgcagttctacggcctgagcgagaacgacgagtggacccaggacagagccaagcccgtgacccagatcgtgtctgccgaagcctggggcagagccgattgcggctttaccagcgagagctaccagcagggcgtgctgagcgccaccatcctgtacgagatcctgctgggcaaggccaccctgtacgccgtgctggtgtctgccctggtgctgatggctatggtcaagcggaaggacagccggggatga

SEQ ID NO: 8147 - DNA, 1392 bp, Artificial Sequence; identical to SEQ ID NO: 7940
  Synthetic Polynucloetide

SEQ ID NO: 8148 - DNA, 894 bp, Artificial Sequence; identical to SEQ ID NO: 7941
  Synthetic Polynucloetide

SEQ ID NO: 8149 - DNA, 1935 bp, Artificial Sequence
  Synthetic Polynucloetide
atggccttaccagtgaccgccttgctcctgccgctggccttgctgctccacgccgccaggccgagctacgtgctgacacagcctccatccgtgtctgtggctccaggacagaccgccagaatcacatgcggcggcaacaacatcggcagcaagaccgtgcactggtatcagcagccacctggacaggctccagtggtggtggtgtacgacgacagcgatagacctagcggcatccccgagagattcagcggcagcaattccggcaataccgccacactgaccatcagcagagtggaagctggcgacgaggccgtgtactactgccaagtgtgggacagcagcagcgatcacgtggtgtttggcggcggaacaaagctgacagtgcttggcggaggcggaagtggaggcggaggatctggcggcggaggctctcaactccagctgcaagagtctggccctggcctggtcaagcctagcgaaacactgagcctgacctgtaccgtgtctggcggctctatcagctccggcagctatttctggggctggatcagacaacctcctggcaaaggactggaatggatcggctccatctactacagcggcatcacctactacaaccccagcctgaagtccagagtgaccatctccgtggacaccagcaagaaccagttctccctgaagctgagcagcgtgacagccgccgataccgccgtgtattattgtgccagacatgacggcgctgtggccggcctgtttgattattggggacagggcaccctggtcaccgtgtcatctgctacgcgtgggagcggcatccagaaccctgatcctgccgtgtaccagctgcgggatagcaagagcagcgacaagagcgtgtgtctgttcaccgacttcgacagccagaccaacgtgtcccagagcaaggactccgacgtgtacatcaccgataagaccgtgctggacatgcggagcatggacttcaagagcaactccgccgtggcctggtccaacaagtccgatttcgcctgcgccaacgccttcaacaacagcattatccccgaggacacattcttcccaagcagcgacgtgccctgcgacgtgaagctggtggaaaagagcttcgagacagacaccaacctgaacttccagaacctgagcgtgatcggcttcagaatcctgctgctgaaagtggccggctttaacctgctgatgaccctgcggctgtggtccagccgcgccaagagaagcggatctggcgtgaagcagaccctgaatttcgacctgctgaagctggctggcgacgtggaatccaacccaggcccttctagaggccatatgaccgagtacaagcccacggtgcgcctcgccacccgcgacgacgtccccagggccgtacgcaccctcgccgccgcgttcgccgactaccccgccacgcgccacaccgtcgatccggaccgccacatcgagcgggtcaccgagctgcaagaactcttcctcacgcgcgtcgggctcgacatcggcaaggtgtgggtcgcggacgacggcgccgcggtggcggtctggaccacgccggagagcgtcgaagcgggggcggtgttcgccgagatcggcccgcgcatggccgagttgagcggttcccggctggccgcgcagcaacagatggaaggcctcctggcgccgcaccggcccaaggagcccgcgtggttcctggccaccgtcggcgtctcgcccgaccaccagggcaagggtctgggcagcgccgtcgtgctccccggagtggaggcggccgagcgcgccggggtgcccgccttcctggagacctccgcgccccgcaacctccccttctacgagcggctcggcttcaccgtcaccgccgacgtcgaggtgcccgaaggaccgcgcacctggtgcatgacccgcaagcccggtgcctga

SEQ ID NO: 8150 - DNA, 2031 bp, Artificial Sequence
  Synthetic Polynucloetide
atggccttaccagtgaccgccttgctcctgccgctggccttgctgctccacgccgccaggccgagctacgtgctgacacagcctccatccgtgtctgtggctccaggacagaccgccagaatcacatgcggcggcaacaacatcggcagcaagaccgtgcactggtatcagcagccacctggacaggctccagtggtggtggtgtacgacgacagcgatagacctagcggcatccccgagagattcagcggcagcaattccggcaataccgccacactgaccatcagcagagtggaagctggcgacgaggccgtgtactactgccaagtgtgggacagcagcagcgatcacgtggtgtttggcggcggaacaaagctgacagtgcttggcggaggcggaagtggaggcggaggatctggcggcggaggctctcaactccagctgcaagagtctggccctggcctggtcaagcctagcgaaacactgagcctgacctgtaccgtgtctggcggctctatcagctccggcagctatttctggggctggatcagacaacctcctggcaaaggactggaatggatcggctccatctactacagcggcatcacctactacaaccccagcctgaagtccagagtgaccatctccgtggacaccagcaagaaccagttctccctgaagctgagcagcgtgacagccgccgataccgccgtgtattattgtgccagacatgacggcgctgtggccggcctgtttgattattggggacagggcaccctggtcaccgtgtcatctgctctcgaggacctgaagaacgtgttcccacctgaggtggccgtgttcgagcctagcaaggccgagatcgcccacacccagaaagccaccctcgtgtgcctggctaccggcttctaccccgaccatgtggaactgtcttggtgggtcaacggcaaagaggtgcacagcggcgtgtctaccgacccccagccactgaaagaacagcccgccctgaacgacagccggtactgcctgagcagcagactgagagtgtccgccaccttctggcagaacccccggaaccacttcagatgccaggtgcagttctacggcctgagcgagaacgacgagtggacccaggacagagccaagcccgtgacccagatcgtgtctgccgaagcctggggcagagccgattgcggcatcaccagcgccagctaccaccagggcgtgctgagcgccaccatcctgtacgagatcctgctgggcaaggccaccctgtacgccgtgctggtgtctgccctggtgctgatggctatggtcaagcggaaggacagccggggaagggccaagcgatctggatctggagcaacaaacttctcactactcaaacaagcaggtgacgtggaggagaatcccgggcctactagaggccatatgaccgagtacaagcccacggtgcgcctcgccacccgcgacgacgtccccagggccgtacgcaccctcgccgccgcgttcgccgactaccccgccacgcgccacaccgtcgatccggaccgccacatcgagcgggtcaccgagctgcaagaactcttcctcacgcgcgtcgggctcgacatcggcaaggtgtgggtcgcggacgacggcgccgcggtggcggtctggaccacgccggagagcgtcgaagcgggggcggtgttcgccgagatcggcccgcgcatggccgagttgagcggttcccggctggccgcgcagcaacagatggaaggcctcctggcgccgcaccggcccaaggagcccgcgtggttcctggccaccgtcggcgtctcgcccgaccaccagggcaagggtctgggcagcgccgtcgtgctccccggagtggaggcggccgagcgcgccggggtgcccgccttcctggagacctccgcgccccgcaacctccccttctacgagcggctcggcttcaccgtcaccgccgacgtcgaggtgcccgaaggaccgcgcacctggtgcatgacccgcaagcccggtgcctga

SEQ ID NO: 8151 - DNA, 2100 bp, Artificial Sequence
  Synthetic Polynucloetide
atggccttaccagtgaccgccttgctcctgccgctggccttgctgctccacgccgccaggccgagctacgtgctgacacagcctccatccgtgtctgtggctccaggacagaccgccagaatcacatgcggcggcaacaacatcggcagcaagaccgtgcactggtatcagcagccacctggacaggctccagtggtggtggtgtacgacgacagcgatagacctagcggcatccccgagagattcagcggcagcaattccggcaataccgccacactgaccatcagcagagtggaagctggcgacgaggccgtgtactactgccaagtgtgggacagcagcagcgatcacgtggtgtttggcggcggaacaaagctgacagtgcttggcggaggcggaagtggaggcggaggatctggcggcggaggctctcaactccagctgcaagagtctggccctggcctggtcaagcctagcgaaacactgagcctgacctgtaccgtgtctggcggctctatcagctccggcagctatttctggggctggatcagacaacctcctggcaaaggactggaatggatcggctccatctactacagcggcatcacctactacaaccccagcctgaagtccagagtgaccatctccgtggacaccagcaagaaccagttctccctgaagctgagcagcgtgacagccgccgataccgccgtgtattattgtgccagacatgacggcgctgtggccggcctgtttgattattggggacagggcaccctggtcaccgtgtcatctgctacgcgtgggtctggaggcggaggcagcggcggaggcgggagcggcgacggtaacgaggagatgggaggaatcactcaaaccccttacaaagtctcaatttcaggaacaactgttatccttacatgtccccagtatcctggcagcgagatcctttggcagcataacgacaagaatatagggggagatgaagacgataagaatatcggatctgacgaggatcacttgagcctgaaagagttctccgagcttgaacaaagcggatattatgtgtgctatccgcgcgggtcaaagccggaagacgctaacttttacctttatctccgagccagagtgtgcgaaaattgcatggaaatggacgttatgtccgttgctacaatagttatcgtagatatatgcatcacgggtggactgcttctgctggtttattattggtccaagaatagaaaggccaaagctaaacccgtgaccagaggcgctggcgcaggcggaaggcaaaggggacaaaacaaagaacggccaccaccagtgccaaatccagattatgagcctattcggaaaggacagagggacctgtactctggcctgaatcagagaagaatccgcgccaagagaagcggatctggcgtgaagcagaccctgaatttcgacctgctgaagctggctggcgacgtggaatccaacccaggcccttctagaggccatatgaccgagtacaagcccacggtgcgcctcgccacccgcgacgacgtccccagggccgtacgcaccctcgccgccgcgttcgccgactaccccgccacgcgccacaccgtcgatccggaccgccacatcgagcgggtcaccgagctgcaagaactcttcctcacgcgcgtcgggctcgacatcggcaaggtgtgggtcgcggacgacggcgccgcggtggcggtctggaccacgccggagagcgtcgaagcgggggcggtgttcgccgagatcggcccgcgcatggccgagttgagcggttcccggctggccgcgcagcaacagatggaaggcctcctggcgccgcaccggcccaaggagcccgcgtggttcctggccaccgtcggcgtctcgcccgaccaccagggcaagggtctgggcagcgccgtcgtgctccccggagtggaggcggccgagcgcgccggggtgcccgccttcctggagacctccgcgccccgcaacctccccttctacgagcggctcggcttcaccgtcaccgccgacgtcgaggtgcccgaaggaccgcgcacctggtgcatgacccgcaagcccggtgcctga

SEQ ID NO: 8152 - DNA, 1995 bp, Artificial Sequence
  Synthetic Polynucloetide
atggccttaccagtgaccgccttgctcctgccgctggccttgctgctccacgccgccaggccgagctacgtgctgacacagcctccatccgtgtctgtggctccaggacagaccgccagaatcacatgcggcggcaacaacatcggcagcaagaccgtgcactggtatcagcagccacctggacaggctccagtggtggtggtgtacgacgacagcgatagacctagcggcatccccgagagattcagcggcagcaattccggcaataccgccacactgaccatcagcagagtggaagctggcgacgaggccgtgtactactgccaagtgtgggacagcagcagcgatcacgtggtgtttggcggcggaacaaagctgacagtgcttggcggaggcggaagtggaggcggaggatctggcggcggaggctctcaactccagctgcaagagtctggccctggcctggtcaagcctagcgaaacactgagcctgacctgtaccgtgtctggcggctctatcagctccggcagctatttctggggctggatcagacaacctcctggcaaaggactggaatggatcggctccatctactacagcggcatcacctactacaaccccagcctgaagtccagagtgaccatctccgtggacaccagcaagaaccagttctccctgaagctgagcagcgtgacagccgccgataccgccgtgtattattgtgccagacatgacggcgctgtggccggcctgtttgattattggggacagggcaccctggtcaccgtgtcatctgctacgcgtgggtctggaggcggaggcagcggcggaggcgggagcggcttcaagatccccatcgaggaactggaagatcgggtgttcgtgaactgcaacacctctatcacctgggtggaaggcaccgtgggaacactgctgagcgacatcaccagactggacctcggcaagcggattctggaccctcggggcatctacagatgcaacggcaccgacatctacaaggacaaagaaagcaccgtgcaggtccactacagaatgtgccagtcctgcgtggaactggaccctgctacagtggccggcatcatcgtgaccgatgtgatcgctactctgctgctggctctgggagtgttctgcttcgccggacacgaaacaggcagactgtctggcgctgccgatacacaggccctgctgagaaacgaccaagtgtatcagcccctgcgcgacagagatgatgcccagtattctcacctcggcggcaactgggctagaaacaagcgcgccaagagaagcggatctggcgtgaagcagaccctgaatttcgacctgctgaagctggctggcgacgtggaatccaacccaggcccttctagaggccatatgaccgagtacaagcccacggtgcgcctcgccacccgcgacgacgtccccagggccgtacgcaccctcgccgccgcgttcgccgactaccccgccacgcgccacaccgtcgatccggaccgccacatcgagcgggtcaccgagctgcaagaactcttcctcacgcgcgtcgggctcgacatcggcaaggtgtgggtcgcggacgacggcgccgcggtggcggtctggaccacgccggagagcgtcgaagcgggggcggtgttcgccgagatcggcccgcgcatggccgagttgagcggttcccggctggccgcgcagcaacagatggaaggcctcctggcgccgcaccggcccaaggagcccgcgtggttcctggccaccgtcggcgtctcgcccgaccaccagggcaagggtctgggcagcgccgtcgtgctccccggagtggaggcggccgagcgcgccggggtgcccgccttcctggagacctccgcgccccgcaacctccccttctacgagcggctcggcttcaccgtcaccgccgacgtcgaggtgcccgaaggaccgcgcacctggtgcatgacccgcaagcccggtgcctga

SEQ ID NO: 8153 - DNA, 2025 bp, Artificial Sequence
  Synthetic Polynucloetide
atggccttaccagtgaccgccttgctcctgccgctggccttgctgctccacgccgccaggccgagctacgtgctgacacagcctccatccgtgtctgtggctccaggacagaccgccagaatcacatgcggcggcaacaacatcggcagcaagaccgtgcactggtatcagcagccacctggacaggctccagtggtggtggtgtacgacgacagcgatagacctagcggcatccccgagagattcagcggcagcaattccggcaataccgccacactgaccatcagcagagtggaagctggcgacgaggccgtgtactactgccaagtgtgggacagcagcagcgatcacgtggtgtttggcggcggaacaaagctgacagtgcttggcggaggcggaagtggaggcggaggatctggcggcggaggctctcaactccagctgcaagagtctggccctggcctggtcaagcctagcgaaacactgagcctgacctgtaccgtgtctggcggctctatcagctccggcagctatttctggggctggatcagacaacctcctggcaaaggactggaatggatcggctccatctactacagcggcatcacctactacaaccccagcctgaagtccagagtgaccatctccgtggacaccagcaagaaccagttctccctgaagctgagcagcgtgacagccgccgataccgccgtgtattattgtgccagacatgacggcgctgtggccggcctgtttgattattggggacagggcaccctggtcaccgtgtcatctgctacgcgtgggtctggaggcggaggcagcggcggaggcgggagcggccagagcatcaagggcaaccacctggtcaaggtgtacgactaccaagaggacggcagcgtgctgctgacatgtgatgccgaggccaagaacatcacctggtttaaggacggcaagatgatcggcttcctgaccgaggacaagaagaagtggaacctgggcagcaacgctaaggaccccagaggcatgtatcagtgcaagggcagccagaacaagagcaagcccctccaggtgtactaccggatgtgccagaactgcatcgagctgaacgccgctaccatcagcggctttctgttcgccgagatcgtgtccatcttcgtgctggccgtgggcgtgtactttatcgctggacaggatggcgtgcggcagagcagagcttccgataagcaaaccctgctgcctaacgaccagctgtaccagcctctgaaggacagagaggacgaccagtacagccacctccagggcaatcagctgagaagaaaccgcgccaagagaagcggatctggcgtgaagcagaccctgaatttcgacctgctgaagctggctggcgacgtggaatccaacccaggcccttctagaggccatatgaccgagtacaagcccacggtgcgcctcgccacccgcgacgacgtccccagggccgtacgcaccctcgccgccgcgttcgccgactaccccgccacgcgccacaccgtcgatccggaccgccacatcgagcgggtcaccgagctgcaagaactcttcctcacgcgcgtcgggctcgacatcggcaaggtgtgggtcgcggacgacggcgccgcggtggcggtctggaccacgccggagagcgtcgaagcgggggcggtgttcgccgagatcggcccgcgcatggccgagttgagcggttcccggctggccgcgcagcaacagatggaaggcctcctggcgccgcaccggcccaaggagcccgcgtggttcctggccaccgtcggcgtctcgcccgaccaccagggcaagggtctgggcagcgccgtcgtgctccccggagtggaggcggccgagcgcgccggggtgcccgccttcctggagacctccgcgccccgcaacctccccttctacgagcggctcggcttcaccgtcaccgccgacgtcgaggtgcccgaaggaccgcgcacctggtgcatgacccgcaagcccggtgcctga

SEQ ID NO: 8154 - DNA, 1974 bp, Artificial Sequence
  Synthetic Polynucloetide
atggccttaccagtgaccgccttgctcctgccgctggccttgctgctccacgccgccaggccgagctacgtgctgacacagcctccatccgtgtctgtggctccaggacagaccgccagaatcacatgcggcggcaacaacatcggcagcaagaccgtgcactggtatcagcagccacctggacaggctccagtggtggtggtgtacgacgacagcgatagacctagcggcatccccgagagattcagcggcagcaattccggcaataccgccacactgaccatcagcagagtggaagctggcgacgaggccgtgtactactgccaagtgtgggacagcagcagcgatcacgtggtgtttggcggcggaacaaagctgacagtgcttggcggaggcggaagtggaggcggaggatctggcggcggaggctctcaactccagctgcaagagtctggccctggcctggtcaagcctagcgaaacactgagcctgacctgtaccgtgtctggcggctctatcagctccggcagctatttctggggctggatcagacaacctcctggcaaaggactggaatggatcggctccatctactacagcggcatcacctactacaaccccagcctgaagtccagagtgaccatctccgtggacaccagcaagaaccagttctccctgaagctgagcagcgtgacagccgccgataccgccgtgtattattgtgccagacatgacggcgctgtggccggcctgtttgattattggggacagggcaccctggtcaccgtgtcatctgctacgcgtgggtctggaggcggaggcagcggcggaggcgggagcggccagagttttgggttgttggaccctaaattgtgctatctgttggacggaatcctgttcatttacggagtgatcctgaccgcattgttcctgcgggttaagttttccagatccgcagacgcacccgcttaccaacaagggcagaaccaactctacaatgaacttaatttggggcggagggaagagtacgacgttctggacaaaaggaggggacgagatcccgagatgggcggaaagcctcagcgaaggaagaatccgcaagaggggctttataacgaactccagaaagataaaatggcagaagcctatagtgagattgggatgaagggagaaaggaggaggggtaaaggtcacgatgggttgtaccaaggattgagcacagccactaaagatacctatgatgcgctccacatgcaggccctgccgccaagacgcgccaagagaagcggatctggcgtgaagcagaccctgaatttcgacctgctgaagctggctggcgacgtggaatccaacccaggcccttctagaggccatatgaccgagtacaagcccacggtgcgcctcgccacccgcgacgacgtccccagggccgtacgcaccctcgccgccgcgttcgccgactaccccgccacgcgccacaccgtcgatccggaccgccacatcgagcgggtcaccgagctgcaagaactcttcctcacgcgcgtcgggctcgacatcggcaaggtgtgggtcgcggacgacggcgccgcggtggcggtctggaccacgccggagagcgtcgaagcgggggcggtgttcgccgagatcggcccgcgcatggccgagttgagcggttcccggctggccgcgcagcaacagatggaaggcctcctggcgccgcaccggcccaaggagcccgcgtggttcctggccaccgtcggcgtctcgcccgaccaccagggcaagggtctgggcagcgccgtcgtgctccccggagtggaggcggccgagcgcgccggggtgcccgccttcctggagacctccgcgccccgcaacctccccttctacgagcggctcggcttcaccgtcaccgccgacgtcgaggtgcccgaaggaccgcgcacctggtgcatgacccgcaagcccggtgcctga

SEQ ID NO: 8155 - DNA, 2274 bp, Artificial Sequence
  Synthetic Polynucloetide
atggccttaccagtgaccgccttgctcctgccgctggccttgctgctccacgccgccaggccggaagtgcagctggttgaatctggcggaggactggttcagcctggcggatctctgagactgtcttgtgccgccagcggcttcagcttcagcgacttttggatgagctgggtccgacaggcccctggcaaaggacttgaatgggtcgccacaatcagccaggccggcagcgagaaggactacgtggactctgtgaagggcagattcaccatcagccgggacaacgccaagaagtccctgtacctccagatgaacagcctgagagccgaggacaccgccgtgtactattgtgcctctggcgtgtacagcttcgactacagaggccagggcaccctggtcacagtctcttctggtaccggcggaggcggatctggcggcggaggtagcggtggcggaggatctgaattcagctacgtgctgacacagcctccatccgtgtctgtggctccaggacagaccgccagaatcacatgcggcggcaacaacatcggcagcaagaccgtgcactggtatcagcagccacctggacaggctccagtggtggtggtgtacgacgacagcgatagacctagcggcatccccgagagattcagcggcagcaattccggcaataccgccacactgaccatcagcagagtggaagctggcgacgaggccgtgtactactgccaagtgtgggacagcagcagcgatcacgtggtgtttggcggcggaacaaagctgacagtgcttctcgaggacctgaagaacgtgttcccacctgaggtggccgtgttcgagcctagcgaggccgagatcagccacacccagaaagccaccctcgtgtgcctggctaccggcttctaccccgaccatgtggaactgtcttggtgggtcaacggcaaagaggtgcacagcggcgtgtgtaccgacccccagccactgaaagaacagcccgccctgaacgacagccggtactgcctgagcagcagactgagagtgtccgccaccttctggcagaacccccggaaccacttcagatgccaggtgcagttctacggcctgagcgagaacgacgagtggacccaggacagagccaagcccgtgacccagatcgtgtctgccgaagcctggggcagagccgattgcggctttaccagcgagagctaccagcagggcgtgctgagcgccaccatcctgtacgagatcctgctgggcaaggccaccctgtacgccgtgctggtgtctgccctggtgctgatggctatggtcaagcggaaggacagccggggaagggccaagcgatctggatctggagcaacaaacttctcactactcaaacaagcaggtgacgtggaggagaatcccgggcctactagtatggactggatttggcgcatccttttccttgtcggcgctgctaccggcgcgcattccttcgaacaactccagctgcaagagtctggccctggcctggtcaagcctagcgaaacactgagcctgacctgtaccgtgtctggcggctctatcagctccggcagctatttctggggctggatcagacaacctcctggcaaaggactggaatggatcggctccatctactacagcggcatcacctactacaaccccagcctgaagtccagagtgaccatctccgtggacaccagcaagaaccagttctccctgaagctgagcagcgtgacagccgccgataccgccgtgtattattgtgccagacatgacggcgctgtggccggcctgtttgattattggggacagggcaccctggtcaccgtgtcatctgctacgcgtatccagaaccctgatcctgccgtgtaccagctgcgggatagcaagagcagcgacaagagcgtgtgtctgttcaccgacttcgacagccagaccaacgtgtcccagagcaaggactccgacgtgtacatcaccgataagtgcgtgctggacatgcggagcatggacttcaagagcaactccgccgtggcctggtccaacaagtccgatttcgcctgcgccaacgccttcaacaacagcattatccccgaggacacattcttcccaagccccgagagcagctgcgacgtgaagctggtggaaaagagcttcgagacagacaccaacctgaacttccagaacctgagcgtgatcggcttcagaatcctgctgctgaaagtggccggctttaacctgctgatgaccctgcggctgtggtccagc

SEQ ID NO: 8156 - DNA, 2286 bp, Artificial Sequence
  Synthetic Polynucloetide
atggccttaccagtgaccgccttgctcctgccgctggccttgctgctccacgccgccaggccggaagtgcagctggttgaatctggcggaggactggttcagcctggcggatctctgagactgtcttgtgccgccagcggcttcagcttcagcgacttttggatgagctgggtccgacaggcccctggcaaaggacttgaatgggtcgccacaatcagccaggccggcagcgagaaggactacgtggactctgtgaagggcagattcaccatcagccgggacaacgccaagaagtccctgtacctccagatgaacagcctgagagccgaggacaccgccgtgtactattgtgcctctggcgtgtacagcttcgactacagaggccagggcaccctggtcacagtctcttctggtaccggcggaggcggatctggcggcggaggtagcggtggcggaggatctgaattcagctacgtgctgacacagcctccatccgtgtctgtggctccaggacagaccgccagaatcacatgcggcggcaacaacatcggcagcaagaccgtgcactggtatcagcagccacctggacaggctccagtggtggtggtgtacgacgacagcgatagacctagcggcatccccgagagattcagcggcagcaattccggcaataccgccacactgaccatcagcagagtggaagctggcgacgaggccgtgtactactgccaagtgtgggacagcagcagcgatcacgtggtgtttggcggcggaacaaagctgacagtgcttctcgagatccagaaccctgatcctgccgtgtaccagctgcgggatagcaagagcagcgacaagagcgtgtgtctgttcaccgacttcgacagccagaccaacgtgtcccagagcaaggactccgacgtgtacatcaccgataagtgcgtgctggacatgcggagcatggacttcaagagcaactccgccgtggcctggtccaacaagtccgatttcgcctgcgccaacgccttcaacaacagcattatccccgaggacacattcttcccaagccccgagagcagctgcgacgtgaagctggtggaaaagagcttcgagacagacaccaacctgaacttccagaacctgagcgtgatcggcttcagaatcctgctgctgaaagtggccggctttaacctgctgatgaccctgcggctgtggtccagccgcgccaagagaagcggatctggcgtgaagcagaccctgaatttcgacctgctgaagctggctggcgacgtggaatccaacccaggccctactagtatggactggatttggcgcatccttttccttgtcggcgctgctaccggcgcgcattccttcgaacaactccagctgcaagagtctggccctggcctggtcaagcctagcgaaacactgagcctgacctgtaccgtgtctggcggctctatcagctccggcagctatttctggggctggatcagacaacctcctggcaaaggactggaatggatcggctccatctactacagcggcatcacctactacaaccccagcctgaagtccagagtgaccatctccgtggacaccagcaagaaccagttctccctgaagctgagcagcgtgacagccgccgataccgccgtgtattattgtgccagacatgacggcgctgtggccggcctgtttgattattggggacagggcaccctggtcaccgtgtcatctgctacgcgtgaggacctgaagaacgtgttcccacctgaggtggccgtgttcgagcctagcgaggccgagatcagccacacccagaaagccaccctcgtgtgcctggctaccggcttctaccccgaccatgtggaactgtcttggtgggtcaacggcaaagaggtgcacagcggcgtgtgtaccgacccccagccactgaaagaacagcccgccctgaacgacagccggtactgcctgagcagcagactgagagtgtccgccaccttctggcagaacccccggaaccacttcagatgccaggtgcagttctacggcctgagcgagaacgacgagtggacccaggacagagccaagcccgtgacccagatcgtgtctgccgaagcctggggcagagccgattgcggctttaccagcgagagctaccagcagggcgtgctgagcgccaccatcctgtacgagatcctgctgggcaaggccaccctgtacgccgtgctggtgtctgccctggtgctgatggctatggtcaagcggaaggacagccgggga

SEQ ID NO: 8157 - DNA, 2862 bp, Artificial Sequence
  Synthetic Polynucloetide
atggccttaccagtgaccgccttgctcctgccgctggccttgctgctccacgccgccaggccggaagtgcagctggttgaatctggcggaggactggttcagcctggcggatctctgagactgtcttgtgccgccagcggcttcagcttcagcgacttttggatgagctgggtccgacaggcccctggcaaaggacttgaatgggtcgccacaatcagccaggccggcagcgagaaggactacgtggactctgtgaagggcagattcaccatcagccgggacaacgccaagaagtccctgtacctccagatgaacagcctgagagccgaggacaccgccgtgtactattgtgcctctggcgtgtacagcttcgactacagaggccagggcaccctggtcacagtctcttctggtaccggcggaggcggatctggcggcggaggtagcggtggcggaggatctgaattcagctacgtgctgacacagcctccatccgtgtctgtggctccaggacagaccgccagaatcacatgcggcggcaacaacatcggcagcaagaccgtgcactggtatcagcagccacctggacaggctccagtggtggtggtgtacgacgacagcgatagacctagcggcatccccgagagattcagcggcagcaattccggcaataccgccacactgaccatcagcagagtggaagctggcgacgaggccgtgtactactgccaagtgtgggacagcagcagcgatcacgtggtgtttggcggcggaacaaagctgacagtgcttctcgaggacctgaagaacgtgttcccacctgaggtggccgtgttcgagcctagcgaggccgagatcagccacacccagaaagccaccctcgtgtgcctggctaccggcttctaccccgaccatgtggaactgtcttggtgggtcaacggcaaagaggtgcacagcggcgtgtctaccgacccccagccactgaaagaacagcccgccctgaacgacagccggtactgcctgagcagcagactgagagtgtccgccaccttctggcagaacccccggaaccacttcagatgccaggtgcagttctacggcctgagcgagaacgacgagtggacccaggacagagccaagcccgtgacccagatcgtgtctgccgaagcctggggcagagccgattgcggatcccagagcttcggcctgctggaccccaagctgtgctacctgctggatggcatcctgttcatctacggcgtgatcctgaccgccctgttcctgagagtgaagttcagcagaagcgccgacgcccctgcctaccagcagggacagaaccaactgtacaacgagctgaacctgggcagacgggaagagtacgacgtgctggacaagcggagaggcagggaccctgagatgggcggaaagccccagcggagaaagaacccccaggaaggactgtataacgaactccagaaagacaagatggccgaagcctacagcgagatcggcatgaagggcgagcggagaagaggcaagggccacgatggcctgtaccagggcctgagcaccgccaccaaggacacctatgacgccctgcacatgcaggccctgcctccaagaagggccaagcgatctggatctggagcaacaaacttctcactactcaaacaagcaggtgacgtggaggagaatcccgggcctactagtatggactggatttggcgcatccttttccttgtcggcgctgctaccggcgcgcattccttcgaacaactccagctgcaagagtctggccctggcctggtcaagcctagcgaaacactgagcctgacctgtaccgtgtctggcggctctatcagctccggcagctatttctggggctggatcagacaacctcctggcaaaggactggaatggatcggctccatctactacagcggcatcacctactacaaccccagcctgaagtccagagtgaccatctccgtggacaccagcaagaaccagttctccctgaagctgagcagcgtgacagccgccgataccgccgtgtattattgtgccagacatgacggcgctgtggccggcctgtttgattattggggacagggcaccctggtcaccgtgtcatctgctacgcgtatccagaaccctgatcctgccgtgtaccagctgcgggatagcaagagcagcgacaagagcgtgtgtctgttcaccgacttcgacagccagaccaacgtgtcccagagcaaggactccgacgtgtacatcaccgataagaccgtgctggacatgcggagcatggacttcaagagcaactccgccgtggcctggtccaacaagtccgatttcgcctgcgccaacgccttcaacaacagcattatccccgaggacacattcttcccaagccccgagagcagctgcggtacccagagttttgggttgttggaccctaaattgtgctatctgttggacggaatcctgttcatttacggagtgatcctgaccgcattgttcctgcgggttaagttttccagatccgcagacgcacccgcttaccaacaagggcagaaccaactctacaatgaacttaatttggggcggagggaagagtacgacgttctggacaaaaggaggggacgagatcccgagatgggcggaaagcctcagcgaaggaagaatccgcaagaggggctttataacgaactccagaaagataaaatggcagaagcctatagtgagattgggatgaagggagaaaggaggaggggtaaaggtcacgatgggttgtaccaaggattgagcacagccactaaagatacctatgatgcgctccacatgcaggccctgccgccaaga

SEQ ID NO: 8158 - DNA, 2352 bp, Artificial Sequence
  Synthetic Polynucloetide
atggccttaccagtgaccgccttgctcctgccgctggccttgctgctccacgccgccaggccggaagtgcagctggttgaatctggcggaggactggttcagcctggcggatctctgagactgtcttgtgccgccagcggcttcagcttcagcgacttttggatgagctgggtccgacaggcccctggcaaaggacttgaatgggtcgccacaatcagccaggccggcagcgagaaggactacgtggactctgtgaagggcagattcaccatcagccgggacaacgccaagaagtccctgtacctccagatgaacagcctgagagccgaggacaccgccgtgtactattgtgcctctggcgtgtacagcttcgactacagaggccagggcaccctggtcacagtctcttctggtaccggcggaggcggatctggcggcggaggtagcggtggcggaggatctgaattcagctacgtgctgacacagcctccatccgtgtctgtggctccaggacagaccgccagaatcacatgcggcggcaacaacatcggcagcaagaccgtgcactggtatcagcagccacctggacaggctccagtggtggtggtgtacgacgacagcgatagacctagcggcatccccgagagattcagcggcagcaattccggcaataccgccacactgaccatcagcagagtggaagctggcgacgaggccgtgtactactgccaagtgtgggacagcagcagcgatcacgtggtgtttggcggcggaacaaagctgacagtgcttctcgagggacagcctaaggccaatcctaccgtgacactgttccctccaagcagcgaagaactccaggccaacaaggccacacttgtgtgcctgatctccgacttctaccctggggctgtgacagtggcttggaaggccgatggatctcctgtgaaagccggcgtggaaaccaccaagccatccaagcagagcaacaacaaatacgccgccagctcctacctgagcctgacacctgagcagtggaagtcccacagatcctacagctgccaagtgacccacgaaggcagcaccgtggaaaagacagtggcccctacagagtgcagccccatcaagaccgatgtgattacaatggaccccaaggacaactgctccaaggacgccaacgataccctgctgctccagctgaccaacaccagcgcctactacatgtacttgttgctgctgctgaagtccgtggtgtacttcgccatcatcacatgctgcctgctgcggagaaccgccttctgctgcaacggcgagaagtctagggccaagcgatctggatctggagcaacaaacttctcactactcaaacaagcaggtgacgtggaggagaatcccgggcctactagtatggactggatttggcgcatccttttccttgtcggcgctgctaccggcgcgcattccttcgaacaactccagctgcaagagtctggccctggcctggtcaagcctagcgaaacactgagcctgacctgtaccgtgtctggcggctctatcagctccggcagctatttctggggctggatcagacaacctcctggcaaaggactggaatggatcggctccatctactacagcggcatcacctactacaaccccagcctgaagtccagagtgaccatctccgtggacaccagcaagaaccagttctccctgaagctgagcagcgtgacagccgccgataccgccgtgtattattgtgccagacatgacggcgctgtggccggcctgtttgattattggggacagggcaccctggtcaccgtgtcatctgctacgcgtgcctctacaaagggaccctccgtgtttcctctggctcccagcagcaagtctacaagcggaggaacagccgctctgggctgcctggtcaaggattactttcccgagcctgtgaccgtgtcctggaatagcggagcactgacaagcggcgtgcacacctttccagccgtgctgcaaagcagcggcctgtactctctgagcagcgtggtcacagtgcctagctctagcctgggcacccagacctacatctgcaatgtgaaccacaagcctagcaacaccaaggtggacaagagagtggaacccaagagctgtgaagtgaaaaccgactccaccgaccacgtgaagcccaaagagacagagaacaccaagcagcccagcaagagctgccacaagcccaaggccatcgtgcacaccgagaaagtgaacatgatgagcctgaccgtgctgggcctgcggatgctgttcgccaaaaccgtggccgtgaacttcctgctgaccgccaagctgttcttcctc

SEQ ID NO: 8159 - DNA, 2295 bp, Artificial Sequence
  Synthetic Polynucloetide
atggccttaccagtgaccgccttgctcctgccgctggccttgctgctccacgccgccaggccggaagtgcagctggttgaatctggcggaggactggttcagcctggcggatctctgagactgtcttgtgccgccagcggcttcagcttcagcgacttttggatgagctgggtccgacaggcccctggcaaaggacttgaatgggtcgccacaatcagccaggccggcagcgagaaggactacgtggactctgtgaagggcagattcaccatcagccgggacaacgccaagaagtccctgtacctccagatgaacagcctgagagccgaggacaccgccgtgtactattgtgcctctggcgtgtacagcttcgactacagaggccagggcaccctggtcacagtctcttctggtaccggcggaggcggatctggcggcggaggtagcggtggcggaggatctgaattcagctacgtgctgacacagcctccatccgtgtctgtggctccaggacagaccgccagaatcacatgcggcggcaacaacatcggcagcaagaccgtgcactggtatcagcagccacctggacaggctccagtggtggtggtgtacgacgacagcgatagacctagcggcatccccgagagattcagcggcagcaattccggcaataccgccacactgaccatcagcagagtggaagctggcgacgaggccgtgtactactgccaagtgtgggacagcagcagcgatcacgtggtgtttggcggcggaacaaagctgacagtgcttctcgagggacagcctaaggccaatcctaccgtgacactgttccctccaagcagcgaagaactccaggccaacaaggccacacttgtgtgcctgatctccgacttctaccctggggctgtgacagtggcttggaaggccgatggatctcctgtgaaagccggcgtggaaaccaccaagccatccaagcagagcaacaacaaatacgccgccagctcctacctgagcctgacacctgagcagtggaagtcccacagatcctacagctgccaagtgacccacgaaggcagcaccgtggaaaagacagtggcccctacagagtgcagcggcagagccgattgcggctttaccagcgagagctaccagcagggcgtgctgagcgccaccatcctgtacgagatcctgctgggcaaggccaccctgtacgccgtgctggtgtctgccctggtgctgatggctatggtcaagcggaaggacagccggggacgcgccaagagaagcggatctggcgtgaagcagaccctgaatttcgacctgctgaagctggctggcgacgtggaatccaacccaggccctactagtatggactggatttggcgcatccttttccttgtcggcgctgctaccggcgcgcattccttcgaacaactccagctgcaagagtctggccctggcctggtcaagcctagcgaaacactgagcctgacctgtaccgtgtctggcggctctatcagctccggcagctatttctggggctggatcagacaacctcctggcaaaggactggaatggatcggctccatctactacagcggcatcacctactacaaccccagcctgaagtccagagtgaccatctccgtggacaccagcaagaaccagttctccctgaagctgagcagcgtgacagccgccgataccgccgtgtattattgtgccagacatgacggcgctgtggccggcctgtttgattattggggacagggcaccctggtcaccgtgtcatctgctacgcgtgcctctacaaagggaccctccgtgtttcctctggctcccagcagcaagtctacaagcggaggaacagccgctctgggctgcctggtcaaggattactttcccgagcctgtgaccgtgtcctggaatagcggagcactgacaagcggcgtgcacacctttccagccgtgctgcaaagcagcggcctgtactctctgagcagcgtggtcacagtgcctagctctagcctgggcacccagacctacatctgcaatgtgaaccacaagcctagcaacaccaaggtggacaagagagtggaacccaagagctgtatccccgaggacacattcttcccaagccccgagagcagctgcgacgtgaagctggtggaaaagagcttcgagacagacaccaacctgaacttccagaacctgagcgtgatcggcttcagaatcctgctgctgaaagtggccggctttaacctgctgatgaccctgcggctgtggtccagc

SEQ ID NO: 8160 - DNA, 2697 bp, Artificial Sequence
  Synthetic Polynucloetide
atggccttaccagtgaccgccttgctcctgccgctggccttgctgctccacgccgccaggccggaagtgcagctggttgaatctggcggaggactggttcagcctggcggatctctgagactgtcttgtgccgccagcggcttcagcttcagcgacttttggatgagctgggtccgacaggcccctggcaaaggacttgaatgggtcgccacaatcagccaggccggcagcgagaaggactacgtggactctgtgaagggcagattcaccatcagccgggacaacgccaagaagtccctgtacctccagatgaacagcctgagagccgaggacaccgccgtgtactattgtgcctctggcgtgtacagcttcgactacagaggccagggcaccctggtcacagtctcttctggtaccggcggaggcggatctggcggcggaggtagcggtggcggaggatctgaattcagctacgtgctgacacagcctccatccgtgtctgtggctccaggacagaccgccagaatcacatgcggcggcaacaacatcggcagcaagaccgtgcactggtatcagcagccacctggacaggctccagtggtggtggtgtacgacgacagcgatagacctagcggcatccccgagagattcagcggcagcaattccggcaataccgccacactgaccatcagcagagtggaagctggcgacgaggccgtgtactactgccaagtgtgggacagcagcagcgatcacgtggtgtttggcggcggaacaaagctgacagtgcttctcgagatccagaaccctgatcctgccgtgtaccagctgcgggatagcaagagcagcgacaagagcgtgtgtctgttcaccgacttcgacagccagaccaacgtgtcccagagcaaggactccgacgtgtacatcaccgataagtgcgtgctggacatgcggagcatggacttcaagagcaactccgccgtggcctggtccaacaagtccgatttcgcctgcgccaacgccttcaacaacagcattatccccgaggacacattcttcccaagccccgagagcagctgcgacgtgaagctggtggaaaagagcttcgagacagacaccaacctgaacttccagaacctgagcgtgatcggcttcagaatcctgctgctgaaagtggccggctttaacctgctgatgaccctgcggctgtggtccagccgcgccaagagaagcggatctggcgtgaagcagaccctgaatttcgacctgctgaagctggctggcgacgtggaatccaacccaggccctactagtatggactggatttggcgcatccttttccttgtcggcgctgctaccggcgcgcattccgggccccagctccagctgcaagagtctggacctggcctggtcaagcctagcgagacactgagcctgacctgtaccgtgtccggcgatagcatcagcagcggcgattactactggggctggatcagacagcctcctggcaaaggactggaatggatcggccacatctactacagcggcgtgacctactacaaccccagcctgaagtccagagtgaccatcagcgtggacaccagccggaaccagttctccctgaagctgtctagcgtgacagccgccgataccgccgtgtactactgcaccagagaggacagcagcaactggcggagtagaggccagggaacactggtcacagttagctctggatccggcggaggcggaagtggaggcggaggatctggcggcggaggctctttcgaacaactccagctgcaagagtctggccctggcctggtcaagcctagcgaaacactgagcctgacctgtaccgtgtctggcggctctatcagctccggcagctatttctggggctggatcagacaacctcctggcaaaggactggaatggatcggctccatctactacagcggcatcacctactacaaccccagcctgaagtccagagtgaccatctccgtggacaccagcaagaaccagttctccctgaagctgagcagcgtgacagccgccgataccgccgtgtattattgtgccagacatgacggcgctgtggccggcctgtttgattattggggacagggcaccctggtcaccgtgtcatctgctacgcgtgaggacctgaagaacgtgttcccacctgaggtggccgtgttcgagcctagcgaggccgagatcagccacacccagaaagccaccctcgtgtgcctggctaccggcttctaccccgaccatgtggaactgtcttggtgggtcaacggcaaagaggtgcacagcggcgtgtgtaccgacccccagccactgaaagaacagcccgccctgaacgacagccggtactgcctgagcagcagactgagagtgtccgccaccttctggcagaacccccggaaccacttcagatgccaggtgcagttctacggcctgagcgagaacgacgagtggacccaggacagagccaagcccgtgacccagatcgtgtctgccgaagcctggggcagagccgattgcggctttaccagcgagagctaccagcagggcgtgctgagcgccaccatcctgtacgagatcctgctgggcaaggccaccctgtacgccgtgctggtgtctgccctggtgctgatggctatggtcaagcggaaggacagccgggga

SEQ ID NO: 8161 - DNA, 3273 bp, Artificial Sequence
  Synthetic Polynucloetide
atggccttaccagtgaccgccttgctcctgccgctggccttgctgctccacgccgccaggccggaagtgcagctggttgaatctggcggaggactggttcagcctggcggatctctgagactgtcttgtgccgccagcggcttcagcttcagcgacttttggatgagctgggtccgacaggcccctggcaaaggacttgaatgggtcgccacaatcagccaggccggcagcgagaaggactacgtggactctgtgaagggcagattcaccatcagccgggacaacgccaagaagtccctgtacctccagatgaacagcctgagagccgaggacaccgccgtgtactattgtgcctctggcgtgtacagcttcgactacagaggccagggcaccctggtcacagtctcttctggtaccggcggaggcggatctggcggcggaggtagcggtggcggaggatctgaattcagctacgtgctgacacagcctccatccgtgtctgtggctccaggacagaccgccagaatcacatgcggcggcaacaacatcggcagcaagaccgtgcactggtatcagcagccacctggacaggctccagtggtggtggtgtacgacgacagcgatagacctagcggcatccccgagagattcagcggcagcaattccggcaataccgccacactgaccatcagcagagtggaagctggcgacgaggccgtgtactactgccaagtgtgggacagcagcagcgatcacgtggtgtttggcggcggaacaaagctgacagtgcttctcgaggacctgaagaacgtgttcccacctgaggtggccgtgttcgagcctagcgaggccgagatcagccacacccagaaagccaccctcgtgtgcctggctaccggcttctaccccgaccatgtggaactgtcttggtgggtcaacggcaaagaggtgcacagcggcgtgtctaccgacccccagccactgaaagaacagcccgccctgaacgacagccggtactgcctgagcagcagactgagagtgtccgccaccttctggcagaacccccggaaccacttcagatgccaggtgcagttctacggcctgagcgagaacgacgagtggacccaggacagagccaagcccgtgacccagatcgtgtctgccgaagcctggggcagagccgattgcggatcccagagcttcggcctgctggaccccaagctgtgctacctgctggatggcatcctgttcatctacggcgtgatcctgaccgccctgttcctgagagtgaagttcagcagaagcgccgacgcccctgcctaccagcagggacagaaccaactgtacaacgagctgaacctgggcagacgggaagagtacgacgtgctggacaagcggagaggcagggaccctgagatgggcggaaagccccagcggagaaagaacccccaggaaggactgtataacgaactccagaaagacaagatggccgaagcctacagcgagatcggcatgaagggcgagcggagaagaggcaagggccacgatggcctgtaccagggcctgagcaccgccaccaaggacacctatgacgccctgcacatgcaggccctgcctccaagaagggccaagcgatctggatctggagcaacaaacttctcactactcaaacaagcaggtgacgtggaggagaatcccgggcctactagtatggactggatttggcgcatccttttccttgtcggcgctgctaccggcgcgcattccgggccccagctccagctgcaagagtctggacctggcctggtcaagcctagcgagacactgagcctgacctgtaccgtgtccggcgatagcatcagcagcggcgattactactggggctggatcagacagcctcctggcaaaggactggaatggatcggccacatctactacagcggcgtgacctactacaaccccagcctgaagtccagagtgaccatcagcgtggacaccagccggaaccagttctccctgaagctgtctagcgtgacagccgccgataccgccgtgtactactgcaccagagaggacagcagcaactggcggagtagaggccagggaacactggtcacagttagctctggatccggcggaggcggaagtggaggcggaggatctggcggcggaggctctttcgaacaactccagctgcaagagtctggccctggcctggtcaagcctagcgaaacactgagcctgacctgtaccgtgtctggcggctctatcagctccggcagctatttctggggctggatcagacaacctcctggcaaaggactggaatggatcggctccatctactacagcggcatcacctactacaaccccagcctgaagtccagagtgaccatctccgtggacaccagcaagaaccagttctccctgaagctgagcagcgtgacagccgccgataccgccgtgtattattgtgccagacatgacggcgctgtggccggcctgtttgattattggggacagggcaccctggtcaccgtgtcatctgctacgcgtatccagaaccctgatcctgccgtgtaccagctgcgggatagcaagagcagcgacaagagcgtgtgtctgttcaccgacttcgacagccagaccaacgtgtcccagagcaaggactccgacgtgtacatcaccgataagaccgtgctggacatgcggagcatggacttcaagagcaactccgccgtggcctggtccaacaagtccgatttcgcctgcgccaacgccttcaacaacagcattatccccgaggacacattcttcccaagccccgagagcagctgcggtacccagagttttgggttgttggaccctaaattgtgctatctgttggacggaatcctgttcatttacggagtgatcctgaccgcattgttcctgcgggttaagttttccagatccgcagacgcacccgcttaccaacaagggcagaaccaactctacaatgaacttaatttggggcggagggaagagtacgacgttctggacaaaaggaggggacgagatcccgagatgggcggaaagcctcagcgaaggaagaatccgcaagaggggctttataacgaactccagaaagataaaatggcagaagcctatagtgagattgggatgaagggagaaaggaggaggggtaaaggtcacgatgggttgtaccaaggattgagcacagccactaaagatacctatgatgcgctccacatgcaggccctgccgccaaga

SEQ ID NO: 8162 - DNA, 2763 bp, Artificial Sequence
  Synthetic Polynucloetide
atggccttaccagtgaccgccttgctcctgccgctggccttgctgctccacgccgccaggccggaagtgcagctggttgaatctggcggaggactggttcagcctggcggatctctgagactgtcttgtgccgccagcggcttcagcttcagcgacttttggatgagctgggtccgacaggcccctggcaaaggacttgaatgggtcgccacaatcagccaggccggcagcgagaaggactacgtggactctgtgaagggcagattcaccatcagccgggacaacgccaagaagtccctgtacctccagatgaacagcctgagagccgaggacaccgccgtgtactattgtgcctctggcgtgtacagcttcgactacagaggccagggcaccctggtcacagtctcttctggtaccggcggaggcggatctggcggcggaggtagcggtggcggaggatctgaattcagctacgtgctgacacagcctccatccgtgtctgtggctccaggacagaccgccagaatcacatgcggcggcaacaacatcggcagcaagaccgtgcactggtatcagcagccacctggacaggctccagtggtggtggtgtacgacgacagcgatagacctagcggcatccccgagagattcagcggcagcaattccggcaataccgccacactgaccatcagcagagtggaagctggcgacgaggccgtgtactactgccaagtgtgggacagcagcagcgatcacgtggtgtttggcggcggaacaaagctgacagtgcttctcgagggacagcctaaggccaatcctaccgtgacactgttccctccaagcagcgaagaactccaggccaacaaggccacacttgtgtgcctgatctccgacttctaccctggggctgtgacagtggcttggaaggccgatggatctcctgtgaaagccggcgtggaaaccaccaagccatccaagcagagcaacaacaaatacgccgccagctcctacctgagcctgacacctgagcagtggaagtcccacagatcctacagctgccaagtgacccacgaaggcagcaccgtggaaaagacagtggcccctacagagtgcagccccatcaagaccgatgtgattacaatggaccccaaggacaactgctccaaggacgccaacgataccctgctgctccagctgaccaacaccagcgcctactacatgtacttgttgctgctgctgaagtccgtggtgtacttcgccatcatcacatgctgcctgctgcggagaaccgccttctgctgcaacggcgagaagtctagggccaagcgatctggatctggagcaacaaacttctcactactcaaacaagcaggtgacgtggaggagaatcccgggcctactagtatggactggatttggcgcatccttttccttgtcggcgctgctaccggcgcgcattccgggccccagctccagctgcaagagtctggacctggcctggtcaagcctagcgagacactgagcctgacctgtaccgtgtccggcgatagcatcagcagcggcgattactactggggctggatcagacagcctcctggcaaaggactggaatggatcggccacatctactacagcggcgtgacctactacaaccccagcctgaagtccagagtgaccatcagcgtggacaccagccggaaccagttctccctgaagctgtctagcgtgacagccgccgataccgccgtgtactactgcaccagagaggacagcagcaactggcggagtagaggccagggaacactggtcacagttagctctggatccggcggaggcggaagtggaggcggaggatctggcggcggaggctctttcgaacaactccagctgcaagagtctggccctggcctggtcaagcctagcgaaacactgagcctgacctgtaccgtgtctggcggctctatcagctccggcagctatttctggggctggatcagacaacctcctggcaaaggactggaatggatcggctccatctactacagcggcatcacctactacaaccccagcctgaagtccagagtgaccatctccgtggacaccagcaagaaccagttctccctgaagctgagcagcgtgacagccgccgataccgccgtgtattattgtgccagacatgacggcgctgtggccggcctgtttgattattggggacagggcaccctggtcaccgtgtcatctgctacgcgtgcctctacaaagggaccctccgtgtttcctctggctcccagcagcaagtctacaagcggaggaacagccgctctgggctgcctggtcaaggattactttcccgagcctgtgaccgtgtcctggaatagcggagcactgacaagcggcgtgcacacctttccagccgtgctgcaaagcagcggcctgtactctctgagcagcgtggtcacagtgcctagctctagcctgggcacccagacctacatctgcaatgtgaaccacaagcctagcaacaccaaggtggacaagagagtggaacccaagagctgtgaagtgaaaaccgactccaccgaccacgtgaagcccaaagagacagagaacaccaagcagcccagcaagagctgccacaagcccaaggccatcgtgcacaccgagaaagtgaacatgatgagcctgaccgtgctgggcctgcggatgctgttcgccaaaaccgtggccgtgaacttcctgctgaccgccaagctgttcttcctc

SEQ ID NO: 8163 - DNA, 2706 bp, Artificial Sequence
  Synthetic Polynucloetide
atggccttaccagtgaccgccttgctcctgccgctggccttgctgctccacgccgccaggccggaagtgcagctggttgaatctggcggaggactggttcagcctggcggatctctgagactgtcttgtgccgccagcggcttcagcttcagcgacttttggatgagctgggtccgacaggcccctggcaaaggacttgaatgggtcgccacaatcagccaggccggcagcgagaaggactacgtggactctgtgaagggcagattcaccatcagccgggacaacgccaagaagtccctgtacctccagatgaacagcctgagagccgaggacaccgccgtgtactattgtgcctctggcgtgtacagcttcgactacagaggccagggcaccctggtcacagtctcttctggtaccggcggaggcggatctggcggcggaggtagcggtggcggaggatctgaattcagctacgtgctgacacagcctccatccgtgtctgtggctccaggacagaccgccagaatcacatgcggcggcaacaacatcggcagcaagaccgtgcactggtatcagcagccacctggacaggctccagtggtggtggtgtacgacgacagcgatagacctagcggcatccccgagagattcagcggcagcaattccggcaataccgccacactgaccatcagcagagtggaagctggcgacgaggccgtgtactactgccaagtgtgggacagcagcagcgatcacgtggtgtttggcggcggaacaaagctgacagtgcttctcgagggacagcctaaggccaatcctaccgtgacactgttccctccaagcagcgaagaactccaggccaacaaggccacacttgtgtgcctgatctccgacttctaccctggggctgtgacagtggcttggaaggccgatggatctcctgtgaaagccggcgtggaaaccaccaagccatccaagcagagcaacaacaaatacgccgccagctcctacctgagcctgacacctgagcagtggaagtcccacagatcctacagctgccaagtgacccacgaaggcagcaccgtggaaaagacagtggcccctacagagtgcagcggcagagccgattgcggctttaccagcgagagctaccagcagggcgtgctgagcgccaccatcctgtacgagatcctgctgggcaaggccaccctgtacgccgtgctggtgtctgccctggtgctgatggctatggtcaagcggaaggacagccggggacgcgccaagagaagcggatctggcgtgaagcagaccctgaatttcgacctgctgaagctggctggcgacgtggaatccaacccaggccctactagtatggactggatttggcgcatccttttccttgtcggcgctgctaccggcgcgcattccgggccccagctccagctgcaagagtctggacctggcctggtcaagcctagcgagacactgagcctgacctgtaccgtgtccggcgatagcatcagcagcggcgattactactggggctggatcagacagcctcctggcaaaggactggaatggatcggccacatctactacagcggcgtgacctactacaaccccagcctgaagtccagagtgaccatcagcgtggacaccagccggaaccagttctccctgaagctgtctagcgtgacagccgccgataccgccgtgtactactgcaccagagaggacagcagcaactggcggagtagaggccagggaacactggtcacagttagctctggatccggcggaggcggaagtggaggcggaggatctggcggcggaggctctttcgaacaactccagctgcaagagtctggccctggcctggtcaagcctagcgaaacactgagcctgacctgtaccgtgtctggcggctctatcagctccggcagctatttctggggctggatcagacaacctcctggcaaaggactggaatggatcggctccatctactacagcggcatcacctactacaaccccagcctgaagtccagagtgaccatctccgtggacaccagcaagaaccagttctccctgaagctgagcagcgtgacagccgccgataccgccgtgtattattgtgccagacatgacggcgctgtggccggcctgtttgattattggggacagggcaccctggtcaccgtgtcatctgctacgcgtgcctctacaaagggaccctccgtgtttcctctggctcccagcagcaagtctacaagcggaggaacagccgctctgggctgcctggtcaaggattactttcccgagcctgtgaccgtgtcctggaatagcggagcactgacaagcggcgtgcacacctttccagccgtgctgcaaagcagcggcctgtactctctgagcagcgtggtcacagtgcctagctctagcctgggcacccagacctacatctgcaatgtgaaccacaagcctagcaacaccaaggtggacaagagagtggaacccaagagctgtatccccgaggacacattcttcccaagccccgagagcagctgcgacgtgaagctggtggaaaagagcttcgagacagacaccaacctgaacttccagaacctgagcgtgatcggcttcagaatcctgctgctgaaagtggccggctttaacctgctgatgaccctgcggctgtggtccagc

SEQ ID NO: 8164 - DNA, 2277 bp, Artificial Sequence
  Synthetic Polynucloetide
atggccttaccagtgaccgccttgctcctgccgctggccttgctgctccacgccgccaggccggaagtgcaggttttggagtctggcggaggactggttcagcctggcggatctctgagactgtcttgtgccgccagcggcttcaccttcagcaactttgccatgagctgggtccgacaggcccctggcaaaggacttgaatgggtgtccacaatcagcggcagcgccggcacaacagattacgccgattctgtgaagggcagattcaccatcagccgggacaacagcaagaaaaccctgtacctccagatgaacagcctgcgcgtggaagataccgccgtgtactactgtgccgatggcagaggccccttcttcgattatcgcggccagggcacactggtcaccgtttcttctggtaccggcggaggcggatctggcggcggaggtagcggtggcggaggatctgaattcagctacgtgctgacacagcctccatccgtgtctgtggctccaggacagaccgccagaatcacatgcggcggcaacaacatcggcagcaagaccgtgcactggtatcagcagccacctggacaggctccagtggtggtggtgtacgacgacagcgatagacctagcggcatccccgagagattcagcggcagcaattccggcaataccgccacactgaccatcagcagagtggaagctggcgacgaggccgtgtactactgccaagtgtgggacagcagcagcgatcacgtggtgtttggcggcggaacaaagctgacagtgcttctcgaggacctgaagaacgtgttcccacctgaggtggccgtgttcgagcctagcgaggccgagatcagccacacccagaaagccaccctcgtgtgcctggctaccggcttctaccccgaccatgtggaactgtcttggtgggtcaacggcaaagaggtgcacagcggcgtgtgtaccgacccccagccactgaaagaacagcccgccctgaacgacagccggtactgcctgagcagcagactgagagtgtccgccaccttctggcagaacccccggaaccacttcagatgccaggtgcagttctacggcctgagcgagaacgacgagtggacccaggacagagccaagcccgtgacccagatcgtgtctgccgaagcctggggcagagccgattgcggctttaccagcgagagctaccagcagggcgtgctgagcgccaccatcctgtacgagatcctgctgggcaaggccaccctgtacgccgtgctggtgtctgccctggtgctgatggctatggtcaagcggaaggacagccggggaagggccaagcgatctggatctggagcaacaaacttctcactactcaaacaagcaggtgacgtggaggagaatcccgggcctactagtatggactggatttggcgcatccttttccttgtcggcgctgctaccggcgcgcattccttcgaacaactccagctgcaagagtctggccctggcctggtcaagcctagcgaaacactgagcctgacctgtaccgtgtctggcggctctatcagctccggcagctatttctggggctggatcagacaacctcctggcaaaggactggaatggatcggctccatctactacagcggcatcacctactacaaccccagcctgaagtccagagtgaccatctccgtggacaccagcaagaaccagttctccctgaagctgagcagcgtgacagccgccgataccgccgtgtattattgtgccagacatgacggcgctgtggccggcctgtttgattattggggacagggcaccctggtcaccgtgtcatctgctacgcgtatccagaaccctgatcctgccgtgtaccagctgcgggatagcaagagcagcgacaagagcgtgtgtctgttcaccgacttcgacagccagaccaacgtgtcccagagcaaggactccgacgtgtacatcaccgataagtgcgtgctggacatgcggagcatggacttcaagagcaactccgccgtggcctggtccaacaagtccgatttcgcctgcgccaacgccttcaacaacagcattatccccgaggacacattcttcccaagccccgagagcagctgcgacgtgaagctggtggaaaagagcttcgagacagacaccaacctgaacttccagaacctgagcgtgatcggcttcagaatcctgctgctgaaagtggccggctttaacctgctgatgaccctgcggctgtggtccagc

SEQ ID NO: 8165 - DNA, 2280 bp, Artificial Sequence
  Synthetic Polynucloetide
atggccttaccagtgaccgccttgctcctgccgctggccttgctgctccacgccgccaggccgagctacgtgctgacacagcctccatccgtgtctgtggctccaggacagaccgccagaatcacatgcggcggcaacaacatcggcagcaagaccgtgcactggtatcagcagccacctggacaggctccagtggtggtggtgtacgacgacagcgatagacctagcggcatccccgagagattcagcggcagcaattccggcaataccgccacactgaccatcagcagagtggaagctggcgacgaggccgtgtactactgccaagtgtgggacagcagcagcgatcacgtggtgtttggcggcggaacaaagctgacagtgcttctcgaggacctgaagaacgtgttcccacctgaggtggccgtgttcgagcctagcgaggccgagatcagccacacccagaaagccaccctcgtgtgcctggctaccggcttctaccccgaccatgtggaactgtcttggtgggtcaacggcaaagaggtgcacagcggcgtgtgtaccgacccccagccactgaaagaacagcccgccctgaacgacagccggtactgcctgagcagcagactgagagtgtccgccaccttctggcagaacccccggaaccacttcagatgccaggtgcagttctacggcctgagcgagaacgacgagtggacccaggacagagccaagcccgtgacccagatcgtgtctgccgaagcctggggcagagccgattgcggctttaccagcgagagctaccagcagggcgtgctgagcgccaccatcctgtacgagatcctgctgggcaaggccaccctgtacgccgtgctggtgtctgccctggtgctgatggctatggtcaagcggaaggacagccggggaagggccaagcgatctggatctggagcaacaaacttctcactactcaaacaagcaggtgacgtggaggagaatcccgggcctactagtatggactggatttggcgcatccttttccttgtcggcgctgctaccggcgcccattccgggcccgaagtgcagctggttgaatctggcggaggactggttcaggctggcggatctctgagactgtcttgtgccgccagcggcagaacctttagcatgggctggtttagacaggcccctggcaaagagagagagttcgtcgccgccatcacatactctggcggcagcccttactacgccgactctgtgaagggcagattcaccatcagccgggacaacgccaagaacaccgtgtacctccagatgaacagcctgaagcctgaggacaccgccgtgtactactgcgccgccaatccaacatacggcagcgactggaacgccgagaattggggccagggaacccaagtgacagtgtctagcggatccggcggcggaggatctggcggaggcggatctgggggcggaggctctttcgaacaactccagctgcaagagtctggccctggcctggtcaagcctagcgaaacactgagcctgacctgtaccgtgtctggcggctctatcagctccggcagctatttctggggctggatcagacaacctcctggcaaaggactggaatggatcggctccatctactacagcggcatcacctactacaaccccagcctgaagtccagagtgaccatctccgtggacaccagcaagaaccagttctccctgaagctgagcagcgtgacagccgccgataccgccgtgtattattgtgccagacatgacggcgctgtggccggcctgtttgattattggggacagggcaccctggtcaccgtgtcatctgctacgcgtatccagaaccctgatcctgccgtgtaccagctgcgggatagcaagagcagcgacaagagcgtgtgtctgttcaccgacttcgacagccagaccaacgtgtcccagagcaaggactccgacgtgtacatcaccgataagtgcgtgctggacatgcggagcatggacttcaagagcaactccgccgtggcctggtccaacaagtccgatttcgcctgcgccaacgccttcaacaacagcattatccccgaggacacattcttcccaagccccgagagcagctgcgacgtgaagctggtggaaaagagcttcgagacagacaccaacctgaacttccagaacctgagcgtgatcggcttcagaatcctgctgctgaaagtggccggctttaacctgctgatgaccctgcggctgtggtccagc

SEQ ID NO: 8166 - DNA, 2661 bp, Artificial Sequence
  Synthetic Polynucloetide
atggccttaccagtgaccgccttgctcctgccgctggccttgctgctccacgccgccaggccgagctacgtgctgacacagcctccatccgtgtctgtggctccaggacagaccgccagaatcacatgcggcggcaacaacatcggcagcaagaccgtgcactggtatcagcagccacctggacaggctccagtggtggtggtgtacgacgacagcgatagacctagcggcatccccgagagattcagcggcagcaattccggcaataccgccacactgaccatcagcagagtggaagctggcgacgaggccgtgtactactgccaagtgtgggacagcagcagcgatcacgtggtgtttggcggcggaacaaagctgacagtgcttctcgaggacctgaagaacgtgttcccacctgaggtggccgtgttcgagcctagcgaggccgagatcagccacacccagaaagccaccctcgtgtgcctggctaccggcttctaccccgaccatgtggaactgtcttggtgggtcaacggcaaagaggtgcacagcggcgtgtgtaccgacccccagccactgaaagaacagcccgccctgaacgacagccggtactgcctgagcagcagactgagagtgtccgccaccttctggcagaacccccggaaccacttcagatgccaggtgcagttctacggcctgagcgagaacgacgagtggacccaggacagagccaagcccgtgacccagatcgtgtctgccgaagcctggggcagagccgattgcggctttaccagcgagagctaccagcagggcgtgctgagcgccaccatcctgtacgagatcctgctgggcaaggccaccctgtacgccgtgctggtgtctgccctggtgctgatggctatggtcaagcggaaggacagccggggaagggccaagcgatctggatctggagcaacaaacttctcactactcaaacaagcaggtgacgtggaggagaatcccgggcctactagtatggactggatttggcgcatccttttccttgtcggcgctgctaccggcgcccattcccaactgcaactgcaagagtctggccctggcctggtcaagccttctgaaaccctgagcctgacctgtaccgtgtccggcggctctatcagcagcggcgattactactggggctggatcagacagcctccaggcaagggactcgaatggatcggcagcatcagctacagcggctccacctactacaacccaagcctgaagtccagagtgaccatcagcgtggacaccagcagaaaccagttctccctgaagctgagcagcgtgacagccgccgatacagccgtgtattattgcaccagagaggacagcagcaactggcggagtagaggacagggcacactggtcacagtgtcctcttctggaggcggtggaagcggtggaggaggatctgaagtgcagctggttgaatctggcggaggactggttcaggctggcggatctctgagactgtcttgtgccgccagcggcagaacctttagcatgggctggtttagacaggcccctggcaaagagagagagttcgtcgccgccatcacatactctggcggcagcccttactacgccgactctgtgaagggcagattcaccatcagccgggacaacgccaagaacaccgtgtacctccagatgaacagcctgaagcctgaggacaccgccgtgtactactgcgccgccaatccaacatacggcagcgactggaacgccgagaattggggccagggaacccaagtgacagtgtctagcggatccggcggcggaggatctggcggaggcggatctgggggcggaggctctttcgaacaactccagctgcaagagtctggccctggcctggtcaagcctagcgaaacactgagcctgacctgtaccgtgtctggcggctctatcagctccggcagctatttctggggctggatcagacaacctcctggcaaaggactggaatggatcggctccatctactacagcggcatcacctactacaaccccagcctgaagtccagagtgaccatctccgtggacaccagcaagaaccagttctccctgaagctgagcagcgtgacagccgccgataccgccgtgtattattgtgccagacatgacggcgctgtggccggcctgtttgattattggggacagggcaccctggtcaccgtgtcatctgctacgcgtatccagaaccctgatcctgccgtgtaccagctgcgggatagcaagagcagcgacaagagcgtgtgtctgttcaccgacttcgacagccagaccaacgtgtcccagagcaaggactccgacgtgtacatcaccgataagtgcgtgctggacatgcggagcatggacttcaagagcaactccgccgtggcctggtccaacaagtccgatttcgcctgcgccaacgccttcaacaacagcattatccccgaggacacattcttcccaagccccgagagcagctgcgacgtgaagctggtggaaaagagcttcgagacagacaccaacctgaacttccagaacctgagcgtgatcggcttcagaatcctgctgctgaaagtggccggctttaacctgctgatgaccctgcggctgtggtccagc

SEQ ID NO: 8167 - DNA, 2688 bp, Artificial Sequence
  Synthetic Polynucloetide
atggccttaccagtgaccgccttgctcctgccgctggccttgctgctccacgccgccaggccggaagtgcaggttttggagtctggcggaggactggttcagcctggcggatctctgagactgtcttgtgccgccagcggcttcaccttcagcaactttgccatgagctgggtccgacaggcccctggcaaaggacttgaatgggtgtccacaatcagcggcagcgccggcacaacagattacgccgattctgtgaagggcagattcaccatcagccgggacaacagcaagaaaaccctgtacctccagatgaacagcctgcgcgtggaagataccgccgtgtactactgtgccgatggcagaggccccttcttcgattatcgcggccagggcacactggtcaccgtttcttctggtaccggcggaggcggatctggcggcggaggtagcggtggcggaggatctgaattcagctacgtgctgacacagcctccatccgtgtctgtggctccaggacagaccgccagaatcacatgcggcggcaacaacatcggcagcaagaccgtgcactggtatcagcagccacctggacaggctccagtggtggtggtgtacgacgacagcgatagacctagcggcatccccgagagattcagcggcagcaattccggcaataccgccacactgaccatcagcagagtggaagctggcgacgaggccgtgtactactgccaagtgtgggacagcagcagcgatcacgtggtgtttggcggcggaacaaagctgacagtgcttctcgaggacctgaagaacgtgttcccacctgaggtggccgtgttcgagcctagcgaggccgagatcagccacacccagaaagccaccctcgtgtgcctggctaccggcttctaccccgaccatgtggaactgtcttggtgggtcaacggcaaagaggtgcacagcggcgtgtgtaccgacccccagccactgaaagaacagcccgccctgaacgacagccggtactgcctgagcagcagactgagagtgtccgccaccttctggcagaacccccggaaccacttcagatgccaggtgcagttctacggcctgagcgagaacgacgagtggacccaggacagagccaagcccgtgacccagatcgtgtctgccgaagcctggggcagagccgattgcggctttaccagcgagagctaccagcagggcgtgctgagcgccaccatcctgtacgagatcctgctgggcaaggccaccctgtacgccgtgctggtgtctgccctggtgctgatggctatggtcaagcggaaggacagccggggaagggccaagcgatctggatctggagcaacaaacttctcactactcaaacaagcaggtgacgtggaggagaatcccgggcctactagtatggactggatttggcgcatccttttccttgtcggcgctgctaccggcgcccattccgggcccgaagtgcagctggttgaatctggcggaggactggttcaggctggcggatctctgagactgtcttgtgccgccagcggcagaacctttagcatgggctggtttagacaggcccctggcaaagagagagagttcgtcgccgccatcacatacagcggcggcagcccttactacgcctcttctgtcagaggccggttcaccatcagccgggacaacgccaagaacaccgtgtacctccagatgaacagcctgaagccagaggacaccgccgtgtactactgtgccgccaatccaacctacggcagcgactggaatgccgagaattggggccagggcacccaagtgacagtgtctagtggatccggcggcggaggatctggcggaggcggatctgggggcggaggctctttcgaacaactccagctgcaagagtctggccctggcctggtcaagcctagcgaaacactgagcctgacctgtaccgtgtctggcggctctatcagctccggcagctatttctggggctggatcagacaacctcctggcaaaggactggaatggatcggctccatctactacagcggcatcacctactacaaccccagcctgaagtccagagtgaccatctccgtggacaccagcaagaaccagttctccctgaagctgagcagcgtgacagccgccgataccgccgtgtattattgtgccagacatgacggcgctgtggccggcctgtttgattattggggacagggcaccctggtcaccgtgtcatctgctacgcgtatccagaaccctgatcctgccgtgtaccagctgcgggatagcaagagcagcgacaagagcgtgtgtctgttcaccgacttcgacagccagaccaacgtgtcccagagcaaggactccgacgtgtacatcaccgataagtgcgtgctggacatgcggagcatggacttcaagagcaactccgccgtggcctggtccaacaagtccgatttcgcctgcgccaacgccttcaacaacagcattatccccgaggacacattcttcccaagccccgagagcagctgcgacgtgaagctggtggaaaagagcttcgagacagacaccaacctgaacttccagaacctgagcgtgatcggcttcagaatcctgctgctgaaagtggccggctttaacctgctgatgaccctgcggctgtggtccagc

SEQ ID NO: 8168 - DNA, 2184 bp, Artificial Sequence
  Synthetic Polynucloetide
atggccttaccagtgaccgccttgctcctgccgctggccttgctgctccacgccgccaggccgagctacgtgctgacacagcctccatccgtgtctgtggctccaggacagaccgccagaatcacatgcggcggcaagaacatcggcagcaagagcgtgcactggtatcagcagccacctggacaggctccagtggtggtggtgtacgacgacagcgatagacctagcggcatccccgagagattcagcggcagcaattccggcaataccgccacactgaccatcagcagagtggaagctggcgacgaggccgtgtactactgccaagtgtgggacagcagcagcgatcacgtggtgtttggcggcggaacaaagctgacagtgcttggcggaggcggaagtggaggcggaggatctggcggcggaggctctcaactccagctgcaagagtctggccctggcctggtcaagcctagcgaaacactgagcctgacctgtaccgtgtctggcggctctatcagctccagcagctatttctggggctggatcagacaacctcctggcaaaggactggaatggatcggctccatctactacagcggcatcacctactacaaccccagcctgaagtccagagtgaccatctccgtggacaccagcaagaaccagttctccctgaagctgagcagcgtgacagccgccgataccgccgtgtattattgtgccagacatgacggcgctgtggccggcctgtttgattattggggacagggcaccctggtcaccgtgtcatctgctacgcgtgagcagaaactgatctcggaagaggatctggcgaagcccaccacgacgccagcgccgcgaccaccaacaccggcgcccaccatcgcgtcgcagcccctgtccctgcgcccagaggcgtgccggccagcggcggggggcgcagtgcacacgagggggctggacttcgcctgtgacatctacatctgggcgcccttggccgggacttgtggggtccttctcctgtcactggttatcaccctttactgcaaacggggcagaaagaaactcctgtatatattcaaacaaccatttatgagaccagtacaaactactcaagaggaagatggctgtagctgccgatttccagaagaagaagaaggaggatgtgaactgagagtgaagttcagcaggagcgcagacgcccccgcgtaccagcagggccagaaccagctctataacgagctgaatctaggacgaagagaggagtacgatgttttggacaagagacgtggccgggaccctgagatggggggaaagccgagaaggaagaaccctcaggaaggcctgtacaatgaactgcagaaagataagatggcggaggcctacagtgagattgggatgaaaggcgagcgccggaggggcaaggggcacgatggcctttaccagggtctcagtacagccaccaaggacacctacgacgcccttcacatgcaggccctgccccctcgctctagtggctccggcgagggcagaggaagtctactaacctgcggagatgtggaagaaaatcctggcccacatatgaccgagtacaagcccacggtgcgcctcgccacccgcgacgacgtccccagggccgtacgcaccctcgccgccgcgttcgccgactaccccgccacgcgccacaccgtcgatccggaccgccacatcgagcgggtcaccgagctgcaagaactcttcctcacgcgcgtcgggctcgacatcggcaaggtgtgggtcgcggacgacggcgccgcggtggcggtctggaccacgccggagagcgtcgaagcgggggcggtgttcgccgagatcggcccgcgcatggccgagttgagcggttcccggctggccgcgcagcaacagatggaaggcctcctggcgccgcaccggcccaaggagcccgcgtggttcctggccaccgtcggcgtctcgcccgaccaccagggcaagggtctgggcagcgccgtcgtgctccccggagtggaggcggccgagcgcgccggggtgcccgccttcctggagacctccgcgccccgcaacctccccttctacgagcggctcggcttcaccgtcaccgccgacgtcgaggtgcccgaaggaccgcgcacctggtgcatgacccgcaagcccggtgcctga

SEQ ID NO: 8169 - DNA, 2166 bp, Artificial Sequence
  Synthetic Polynucloetide
atggccttaccagtgaccgccttgctcctgccgctggccttgctgctccacgccgccaggccgagctacgtgctgacacagcctccatccgtgtctgtggctccaggacagaccgccagaatcacatgcggcggcaagaacatcggcagcaagagcgtgcactggtatcagcagccacctggacaggctccagtggtggtggtgtacgacgacagcgatagacctagcggcatccccgagagattcagcggcagcaattccggcaataccgccacactgaccatcagcagagtggaagctggcgacgaggccgtgtactactgccaagtgtgggacagcagcagcgatcacgtggtgtttggcggcggaacaaagctgacagtgcttggcggaggcggaagtggaggcggaggatctggcggcggaggctctcaactccagctgcaagagtctggccctggcctggtcaagcctagcgaaacactgagcctgacctgtaccgtgtctggcggctctatcagctccagcagctatttctggggctggatcagacaacctcctggcaaaggactggaatggatcggctccatctactacagcggcatcacctactacaaccccagcctgaagtccagagtgaccatctccgtggacaccagcaagaaccagttctccctgaagctgagcagcgtgacagccgccgataccgccgtgtattattgtgccagacatgacggcgctgtggccggcctgtttgattattggggacagggcaccctggtcaccgtgtcatctgctacgcgtgagcagaaactgatctcggaagaggatctgaaaattgaagttatgtatcctcctccttacctagacaatgagaagagcaatggaaccattatccatgtgaaagggaaacacctttgtccaagtcccctatttcccggaccttctaagcccttttgggtgctggtggtggttgggggagtcctggcttgctatagcttgctagtaacagtggcctttattattttctgggtgaggagtaagaggagcaggctcctgcacagtgactacatgaacatgactccacgccgccccggacccacccgcaagcattaccagccctatgccccaccacgcgacttcgcagcctatcgctccagagtgaagttcagcaggagcgcagacgcccccgcgtaccagcagggccagaaccagctctataacgagctcaatctaggacgaagagaggagtacgatgttttggacaagagacgtggccgggaccctgagatggggggaaagccgagaaggaagaaccctcaggaaggcctgtacaatgaactgcagaaagataagatggcggaggcctacagtgagattgggatgaaaggcgagcgccggaggggcaaggggcacgatggcctttaccagggtctcagtacagccaccaaggacacctacgacgcccttcacatgcaggccctgccccctcgctctagtggctccggcgagggcagaggaagtctactaacctgcggagatgtggaagaaaatcctggcccacatatgaccgagtacaagcccacggtgcgcctcgccacccgcgacgacgtccccagggccgtacgcaccctcgccgccgcgttcgccgactaccccgccacgcgccacaccgtcgatccggaccgccacatcgagcgggtcaccgagctgcaagaactcttcctcacgcgcgtcgggctcgacatcggcaaggtgtgggtcgcggacgacggcgccgcggtggcggtctggaccacgccggagagcgtcgaagcgggggcggtgttcgccgagatcggcccgcgcatggccgagttgagcggttcccggctggccgcgcagcaacagatggaaggcctcctggcgccgcaccggcccaaggagcccgcgtggttcctggccaccgtcggcgtctcgcccgaccaccagggcaagggtctgggcagcgccgtcgtgctccccggagtggaggcggccgagcgcgccggggtgcccgccttcctggagacctccgcgccccgcaacctccccttctacgagcggctcggcttcaccgtcaccgccgacgtcgaggtgcccgaaggaccgcgcacctggtgcatgacccgcaagcccggtgcctga

SEQ ID NO: 8170 - DNA, 1494 bp, Artificial Sequence
  Synthetic Polynucloetide
atggccttaccagtgaccgccttgctcctgccgctggccttgctgctccacgccgccaggccgagctacgtgctgacacagcctccatccgtgtctgtggctccaggacagaccgccagaatcacatgcggcggcaagaacatcggcagcaagagcgtgcactggtatcagcagccacctggacaggctccagtggtggtggtgtacgacgacagcgatagacctagcggcatccccgagagattcagcggcagcaattccggcaataccgccacactgaccatcagcagagtggaagctggcgacgaggccgtgtactactgccaagtgtgggacagcagcagcgatcacgtggtgtttggcggcggaacaaagctgacagtgcttggcggaggcggaagtggaggcggaggatctggcggcggaggctctcaactccagctgcaagagtctggccctggcctggtcaagcctagcgaaacactgagcctgacctgtaccgtgtctggcggctctatcagctccagcagctatttctggggctggatcagacaacctcctggcaaaggactggaatggatcggctccatctactacagcggcatcacctactacaaccccagcctgaagtccagagtgaccatctccgtggacaccagcaagaaccagttctccctgaagctgagcagcgtgacagccgccgataccgccgtgtattattgtgccagacatgacggcgctgtggccggcctgtttgattattggggacagggcaccctggtcaccgtgtcatctgctacgcgtgagcagaaactgatctcggaagaggatctgaaaattgaagttatgtatcctcctccttacctagacaatgagaagagcaatggaaccattatccatgtgaaagggaaacacctttgtccaagtcccctatttcccggaccttctaagcccttttgggtgctggtggtggttgggggagtcctggcttgctatagcttgctagtaacagtggcctttattattttctgggtgaggagtaagaggagcaggctcctgcacagtgactacatgaacatgactccacgccgccccggacccacccgcaagcattaccagccctatgccccaccacgcgacttcgcagcctatcgctccagagtgaagttcagcaggagcgcagacgcccccgcgtaccagcagggccagaaccagctctataacgagctcaatctaggacgaagagaggagtacgatgttttggacaagagacgtggccgggaccctgagatggggggaaagccgagaaggaagaaccctcaggaaggcctgtacaatgaactgcagaaagataagatggcggaggcctacagtgagattgggatgaaaggcgagcgccggaggggcaaggggcacgatggcctttaccagggtctcagtacagccaccaaggacacctacgacgcccttcacatgcaggccctgccccctcgc

SEQ ID NO: 8171 - DNA, 1515 bp, Artificial Sequence
  Synthetic Polynucloetide
atggccttaccagtgaccgccttgctcctgccgctggccttgctgctccacgccgccaggccgagctacgtgctgacacagcctccatccgtgtctgtggctccaggacagaccgccagaatcacatgcggcggcaagaacatcggcagcaagagcgtgcactggtatcagcagccacctggacaggctccagtggtggtggtgtacgacgacagcgatagacctagcggcatccccgagagattcagcggcagcaattccggcaataccgccacactgaccatcagcagagtggaagctggcgacgaggccgtgtactactgccaagtgtgggacagcagcagcgatcacgtggtgtttggcggcggaacaaagctgacagtgcttggcggaggcggaagtggaggcggaggatctggcggcggaggctctcaactccagctgcaagagtctggccctggcctggtcaagcctagcgaaacactgagcctgacctgtaccgtgtctggcggctctatcagctccagcagctatttctggggctggatcagacaacctcctggcaaaggactggaatggatcggctccatctactacagcggcatcacctactacaaccccagcctgaagtccagagtgaccatctccgtggacaccagcaagaaccagttctccctgaagctgagcagcgtgacagccgccgataccgccgtgtattattgtgccagacatgacggcgctgtggccggcctgtttgattattggggacagggcaccctggtcaccgtgtcatctgctacgcgtgagcagaaactgatctcggaagaggatctggcgaagcccaccacgacgccagcgccgcgaccaccaacaccggcgcccaccatcgcgtcgcagcccctgtccctgcgcccagaggcgtgccggccagcggcggggggcgcagtgcacacgagggggctggacttcgcctgtgacatctacatctgggcgcccttggccgggacttgtggggtccttctcctgtcactggttatcaccctttactgcaaacggggcagaaagaaactcctgtatatattcaaacaaccatttatgagaccagtacaaactactcaagaggaagatggctgtagctgccgatttccagaagaagaagaaggaggatgtgaactgagagtgaagttcagcaggagcgcagacgcccccgcgtaccagcagggccagaaccagctctataacgagctgaatctaggacgaagagaggagtacgatgttttggacaagagacgtggccgggaccctgagatggggggaaagccgagaaggaagaaccctcaggaaggcctgtacaatgaactgcagaaagataagatggcggaggcctacagtgagattgggatgaaaggcgagcgccggaggggcaaggggcacgatggcctttaccagggtctcagtacagccaccaaggacacctacgacgcccttcacatgcaggccctgccccctcgctga

SEQ ID NO: 8172 - DNA, 1515 bp, Artificial Sequence
  Synthetic Polynucloetide
atggccttaccagtgaccgccttgctcctgccgctggccttgctgctccacgccgccaggccgcaactccagctgcaagagtctggccctggcctggtcaagcctagcgaaacactgagcctgacctgtaccgtgtctggcggctctatcagctccagcagctatttctggggctggatcagacaacctcctggcaaaggactggaatggatcggctccatctactacagcggcatcacctactacaaccccagcctgaagtccagagtgaccatctccgtggacaccagcaagaaccagttctccctgaagctgagcagcgtgacagccgccgataccgccgtgtattattgtgccagacatgacggcgctgtggccggcctgtttgattattggggacagggcaccctggtcaccgtgtcatctgctggcggaggcggaagtggaggcggaggatctggcggcggaggctctagctacgtgctgacacagcctccatccgtgtctgtggctccaggacagaccgccagaatcacatgcggcggcaagaacatcggcagcaagagcgtgcactggtatcagcagccacctggacaggctccagtggtggtggtgtacgacgacagcgatagacctagcggcatccccgagagattcagcggcagcaattccggcaataccgccacactgaccatcagcagagtggaagctggcgacgaggccgtgtactactgccaagtgtgggacagcagcagcgatcacgtggtgtttggcggcggaacaaagctgacagtgcttacgcgtgagcagaaactgatctcggaagaggatctggcgaagcccaccacgacgccagcgccgcgaccaccaacaccggcgcccaccatcgcgtcgcagcccctgtccctgcgcccagaggcgtgccggccagcggcggggggcgcagtgcacacgagggggctggacttcgcctgtgacatctacatctgggcgcccttggccgggacttgtggggtccttctcctgtcactggttatcaccctttactgcaaacggggcagaaagaaactcctgtatatattcaaacaaccatttatgagaccagtacaaactactcaagaggaagatggctgtagctgccgatttccagaagaagaagaaggaggatgtgaactgagagtgaagttcagcaggagcgcagacgcccccgcgtaccagcagggccagaaccagctctataacgagctgaatctaggacgaagagaggagtacgatgttttggacaagagacgtggccgggaccctgagatggggggaaagccgagaaggaagaaccctcaggaaggcctgtacaatgaactgcagaaagataagatggcggaggcctacagtgagattgggatgaaaggcgagcgccggaggggcaaggggcacgatggcctttaccagggtctcagtacagccaccaaggacacctacgacgcccttcacatgcaggccctgccccctcgctga

SEQ ID NO: 8173 - DNA, 2754 bp, Artificial Sequence
  Synthetic Polynucloetide
atggccttaccagtgaccgccttgctcctgccgctggccttgctgctccacgccgccaggccgagctacgtgctgacacagcctccatccgtgtctgtggctccaggacagaccgccagaatcacatgcggcggcaagaacatcggcagcaagagcgtgcactggtatcagcagccacctggacaggctccagtggtggtggtgtacgacgacagcgatagacctagcggcatccccgagagattcagcggcagcaattccggcaataccgccacactgaccatcagcagagtggaagctggcgacgaggccgtgtactactgccaagtgtgggacagcagcagcgatcacgtggtgtttggcggcggaacaaagctgacagtgcttggcggaggcggaagtggaggcggaggatctggcggcggaggctctcaactccagctgcaagagtctggccctggcctggtcaagcctagcgaaacactgagcctgacctgtaccgtgtctggcggctctatcagctccagcagctatttctggggctggatcagacaacctcctggcaaaggactggaatggatcggctccatctactacagcggcatcacctactacaaccccagcctgaagtccagagtgaccatctccgtggacaccagcaagaaccagttctccctgaagctgagcagcgtgacagccgccgataccgccgtgtattattgtgccagacatgacggcgctgtggccggcctgtttgattattggggacagggcaccctggtcaccgtgtcatctgctacgcgtgagcagaaactgatctcggaagaggatctggcgaagcccaccacgacgccagcgccgcgaccaccaacaccggcgcccaccatcgcgtcgcagcccctgtccctgcgcccagaggcgtgccggccagcggcggggggcgcagtgcacacgagggggctggacttcgcctgtgacatctacatctgggcgcccttggccgggacttgtggggtccttctcctgtcactggttatcaccctttactgcgggcgcgccagagtgaagttcagcaggagcgcagacgcccccgcgtaccagcagggccagaaccagctctataacgagctgaatctaggacgaagagaggagtacgatgttttggacaagagacgtggccgggaccctgagatggggggaaagccgagaaggaagaaccctcaggaaggcctgtacaatgaactgcagaaagataagatggcggaggcctacagtgagattgggatgaaaggcgagcgccggaggggcaaggggcacgatggcctttaccagggtctcagtacagccaccaaggacacctacgacgcccttcacatgcaggccctgccccctcgctctagaggatctggagcaacaaacttctcactactcaaacaagcaggtgacgtggaggagaatcccgggcctgggatccacatggccacttacgaggttctctgtgaggtggcgcggaaactgggcacggatgacagggaagtggtattgttcctcctaaacgtgttcatacctcaacccacactggcccaattaattggagctcttagagctttaaaggaggagggcaggttaacgtttcccctgttagcggaatgtctgtttcgtgcaggtcgcagagacctcttgcgcgacctgcttcacttagacccgcgttttttagagcgccacctagcgggcacaatgagttatttcagcccttatcagctcactgttctccacgtagacggggagctgtgtgcgagggatattaggtctttgatatttttaagcaaggacactatagggtctcgcagcacaccacagacattcttacactgggtgtactgtatggaaaacttagacctactgggtcccactgacgtggatgccctaatgtcaatgcttagatctttgtcaagagtagacctacagcgccaagtgcaaaccctaatgggccttcacctttccggcccatcacactcccaacactatcgccatacaccactcgagaccgatttctacgactacaaggacgacgatgacaagactagtggctccggcgagggcagaggaagtctactaacctgcggagatgtggaagaaaatcctggcccacatatgaccgagtacaagcccacggtgcgcctcgccacccgcgacgacgtccccagggccgtacgcaccctcgccgccgcgttcgccgactaccccgccacgcgccacaccgtcgatccggaccgccacatcgagcgggtcaccgagctgcaagaactcttcctcacgcgcgtcgggctcgacatcggcaaggtgtgggtcgcggacgacggcgccgcggtggcggtctggaccacgccggagagcgtcgaagcgggggcggtgttcgccgagatcggcccgcgcatggccgagttgagcggttcccggctggccgcgcagcaacagatggaaggcctcctggcgccgcaccggcccaaggagcccgcgtggttcctggccaccgtcggcgtctcgcccgaccaccagggcaagggtctgggcagcgccgtcgtgctccccggagtggaggcggccgagcgcgccggggtgcccgccttcctggagacctccgcgccccgcaacctccccttctacgagcggctcggcttcaccgtcaccgccgacgtcgaggtgcccgaaggaccgcgcacctggtgcatgacccgcaagcccggtgcctga

SEQ ID NO: 8174 - DNA, 2574 bp, Artificial Sequence
  Synthetic Polynucloetide
atggccttaccagtgaccgccttgctcctgccgctggccttgctgctccacgccgccaggccgagctacgtgctgacacagcctccatccgtgtctgtggctccaggacagaccgccagaatcacatgcggcggcaagaacatcggcagcaagagcgtgcactggtatcagcagccacctggacaggctccagtggtggtggtgtacgacgacagcgatagacctagcggcatccccgagagattcagcggcagcaattccggcaataccgccacactgaccatcagcagagtggaagctggcgacgaggccgtgtactactgccaagtgtgggacagcagcagcgatcacgtggtgtttggcggcggaacaaagctgacagtgcttctcgagatccagaaccctgatcctgccgtgtaccagctgcgggatagcaagagcagcgacaagagcgtgtgtctgttcaccgacttcgacagccagaccaacgtgtcccagagcaaggactccgacgtgtacatcaccgataagtgcgtgctggacatgcggagcatggacttcaagagcaactccgccgtggcctggtccaacaagtccgatttcgcctgcgccaacgccttcaacaacagcattatccccgaggacacattcttcccaagcagcgacgtgccctgcgacgtgaagctggtggaaaagagcttcgagacagacaccaacctgaacttccagaacctgagcgtgatcggcttcagaatcctgctgctgaaagtggccggctttaacctgctgatgaccctgcggctgtggtccagccgcgccaagagaagcggatctggcgtgaagcagaccctgaatttcgacctgctgaagctggctggcgacgtggaatccaacccaggccctactagtatggactggatttggcgcatccttttccttgtcggcgctgctaccggcgcgcattccttcgaacaactccagctgcaagagtctggccctggcctggtcaagcctagcgaaacactgagcctgacctgtaccgtgtctggcggctctatcagctccagcagctatttctggggctggatcagacaacctcctggcaaaggactggaatggatcggctccatctactacagcggcatcacctactacaaccccagcctgaagtccagagtgaccatctccgtggacaccagcaagaaccagttctccctgaagctgagcagcgtgacagccgccgataccgccgtgtattattgtgccagacatgacggcgctgtggccggcctgtttgattattggggacagggcaccctggtcaccgtgtcatctgctacgcgtgaggacctgaagaacgtgttcccacctgaggtggccgtgttcgagcctagcaaggccgagatcgcccacacccagaaagccaccctcgtgtgcctggctaccggcttctaccccgaccatgtggaactgtcttggtgggtcaacggcaaagaggtgcacagcggcgtgtgtaccgacccccagccactgaaagaacagcccgccctgaacgacagccggtactgcctgagcagcagactgagagtgtccgccaccttctggcagaacccccggaaccacttcagatgccaggtgcagttctacggcctgagcgagaacgacgagtggacccaggacagagccaagcccgtgacccagatcgtgtctgccgaagcctggggcagagccgattgcggcatcaccagcgccagctaccaccagggcgtgctgagcgccaccatcctgtacgagatcctgctgggcaaggccaccctgtacgccgtgctggtgtctgccctggtgctgatggctatggtcaagcggaaggacagccggggaagggccaagcgatctggatctggagcaacaaacttctcactactcaaacaagcaggtgacgtggaggagaatcccgggccttctagaggccatatgaccgagtacaagcccacggtgcgcctcgccacccgcgacgacgtccccagggccgtacgcaccctcgccgccgcgttcgccgactaccccgccacgcgccacaccgtcgatccggaccgccacatcgagcgggtcaccgagctgcaagaactcttcctcacgcgcgtcgggctcgacatcggcaaggtgtgggtcgcggacgacggcgccgcggtggcggtctggaccacgccggagagcgtcgaagcgggggcggtgttcgccgagatcggcccgcgcatggccgagttgagcggttcccggctggccgcgcagcaacagatggaaggcctcctggcgccgcaccggcccaaggagcccgcgtggttcctggccaccgtcggcgtctcgcccgaccaccagggcaagggtctgggcagcgccgtcgtgctccccggagtggaggcggccgagcgcgccggggtgcccgccttcctggagacctccgcgccccgcaacctccccttctacgagcggctcggcttcaccgtcaccgccgacgtcgaggtgcccgaaggaccgcgcacctggtgcatgacccgcaagcccggtgcctga

SEQ ID NO: 8175 - DNA, 2571 bp, Artificial Sequence
  Synthetic Polynucloetide
atggccttaccagtgaccgccttgctcctgccgctggccttgctgctccacgccgccaggccgagctacgtgctgacacagcctccatccgtgtctgtggctccaggacagaccgccagaatcacatgcggcggcaagaacatcggcagcaagagcgtgcactggtatcagcagccacctggacaggctccagtggtggtggtgtacgacgacagcgatagacctagcggcatccccgagagattcagcggcagcaattccggcaataccgccacactgaccatcagcagagtggaagctggcgacgaggccgtgtactactgccaagtgtgggacagcagcagcgatcacgtggtgtttggcggcggaacaaagctgacagtgcttctcgaggacctgaagaacgtgttcccacctgaggtggccgtgttcgagcctagcaaggccgagatcgcccacacccagaaagccaccctcgtgtgcctggctaccggcttctaccccgaccatgtggaactgtcttggtgggtcaacggcaaagaggtgcacagcggcgtgtgtaccgacccccagccactgaaagaacagcccgccctgaacgacagccggtactgcctgagcagcagactgagagtgtccgccaccttctggcagaacccccggaaccacttcagatgccaggtgcagttctacggcctgagcgagaacgacgagtggacccaggacagagccaagcccgtgacccagatcgtgtctgccgaagcctggggcagagccgattgcggcatcaccagcgccagctaccaccagggcgtgctgagcgccaccatcctgtacgagatcctgctgggcaaggccaccctgtacgccgtgctggtgtctgccctggtgctgatggctatggtcaagcggaaggacagccggggaagggccaagcgatctggatctggagcaacaaacttctcactactcaaacaagcaggtgacgtggaggagaatcccgggcctactagtatggactggatttggcgcatccttttccttgtcggcgctgctaccggcgcgcattccttcgaacaactccagctgcaagagtctggccctggcctggtcaagcctagcgaaacactgagcctgacctgtaccgtgtctggcggctctatcagctccagcagctatttctggggctggatcagacaacctcctggcaaaggactggaatggatcggctccatctactacagcggcatcacctactacaaccccagcctgaagtccagagtgaccatctccgtggacaccagcaagaaccagttctccctgaagctgagcagcgtgacagccgccgataccgccgtgtattattgtgccagacatgacggcgctgtggccggcctgtttgattattggggacagggcaccctggtcaccgtgtcatctgctacgcgtatccagaaccctgatcctgccgtgtaccagctgcgggatagcaagagcagcgacaagagcgtgtgtctgttcaccgacttcgacagccagaccaacgtgtcccagagcaaggactccgacgtgtacatcaccgataagtgcgtgctggacatgcggagcatggacttcaagagcaactccgccgtggcctggtccaacaagtccgatttcgcctgcgccaacgccttcaacaacagcattatccccgaggacacattcttcccaagcagcgacgtgccctgcgacgtgaagctggtggaaaagagcttcgagacagacaccaacctgaacttccagaacctgagcgtgatcggcttcagaatcctgctgctgaaagtggccggctttaacctgctgatgaccctgcggctgtggtccagccgcgccaagagaagcggatctggcgtgaagcagaccctgaatttcgacctgctgaagctggctggcgacgtggaatccaacccaggcccttctagaggccatatgaccgagtacaagcccacggtgcgcctcgccacccgcgacgacgtccccagggccgtacgcaccctcgccgccgcgttcgccgactaccccgccacgcgccacaccgtcgatccggaccgccacatcgagcgggtcaccgagctgcaagaactcttcctcacgcgcgtcgggctcgacatcggcaaggtgtgggtcgcggacgacggcgccgcggtggcggtctggaccacgccggagagcgtcgaagcgggggcggtgttcgccgagatcggcccgcgcatggccgagttgagcggttcccggctggccgcgcagcaacagatggaaggcctcctggcgccgcaccggcccaaggagcccgcgtggttcctggccaccgtcggcgtctcgcccgaccaccagggcaagggtctgggcagcgccgtcgtgctccccggagtggaggcggccgagcgcgccggggtgcccgccttcctggagacctccgcgccccgcaacctccccttctacgagcggctcggcttcaccgtcaccgccgacgtcgaggtgcccgaaggaccgcgcacctggtgcatgacccgcaagcccggtgcctga

SEQ ID NO: 8176 - DNA, 1869 bp, Artificial Sequence
  Synthetic Polynucloetide
atggccttaccagtgaccgccttgctcctgccgctggccttgctgctccacgccgccaggccgagctacgtgctgacacagcctccatccgtgtctgtggctccaggacagaccgccagaatcacatgcggcggcaagaacatcggcagcaagagcgtgcactggtatcagcagccacctggacaggctccagtggtggtggtgtacgacgacagcgatagacctagcggcatccccgagagattcagcggcagcaattccggcaataccgccacactgaccatcagcagagtggaagctggcgacgaggccgtgtactactgccaagtgtgggacagcagcagcgatcacgtggtgtttggcggcggaacaaagctgacagtgcttctcgaggacctgaagaacgtgttcccacctgaggtggccgtgttcgagcctagcgaggccgagatcagccacacccagaaagccaccctcgtgtgcctggctaccggcttctaccccgaccatgtggaactgtcttggtgggtcaacggcaaagaggtgcacagcggcgtgtgtaccgacccccagccactgaaagaacagcccgccctgaacgacagccggtactgcctgagcagcagactgagagtgtccgccaccttctggcagaacccccggaaccacttcagatgccaggtgcagttctacggcctgagcgagaacgacgagtggacccaggacagagccaagcccgtgacccagatcgtgtctgccgaagcctggggcagagccgattgcggctttaccagcgagagctaccagcagggcgtgctgagcgccaccatcctgtacgagatcctgctgggcaaggccaccctgtacgccgtgctggtgtctgccctggtgctgatggctatggtcaagcggaaggacagccggggaagggccaagcgatctggatctggagcaacaaacttctcactactcaaacaagcaggtgacgtggaggagaatcccgggcctactagtatggactggatttggcgcatccttttccttgtcggcgctgctaccggcgcgcattccttcgaacaactccagctgcaagagtctggccctggcctggtcaagcctagcgaaacactgagcctgacctgtaccgtgtctggcggctctatcagctccagcagctatttctggggctggatcagacaacctcctggcaaaggactggaatggatcggctccatctactacagcggcatcacctactacaaccccagcctgaagtccagagtgaccatctccgtggacaccagcaagaaccagttctccctgaagctgagcagcgtgacagccgccgataccgccgtgtattattgtgccagacatgacggcgctgtggccggcctgtttgattattggggacagggcaccctggtcaccgtgtcatctgctacgcgtatccagaaccctgatcctgccgtgtaccagctgcgggatagcaagagcagcgacaagagcgtgtgtctgttcaccgacttcgacagccagaccaacgtgtcccagagcaaggactccgacgtgtacatcaccgataagtgcgtgctggacatgcggagcatggacttcaagagcaactccgccgtggcctggtccaacaagtccgatttcgcctgcgccaacgccttcaacaacagcattatccccgaggacacattcttcccaagccccgagagcagctgcgacgtgaagctggtggaaaagagcttcgagacagacaccaacctgaacttccagaacctgagcgtgatcggcttcagaatcctgctgctgaaagtggccggctttaacctgctgatgaccctgcggctgtggtccagc

SEQ ID NO: 8177 - DNA, 2544 bp, Artificial Sequence
  Synthetic Polynucloetide
atggccttaccagtgaccgccttgctcctgccgctggccttgctgctccacgccgccaggccgagctacgtgctgacacagcctccatccgtgtctgtggctccaggacagaccgccagaatcacatgcggcggcaagaacatcggcagcaagagcgtgcactggtatcagcagccacctggacaggctccagtggtggtggtgtacgacgacagcgatagacctagcggcatccccgagagattcagcggcagcaattccggcaataccgccacactgaccatcagcagagtggaagctggcgacgaggccgtgtactactgccaagtgtgggacagcagcagcgatcacgtggtgtttggcggcggaacaaagctgacagtgcttctcgaggacctgaagaacgtgttcccacctgaggtggccgtgttcgagcctagcgaggccgagatcagccacacccagaaagccaccctcgtgtgcctggctaccggcttctaccccgaccatgtggaactgtcttggtgggtcaacggcaaagaggtgcacagcggcgtgtgtaccgacccccagccactgaaagaacagcccgccctgaacgacagccggtactgcctgagcagcagactgagagtgtccgccaccttctggcagaacccccggaaccacttcagatgccaggtgcagttctacggcctgagcgagaacgacgagtggacccaggacagagccaagcccgtgacccagatcgtgtctgccgaagcctggggcagagccgattgcggctttaccagcgagagctaccagcagggcgtgctgagcgccaccatcctgtacgagatcctgctgggcaaggccaccctgtacgccgtgctggtgtctgccctggtgctgatggctatggtcaagcggaaggacagccggggaagggccaagcgatctggatctggagcaacaaacttctcactactcaaacaagcaggtgacgtggaggagaatcccgggcctactagtatggactggatttggcgcatccttttccttgtcggcgctgctaccggcgcgcattccttcgaacaactccagctgcaagagtctggccctggcctggtcaagcctagcgaaacactgagcctgacctgtaccgtgtctggcggctctatcagctccagcagctatttctggggctggatcagacaacctcctggcaaaggactggaatggatcggctccatctactacagcggcatcacctactacaaccccagcctgaagtccagagtgaccatctccgtggacaccagcaagaaccagttctccctgaagctgagcagcgtgacagccgccgataccgccgtgtattattgtgccagacatgacggcgctgtggccggcctgtttgattattggggacagggcaccctggtcaccgtgtcatctgctacgcgtatccagaaccctgatcctgccgtgtaccagctgcgggatagcaagagcagcgacaagagcgtgtgtctgttcaccgacttcgacagccagaccaacgtgtcccagagcaaggactccgacgtgtacatcaccgataagtgcgtgctggacatgcggagcatggacttcaagagcaactccgccgtggcctggtccaacaagtccgatttcgcctgcgccaacgccttcaacaacagcattatccccgaggacacattcttcccaagccccgagagcagctgcgacgtgaagctggtggaaaagagcttcgagacagacaccaacctgaacttccagaacctgagcgtgatcggcttcagaatcctgctgctgaaagtggccggctttaacctgctgatgaccctgcggctgtggtccagccgcgccaagagaagcggatctggcgtgaagcagaccctgaatttcgacctgctgaagctggctggcgacgtggaatccaacccaggcccttctagaggcgggatccacaccatggctacctacgaggtgctgtgcgaggtggcaagaaagctgggcaccgacgacagagaagtggtgctgttcctgctgaacgtgttcatccctcagcctacactggcccagctgatcggtgcactgagagccctgaaagaggaaggccggctgacctttcctctgctggccgaatgcctgttcagagccggaagaagggatctgctgcgggacctgctgcatctggaccccagatttctggaaagacacctggccggcaccatgagctacttcagcccttaccagctgaccgtgctgcacgttgacggcgaactgtgcgccagagatattcggagcctgatcttcctgagcaaggacaccatcggcagccggtctacccctcagacatttctgcactgggtgtactgcatggaaaacctggacctgctcggccccacagatgtggatgccctgatgtccatgctgagaagcctgagcagagtggacctccagagacaggtgcagacactgatgggactgcacctgagcggacctagccacagccagcactacagacacacccct

SEQ ID NO: 8178 - DNA, 1881 bp, Artificial Sequence
  Synthetic Polynucloetide
atggccttaccagtgaccgccttgctcctgccgctggccttgctgctccacgccgccaggccgagctacgtgctgacacagcctccatccgtgtctgtggctccaggacagaccgccagaatcacatgcggcggcaagaacatcggcagcaagagcgtgcactggtatcagcagccacctggacaggctccagtggtggtggtgtacgacgacagcgatagacctagcggcatccccgagagattcagcggcagcaattccggcaataccgccacactgaccatcagcagagtggaagctggcgacgaggccgtgtactactgccaagtgtgggacagcagcagcgatcacgtggtgtttggcggcggaacaaagctgacagtgcttctcgagatccagaaccctgatcctgccgtgtaccagctgcgggatagcaagagcagcgacaagagcgtgtgtctgttcaccgacttcgacagccagaccaacgtgtcccagagcaaggactccgacgtgtacatcaccgataagtgcgtgctggacatgcggagcatggacttcaagagcaactccgccgtggcctggtccaacaagtccgatttcgcctgcgccaacgccttcaacaacagcattatccccgaggacacattcttcccaagccccgagagcagctgcgacgtgaagctggtggaaaagagcttcgagacagacaccaacctgaacttccagaacctgagcgtgatcggcttcagaatcctgctgctgaaagtggccggctttaacctgctgatgaccctgcggctgtggtccagccgcgccaagagaagcggatctggcgtgaagcagaccctgaatttcgacctgctgaagctggctggcgacgtggaatccaacccaggccctactagtatggactggatttggcgcatccttttccttgtcggcgctgctaccggcgcgcattccttcgaacaactccagctgcaagagtctggccctggcctggtcaagcctagcgaaacactgagcctgacctgtaccgtgtctggcggctctatcagctccagcagctatttctggggctggatcagacaacctcctggcaaaggactggaatggatcggctccatctactacagcggcatcacctactacaaccccagcctgaagtccagagtgaccatctccgtggacaccagcaagaaccagttctccctgaagctgagcagcgtgacagccgccgataccgccgtgtattattgtgccagacatgacggcgctgtggccggcctgtttgattattggggacagggcaccctggtcaccgtgtcatctgctacgcgtgaggacctgaagaacgtgttcccacctgaggtggccgtgttcgagcctagcgaggccgagatcagccacacccagaaagccaccctcgtgtgcctggctaccggcttctaccccgaccatgtggaactgtcttggtgggtcaacggcaaagaggtgcacagcggcgtgtgtaccgacccccagccactgaaagaacagcccgccctgaacgacagccggtactgcctgagcagcagactgagagtgtccgccaccttctggcagaacccccggaaccacttcagatgccaggtgcagttctacggcctgagcgagaacgacgagtggacccaggacagagccaagcccgtgacccagatcgtgtctgccgaagcctggggcagagccgattgcggctttaccagcgagagctaccagcagggcgtgctgagcgccaccatcctgtacgagatcctgctgggcaaggccaccctgtacgccgtgctggtgtctgccctggtgctgatggctatggtcaagcggaaggacagccgggga

SEQ ID NO: 8179 - DNA, 2547 bp, Artificial Sequence
  Synthetic Polynucloetide
atggccttaccagtgaccgccttgctcctgccgctggccttgctgctccacgccgccaggccgagctacgtgctgacacagcctccatccgtgtctgtggctccaggacagaccgccagaatcacatgcggcggcaagaacatcggcagcaagagcgtgcactggtatcagcagccacctggacaggctccagtggtggtggtgtacgacgacagcgatagacctagcggcatccccgagagattcagcggcagcaattccggcaataccgccacactgaccatcagcagagtggaagctggcgacgaggccgtgtactactgccaagtgtgggacagcagcagcgatcacgtggtgtttggcggcggaacaaagctgacagtgcttctcgagatccagaaccctgatcctgccgtgtaccagctgcgggatagcaagagcagcgacaagagcgtgtgtctgttcaccgacttcgacagccagaccaacgtgtcccagagcaaggactccgacgtgtacatcaccgataagtgcgtgctggacatgcggagcatggacttcaagagcaactccgccgtggcctggtccaacaagtccgatttcgcctgcgccaacgccttcaacaacagcattatccccgaggacacattcttcccaagccccgagagcagctgcgacgtgaagctggtggaaaagagcttcgagacagacaccaacctgaacttccagaacctgagcgtgatcggcttcagaatcctgctgctgaaagtggccggctttaacctgctgatgaccctgcggctgtggtccagccgcgccaagagaagcggatctggcgtgaagcagaccctgaatttcgacctgctgaagctggctggcgacgtggaatccaacccaggccctactagtatggactggatttggcgcatccttttccttgtcggcgctgctaccggcgcgcattccttcgaacaactccagctgcaagagtctggccctggcctggtcaagcctagcgaaacactgagcctgacctgtaccgtgtctggcggctctatcagctccagcagctatttctggggctggatcagacaacctcctggcaaaggactggaatggatcggctccatctactacagcggcatcacctactacaaccccagcctgaagtccagagtgaccatctccgtggacaccagcaagaaccagttctccctgaagctgagcagcgtgacagccgccgataccgccgtgtattattgtgccagacatgacggcgctgtggccggcctgtttgattattggggacagggcaccctggtcaccgtgtcatctgctacgcgtgaggacctgaagaacgtgttcccacctgaggtggccgtgttcgagcctagcgaggccgagatcagccacacccagaaagccaccctcgtgtgcctggctaccggcttctaccccgaccatgtggaactgtcttggtgggtcaacggcaaagaggtgcacagcggcgtgtgtaccgacccccagccactgaaagaacagcccgccctgaacgacagccggtactgcctgagcagcagactgagagtgtccgccaccttctggcagaacccccggaaccacttcagatgccaggtgcagttctacggcctgagcgagaacgacgagtggacccaggacagagccaagcccgtgacccagatcgtgtctgccgaagcctggggcagagccgattgcggctttaccagcgagagctaccagcagggcgtgctgagcgccaccatcctgtacgagatcctgctgggcaaggccaccctgtacgccgtgctggtgtctgccctggtgctgatggctatggtcaagcggaaggacagccggggaagggccaagcgatctggatctggagcaacaaacttctcactactcaaacaagcaggtgacgtggaggagaatcccgggccttctagaggcgggatccacaccatggctacctacgaggtgctgtgcgaggtggcaagaaagctgggcaccgacgacagagaagtggtgctgttcctgctgaacgtgttcatccctcagcctacactggcccagctgatcggtgcactgagagccctgaaagaggaaggccggctgacctttcctctgctggccgaatgcctgttcagagccggaagaagggatctgctgcgggacctgctgcatctggaccccagatttctggaaagacacctggccggcaccatgagctacttcagcccttaccagctgaccgtgctgcacgttgacggcgaactgtgcgccagagatattcggagcctgatcttcctgagcaaggacaccatcggcagccggtctacccctcagacatttctgcactgggtgtactgcatggaaaacctggacctgctcggccccacagatgtggatgccctgatgtccatgctgagaagcctgagcagagtggacctccagagacaggtgcagacactgatgggactgcacctgagcggacctagccacagccagcactacagacacacccct

SEQ ID NO: 8180 - DNA, 2706 bp, Artificial Sequence
  Synthetic Polynucloetide
atggccttaccagtgaccgccttgctcctgccgctggccttgctgctccacgccgccaggccgctcgaggggaaaccaattcccaaccctcttctgggactggattcaaccggcagcggcgaggacctgaagaacgtgttcccacctgaggtggccgtgttcgagcctagcaaggccgagatcgcccacacccagaaagccaccctcgtgtgcctggctaccggcttctaccccgaccatgtggaactgtcttggtgggtcaacggcaaagaggtgcacagcggcgtgtgtaccgacccccagccactgaaagaacagcccgccctgaacgacagccggtactgcctgagcagcagactgagagtgtccgccaccttctggcagaacccccggaaccacttcagatgccaggtgcagttctacggcctgagcgagaacgacgagtggacccaggacagagccaagcccgtgacccagatcgtgtctgccgaagcctggggcagagccgattgcggcatcaccagcgccagctaccaccagggcgtgctgagcgccaccatcctgtacgagatcctgctgggcaaggccaccctgtacgccgtgctggtgtctgccctggtgctgatggctatggtcaagcggaaggacagccggggaagggccaagcgatctggatctggagcaacaaacttctcactactcaaacaagcaggtgacgtggaggagaatcccgggcctactagcatggccttaccagtgaccgccttgctcctgccgctggccttgctgctccacgccgccaggccgagctacgtgctgacacagcctccatccgtgtctgtggctccaggacagaccgccagaatcacatgcggcggcaagaacatcggcagcaagagcgtgcactggtatcagcagccacctggacaggctccagtggtggtggtgtacgacgacagcgatagacctagcggcatccccgagagattcagcggcagcaattccggcaataccgccacactgaccatcagcagagtggaagctggcgacgaggccgtgtactactgccaagtgtgggacagcagcagcgatcacgtggtgtttggcggcggaacaaagctgacagtgcttggcggaggcggaagtggaggcggaggatctggcggcggaggctctcaactccagctgcaagagtctggccctggcctggtcaagcctagcgaaacactgagcctgacctgtaccgtgtctggcggctctatcagctccagcagctatttctggggctggatcagacaacctcctggcaaaggactggaatggatcggctccatctactacagcggcatcacctactacaaccccagcctgaagtccagagtgaccatctccgtggacaccagcaagaaccagttctccctgaagctgagcagcgtgacagccgccgataccgccgtgtattattgtgccagacatgacggcgctgtggccggcctgtttgattattggggacagggcaccctggtcaccgtgtcatctgctacgcgtgagcagaaactgatctcggaagaggatgggagcggcatccagaaccctgatcctgccgtgtaccagctgcgggatagcaagagcagcgacaagagcgtgtgtctgttcaccgacttcgacagccagaccaacgtgtcccagagcaaggactccgacgtgtacatcaccgataagtgcgtgctggacatgcggagcatggacttcaagagcaactccgccgtggcctggtccaacaagtccgatttcgcctgcgccaacgccttcaacaacagcattatccccgaggacacattcttcccaagcagcgacgtgccctgcgacgtgaagctggtggaaaagagcttcgagacagacaccaacctgaacttccagaacctgagcgtgatcggcttcagaatcctgctgctgaaagtggccggctttaacctgctgatgaccctgcggctgtggtccagccgcgccaagagaagcggatctggcgtgaagcagaccctgaatttcgacctgctgaagctggctggcgacgtggaatccaacccaggcccttctagaggccatatgaccgagtacaagcccacggtgcgcctcgccacccgcgacgacgtccccagggccgtacgcaccctcgccgccgcgttcgccgactaccccgccacgcgccacaccgtcgatccggaccgccacatcgagcgggtcaccgagctgcaagaactcttcctcacgcgcgtcgggctcgacatcggcaaggtgtgggtcgcggacgacggcgccgcggtggcggtctggaccacgccggagagcgtcgaagcgggggcggtgttcgccgagatcggcccgcgcatggccgagttgagcggttcccggctggccgcgcagcaacagatggaaggcctcctggcgccgcaccggcccaaggagcccgcgtggttcctggccaccgtcggcgtctcgcccgaccaccagggcaagggtctgggcagcgccgtcgtgctccccggagtggaggcggccgagcgcgccggggtgcccgccttcctggagacctccgcgccccgcaacctccccttctacgagcggctcggcttcaccgtcaccgccgacgtcgaggtgcccgaaggaccgcgcacctggtgcatgacccgcaagcccggtgcctga

SEQ ID NO: 8181 - DNA, 2709 bp, Artificial Sequence
  Synthetic Polynucloetide
atggccttaccagtgaccgccttgctcctgccgctggccttgctgctccacgccgccaggccgctcgagcagaaactgatctcggaagaggatctgggctccggcgatcgccctgatcctgccgtgtaccagctgcgggatagcaagagcagcgacaagagcgtgtgtctgttcaccgacttcgacagccagaccaacgtgtcccagagcaaggactccgacgtgtacatcaccgataagtgcgtgctggacatgcggagcatggacttcaagagcaactccgccgtggcctggtccaacaagtccgatttcgcctgcgccaacgccttcaacaacagcattatccccgaggacacattcttcccaagccccgagagcagctgcgacgtgaagctggtggaaaagagcttcgagacagacaccaacctgaacttccagaacctgagcgtgatcggcttcagaatcctgctgctgaaagtggccggctttaacctgctgatgaccctgcggctgtggtccagctctagtcgcgccaagagaagcggatctggcgtgaagcagaccctgaatttcgacctgctgaagctggctggcgacgtggaatccaacccaggccccactagcatggccttaccagtgaccgccttgctcctgccgctggccttgctgctccacgccgccaggccgagctacgtgctgacacagcctccatccgtgtctgtggctccaggacagaccgccagaatcacatgcggcggcaagaacatcggcagcaagagcgtgcactggtatcagcagccacctggacaggctccagtggtggtggtgtacgacgacagcgatagacctagcggcatccccgagagattcagcggcagcaattccggcaataccgccacactgaccatcagcagagtggaagctggcgacgaggccgtgtactactgccaagtgtgggacagcagcagcgatcacgtggtgtttggcggcggaacaaagctgacagtgcttggcggaggcggaagtggaggcggaggatctggcggcggaggctctcaactccagctgcaagagtctggccctggcctggtcaagcctagcgaaacactgagcctgacctgtaccgtgtctggcggctctatcagctccagcagctatttctggggctggatcagacaacctcctggcaaaggactggaatggatcggctccatctactacagcggcatcacctactacaaccccagcctgaagtccagagtgaccatctccgtggacaccagcaagaaccagttctccctgaagctgagcagcgtgacagccgccgataccgccgtgtattattgtgccagacatgacggcgctgtggccggcctgtttgattattggggacagggcaccctggtcaccgtgtcatctgctacgcgtgggaaaccaattcccaaccctcttctgggactggattcaaccggcagcggcgaggacctgaagaacgtgttcccacctgaggtggccgtgttcgagcctagcgaggccgagatcagccacacccagaaagccaccctcgtgtgcctggctaccggcttctaccccgaccatgtggaactgtcttggtgggtcaacggcaaagaggtgcacagcggcgtgtgtaccgacccccagccactgaaagaacagcccgccctgaacgacagccggtactgcctgagcagcagactgagagtgtccgccaccttctggcagaacccccggaaccacttcagatgccaggtgcagttctacggcctgagcgagaacgacgagtggacccaggacagagccaagcccgtgacccagatcgtgtctgccgaagcctggggcagagccgattgcggctttaccagcgagagctaccagcagggcgtgctgagcgccaccatcctgtacgagatcctgctgggcaaggccaccctgtacgccgtgctggtgtctgccctggtgctgatggctatggtcaagcggaaggacagccggggaagggccaagcgatctggatctggagcaacaaacttctcactactcaaacaagcaggtgacgtggaggagaatcccgggccttctagaggccatatgaccgagtacaagcccacggtgcgcctcgccacccgcgacgacgtccccagggccgtacgcaccctcgccgccgcgttcgccgactaccccgccacgcgccacaccgtcgatccggaccgccacatcgagcgggtcaccgagctgcaagaactcttcctcacgcgcgtcgggctcgacatcggcaaggtgtgggtcgcggacgacggcgccgcggtggcggtctggaccacgccggagagcgtcgaagcgggggcggtgttcgccgagatcggcccgcgcatggccgagttgagcggttcccggctggccgcgcagcaacagatggaaggcctcctggcgccgcaccggcccaaggagcccgcgtggttcctggccaccgtcggcgtctcgcccgaccaccagggcaagggtctgggcagcgccgtcgtgctccccggagtggaggcggccgagcgcgccggggtgcccgccttcctggagacctccgcgccccgcaacctccccttctacgagcggctcggcttcaccgtcaccgccgacgtcgaggtgcccgaaggaccgcgcacctggtgcatgacccgcaagcccggtgcctga

SEQ ID NO: 8182 - DNA, 2571 bp, Artificial Sequence
  Synthetic Polynucloetide
atggccttaccagtgaccgccttgctcctgccgctggccttgctgctccacgccgccaggccgagctacgtgctgacacagcctccatccgtgtctgtggctccaggacagaccgccagaatcacatgcggcggcaagaacatcggcagcaagagcgtgcactggtatcagcagccacctggacaggctccagtggtggtggtgtacgacgacagcgatagacctagcggcatccccgagagattcagcggcagcaattccggcaataccgccacactgaccatcagcagagtggaagctggcgacgaggccgtgtactactgccaagtgtgggacagcagcagcgatcacgtggtgtttggcggcggaacaaagctgacagtgcttctcgaggacctgaagaacgtgttcccacctgaggtggccgtgttcgagcctagcgaggccgagatcagccacacccagaaagccaccctcgtgtgcctggctaccggcttctaccccgaccatgtggaactgtcttggtgggtcaacggcaaagaggtgcacagcggcgtgtctaccgacccccagccactgaaagaacagcccgccctgaacgacagccggtactgcctgagcagcagactgagagtgtccgccaccttctggcagaacccccggaaccacttcagatgccaggtgcagttctacggcctgagcgagaacgacgagtggacccaggacagagccaagcccgtgacccagatcgtgtctgccgaagcctggggcagagccgattgcggctttaccagcgagagctaccagcagggcgtgctgagcgccaccatcctgtacgagatcctgctgggcaaggccaccctgtacgccgtgctggtgtctgccctggtgctgatggctatggtcaagcggaaggacagccggggaagggccaagcgatctggatctggagcaacaaacttctcactactcaaacaagcaggtgacgtggaggagaatcccgggcctactagtatggactggatttggcgcatccttttccttgtcggcgctgctaccggcgcgcattccttcgaacaactccagctgcaagagtctggccctggcctggtcaagcctagcgaaacactgagcctgacctgtaccgtgtctggcggctctatcagctccagcagctatttctggggctggatcagacaacctcctggcaaaggactggaatggatcggctccatctactacagcggcatcacctactacaaccccagcctgaagtccagagtgaccatctccgtggacaccagcaagaaccagttctccctgaagctgagcagcgtgacagccgccgataccgccgtgtattattgtgccagacatgacggcgctgtggccggcctgtttgattattggggacagggcaccctggtcaccgtgtcatctgctacgcgtatccagaaccctgatcctgccgtgtaccagctgcgggatagcaagagcagcgacaagagcgtgtgtctgttcaccgacttcgacagccagaccaacgtgtcccagagcaaggactccgacgtgtacatcaccgataagaccgtgctggacatgcggagcatggacttcaagagcaactccgccgtggcctggtccaacaagtccgatttcgcctgcgccaacgccttcaacaacagcattatccccgaggacacattcttcccaagccccgagagcagctgcgacgtgaagctggtggaaaagagcttcgagacagacaccaacctgaacttccagaacctgagcgtgatcggcttcagaatcctgctgctgaaagtggccggctttaacctgctgatgaccctgcggctgtggtccagccgcgccaagagaagcggatctggcgtgaagcagaccctgaatttcgacctgctgaagctggctggcgacgtggaatccaacccaggcccttctagaggccatatgaccgagtacaagcccacggtgcgcctcgccacccgcgacgacgtccccagggccgtacgcaccctcgccgccgcgttcgccgactaccccgccacgcgccacaccgtcgatccggaccgccacatcgagcgggtcaccgagctgcaagaactcttcctcacgcgcgtcgggctcgacatcggcaaggtgtgggtcgcggacgacggcgccgcggtggcggtctggaccacgccggagagcgtcgaagcgggggcggtgttcgccgagatcggcccgcgcatggccgagttgagcggttcccggctggccgcgcagcaacagatggaaggcctcctggcgccgcaccggcccaaggagcccgcgtggttcctggccaccgtcggcgtctcgcccgaccaccagggcaagggtctgggcagcgccgtcgtgctccccggagtggaggcggccgagcgcgccggggtgcccgccttcctggagacctccgcgccccgcaacctccccttctacgagcggctcggcttcaccgtcaccgccgacgtcgaggtgcccgaaggaccgcgcacctggtgcatgacccgcaagcccggtgcctga

SEQ ID NO: 8183 - DNA, 2817 bp, Artificial Sequence
  Synthetic Polynucloetide
atggccttaccagtgaccgccttgctcctgccgctggccttgctgctccacgccgccaggccgagctacgtgctgacacagcctccatccgtgtctgtggctccaggacagaccgccagaatcacatgcggcggcaagaacatcggcagcaagagcgtgcactggtatcagcagccacctggacaggctccagtggtggtggtgtacgacgacagcgatagacctagcggcatccccgagagattcagcggcagcaattccggcaataccgccacactgaccatcagcagagtggaagctggcgacgaggccgtgtactactgccaagtgtgggacagcagcagcgatcacgtggtgtttggcggcggaacaaagctgacagtgcttctcgaggacctgaagaacgtgttcccacctgaggtggccgtgttcgagcctagcgaggccgagatcagccacacccagaaagccaccctcgtgtgcctggctaccggcttctaccccgaccatgtggaactgtcttggtgggtcaacggcaaagaggtgcacagcggcgtgtctaccgacccccagccactgaaagaacagcccgccctgaacgacagccggtactgcctgagcagcagactgagagtgtccgccaccttctggcagaacccccggaaccacttcagatgccaggtgcagttctacggcctgagcgagaacgacgagtggacccaggacagagccaagcccgtgacccagatcgtgtctgccgaagcctggggcagagccgattgcggctttaccagcgagagctaccagcagggcgtgctgagcgccaccatcctgtacgagatcctgctgggcaaggccaccctgtacgccgtgctggtgtctgccctggtgctgatggctatggtcaagcggaaggacagccggggaagggccaagcgatctggatctggagcaacaaacttctcactactcaaacaagcaggtgacgtggaggagaatcccgggcctactagtatggactggatttggcgcatccttttccttgtcggcgctgctaccggcgcgcattccttcgaacaactccagctgcaagagtctggccctggcctggtcaagcctagcgaaacactgagcctgacctgtaccgtgtctggcggctctatcagctccagcagctatttctggggctggatcagacaacctcctggcaaaggactggaatggatcggctccatctactacagcggcatcacctactacaaccccagcctgaagtccagagtgaccatctccgtggacaccagcaagaaccagttctccctgaagctgagcagcgtgacagccgccgataccgccgtgtattattgtgccagacatgacggcgctgtggccggcctgtttgattattggggacagggcaccctggtcaccgtgtcatctgctacgcgtgagcagaaactgatctcggaagaggatgggagcggcaccccattcccttctctggcccctcccatcatgctgctggtggacggcaagcagcagatggtggtcgtgtgcctggtgctggatgtggccccacctggactggacagccccatctggtttagcgccggcaatggctctgccctggacgcctttacctacggcccaagccctgccaccgatggcacctggacaaatctggcccacctgagcctgcccagcgaggaactggcttcttgggagcctctcgtgtgccacacaggacctggcgctgagggacacagcagatccacccagcctatgcacctgtctggcgaggccagcaccgccagaacctgtcctcaggaacctctgagaggcacccctggcggagcactgtggctgggagtgctgagactgctgctgttcaagctgctgctgtttgacctgctgctgacctgctcctgtctgtgcgatcctgccggccctctgccttctcctgccaccaccacaagactgagagccctgggcagccacagactgcaccctgccacagagacaggcggcagagaggccacaagcagccctagaccccagcccagagacagaagatggggcgataccccccctggcagaaagcctggatctccagtccgcgccaagagaagcggatctggcgtgaagcagaccctgaatttcgacctgctgaagctggctggcgacgtggaatccaacccaggcccttctagaggccatatgaccgagtacaagcccacggtgcgcctcgccacccgcgacgacgtccccagggccgtacgcaccctcgccgccgcgttcgccgactaccccgccacgcgccacaccgtcgatccggaccgccacatcgagcgggtcaccgagctgcaagaactcttcctcacgcgcgtcgggctcgacatcggcaaggtgtgggtcgcggacgacggcgccgcggtggcggtctggaccacgccggagagcgtcgaagcgggggcggtgttcgccgagatcggcccgcgcatggccgagttgagcggttcccggctggccgcgcagcaacagatggaaggcctcctggcgccgcaccggcccaaggagcccgcgtggttcctggccaccgtcggcgtctcgcccgaccaccagggcaagggtctgggcagcgccgtcgtgctccccggagtggaggcggccgagcgcgccggggtgcccgccttcctggagacctccgcgccccgcaacctccccttctacgagcggctcggcttcaccgtcaccgccgacgtcgaggtgcccgaaggaccgcgcacctggtgcatgacccgcaagcccggtgcctga

SEQ ID NO: 8184 - DNA, 2871 bp, Artificial Sequence
  Synthetic Polynucloetide
atggccttaccagtgaccgccttgctcctgccgctggccttgctgctccacgccgccaggccgctcgaggacctgaagaacgtgttcccacctgaggtggccgtgttcgagcctagcgaggccgagatcagccacacccagaaagccaccctcgtgtgcctggctaccggcttctaccccgaccatgtggaactgtcttggtgggtcaacggcaaagaggtgcacagcggcgtgtctaccgacccccagccactgaaagaacagcccgccctgaacgacagccggtactgcctgagcagcagactgagagtgtccgccaccttctggcagaacccccggaaccacttcagatgccaggtgcagttctacggcctgagcgagaacgacgagtggacccaggacagagccaagcccgtgacccagatcgtgtctgccgaagcctggggcagagccgattgcggctttaccagcgagagctaccagcagggcgtgctgagcgccaccatcctgtacgagatcctgctgggcaaggccaccctgtacgccgtgctggtgtctgccctggtgctgatggctatggtcaagcggaaggacagccggggaagggccaagcgatctggatctggagcaacaaacttctcactactcaaacaagcaggtgacgtggaggagaatcccgggcctactagcatggccttaccagtgaccgccttgctcctgccgctggccttgctgctccacgccgccaggccgagctacgtgctgacacagcctccatccgtgtctgtggctccaggacagaccgccagaatcacatgcggcggcaagaacatcggcagcaagagcgtgcactggtatcagcagccacctggacaggctccagtggtggtggtgtacgacgacagcgatagacctagcggcatccccgagagattcagcggcagcaattccggcaataccgccacactgaccatcagcagagtggaagctggcgacgaggccgtgtactactgccaagtgtgggacagcagcagcgatcacgtggtgtttggcggcggaacaaagctgacagtgcttggcggaggcggaagtggaggcggaggatctggcggcggaggctctcaactccagctgcaagagtctggccctggcctggtcaagcctagcgaaacactgagcctgacctgtaccgtgtctggcggctctatcagctccagcagctatttctggggctggatcagacaacctcctggcaaaggactggaatggatcggctccatctactacagcggcatcacctactacaaccccagcctgaagtccagagtgaccatctccgtggacaccagcaagaaccagttctccctgaagctgagcagcgtgacagccgccgataccgccgtgtattattgtgccagacatgacggcgctgtggccggcctgtttgattattggggacagggcaccctggtcaccgtgtcatctgctacgcgtgagcagaaactgatctcggaagaggatctggggagcggcaccccattcccttctctggcccctcccatcatgctgctggtggacggcaagcagcagatggtggtcgtgtgcctggtgctggatgtggccccacctggactggacagccccatctggtttagcgccggcaatggctctgccctggacgcctttacctacggcccaagccctgccaccgatggcacctggacaaatctggcccacctgagcctgcccagcgaggaactggcttcttgggagcctctcgtgtgccacacaggacctggcgctgagggacacagcagatccacccagcctatgcacctgtctggcgaggccagcaccgccagaacctgtcctcaggaacctctgagaggcacccctggcggagcactgtggctgggagtgctgagactgctgctgttcaagctgctgctgtttgacctgctgctgacctgctcctgtctgtgcgatcctgccggccctctgccttctcctgccaccaccacaagactgagagccctgggcagccacagactgcaccctgccacagagacaggcggcagagaggccacaagcagccctagaccccagcccagagacagaagatggggcgataccccccctggcagaaagcctggatctccagtccgcgccaagagaagcggatctggcgtgaagcagaccctgaatttcgacctgctgaagctggctggcgacgtggaatccaacccaggcccttctagatctagaggccatatgaccgagtacaagcccacggtgcgcctcgccacccgcgacgacgtccccagggccgtacgcaccctcgccgccgcgttcgccgactaccccgccacgcgccacaccgtcgatccggaccgccacatcgagcgggtcaccgagctgcaagaactcttcctcacgcgcgtcgggctcgacatcggcaaggtgtgggtcgcggacgacggcgccgcggtggcggtctggaccacgccggagagcgtcgaagcgggggcggtgttcgccgagatcggcccgcgcatggccgagttgagcggttcccggctggccgcgcagcaacagatggaaggcctcctggcgccgcaccggcccaaggagcccgcgtggttcctggccaccgtcggcgtctcgcccgaccaccagggcaagggtctgggcagcgccgtcgtgctccccggagtggaggcggccgagcgcgccggggtgcccgccttcctggagacctccgcgccccgcaacctccccttctacgagcggctcggcttcaccgtcaccgccgacgtcgaggtgcccgaaggaccgcgcacctggtgcatgacccgcaagcccggtgcctga

SEQ ID NO: 8185 - DNA, 2682 bp, Artificial Sequence
  Synthetic Polynucloetide
atggccttaccagtgaccgccttgctcctgccgctggccttgctgctccacgccgccaggccgagctacgtgctgacacagcctccatccgtgtctgtggctccaggacagaccgccagaatcacatgcggcggcaagaacatcggcagcaagagcgtgcactggtatcagcagccacctggacaggctccagtggtggtggtgtacgacgacagcgatagacctagcggcatccccgagagattcagcggcagcaattccggcaataccgccacactgaccatcagcagagtggaagctggcgacgaggccgtgtactactgccaagtgtgggacagcagcagcgatcacgtggtgtttggcggcggaacaaagctgacagtgcttctcgaggggaaaccaattcccaaccctcttctgggactggattcaaccggcagcggcgacaagcagctggacgccgacgtgtcccccaagcctaccatcttcctgccctctatcgccgagacaaagctccagaaggccggcacctacctgtgcctgctggaaaagttcttcccagatgtgattaagatccactggcaggaaaagaagtccaacaccatcctgggcagccaggaaggcaacaccatgaagaccaacgacacctacatgaagttcagctggctgaccgtgcccgagaagtccctggacaaagaacacagatgcatcgtgcggcacgaaaacaacaagaacggcgtggaccaggaaatcatcttcccacccatcaagaccgatgtgattacaatggaccccaaggacaactgctccaaggacgccaacgataccctgctgctccagctgaccaacaccagcgcctactacatgtacttgttgctgctgctgaagtccgtggtgtacttcgccatcatcacatgctgcctgctgcggagaaccgccttctgctgcaacggcgagaagtctagggccaagcgatctggatctggagcaacaaacttctcactactcaaacaagcaggtgacgtggaggagaatcccgggcctactagtatggactggatttggcgcatccttttccttgtcggcgctgctaccggcgcgcattccttcgaacaactccagctgcaagagtctggccctggcctggtcaagcctagcgaaacactgagcctgacctgtaccgtgtctggcggctctatcagctccagcagctatttctggggctggatcagacaacctcctggcaaaggactggaatggatcggctccatctactacagcggcatcacctactacaaccccagcctgaagtccagagtgaccatctccgtggacaccagcaagaaccagttctccctgaagctgagcagcgtgacagccgccgataccgccgtgtattattgtgccagacatgacggcgctgtggccggcctgtttgattattggggacagggcaccctggtcaccgtgtcatctgctacgcgtgagcagaaactgatctcggaagaggatgggagcggcagccagcctcacaccaagcccagcgtgttcgtgatgaagaacggcaccaacgtggcctgcctcgtgaaagagttctaccccaaggacatcaggatcaacctggtgtccagcaagaagatcaccgagttcgaccccgccatcgtgatctcccccagcggcaagtacaacgccgtgaagctggggaagtacgaggacagcaacagcgtgacctgctccgtgcagcacgacaacaagaccgtgcacagcaccgactttgaagtgaaaaccgactccaccgaccacgtgaagcccaaagagacagagaacaccaagcagcccagcaagagctgccacaagcccaaggccatcgtgcacaccgagaaagtgaacatgatgagcctgaccgtgctgggcctgcggatgctgttcgccaaaaccgtggccgtgaacttcctgctgaccgccaagctgttcttcctccgcgccaagagaagcggatctggcgtgaagcagaccctgaatttcgacctgctgaagctggctggcgacgtggaatccaacccaggcccttctagaggccatatgaccgagtacaagcccacggtgcgcctcgccacccgcgacgacgtccccagggccgtacgcaccctcgccgccgcgttcgccgactaccccgccacgcgccacaccgtcgatccggaccgccacatcgagcgggtcaccgagctgcaagaactcttcctcacgcgcgtcgggctcgacatcggcaaggtgtgggtcgcggacgacggcgccgcggtggcggtctggaccacgccggagagcgtcgaagcgggggcggtgttcgccgagatcggcccgcgcatggccgagttgagcggttcccggctggccgcgcagcaacagatggaaggcctcctggcgccgcaccggcccaaggagcccgcgtggttcctggccaccgtcggcgtctcgcccgaccaccagggcaagggtctgggcagcgccgtcgtgctccccggagtggaggcggccgagcgcgccggggtgcccgccttcctggagacctccgcgccccgcaacctccccttctacgagcggctcggcttcaccgtcaccgccgacgtcgaggtgcccgaaggaccgcgcacctggtgcatgacccgcaagcccggtgcctga

SEQ ID NO: 8186 - DNA, 1893 bp, Artificial Sequence
  Synthetic Polynucloetide
atggccttaccagtgaccgccttgctcctgccgctggccttgctgctccacgccgccaggccgagctacgtgctgacacagcctccatccgtgtctgtggctccaggacagaccgccagaatcacatgcggcggcaagaacatcggcagcaagagcgtgcactggtatcagcagccacctggacaggctccagtggtggtggtgtacgacgacagcgatagacctagcggcatccccgagagattcagcggcagcaattccggcaataccgccacactgaccatcagcagagtggaagctggcgacgaggccgtgtactactgccaagtgtgggacagcagcagcgatcacgtggtgtttggcggcggaacaaagctgacagtgcttctcgagagccagcctcacaccaagcccagcgtgttcgtgatgaagaacggcaccaacgtggcctgcctcgtgaaagagttctaccccaaggacatcaggatcaacctggtgtccagcaagaagatcaccgagttcgaccccgccatcgtgatctcccccagcggcaagtacaacgccgtgaagctggggaagtacgaggacagcaacagcgtgacctgctccgtgcagcacgacaacaagaccgtgcacagcaccgactttgaagtgaaaaccgactccaccgaccacgtgaagcccaaagagacagagaacaccaagcagcccagcaagagctgccacaagcccaaggccatcgtgcacaccgagaaagtgaacatgatgagcctgaccgtgctgggcctgcggatgctgttcgccaaaaccgtggccgtgaacttcctgctgaccgccaagctgttcttcctcagggccaagcgatctggatctggagcaacaaacttctcactactcaaacaagcaggtgacgtggaggagaatcccgggcctactagtatggactggatttggcgcatccttttccttgtcggcgctgctaccggcgcgcattccttcgaacaactccagctgcaagagtctggccctggcctggtcaagcctagcgaaacactgagcctgacctgtaccgtgtctggcggctctatcagctccagcagctatttctggggctggatcagacaacctcctggcaaaggactggaatggatcggctccatctactacagcggcatcacctactacaaccccagcctgaagtccagagtgaccatctccgtggacaccagcaagaaccagttctccctgaagctgagcagcgtgacagccgccgataccgccgtgtattattgtgccagacatgacggcgctgtggccggcctgtttgattattggggacagggcaccctggtcaccgtgtcatctgctacgcgtgacaagcagctggacgccgacgtgtcccccaagcctaccatcttcctgccctctatcgccgagacaaagctccagaaggccggcacctacctgtgcctgctggaaaagttcttcccagatgtgattaagatccactggcaggaaaagaagtccaacaccatcctgggcagccaggaaggcaacaccatgaagaccaacgacacctacatgaagttcagctggctgaccgtgcccgagaagtccctggacaaagaacacagatgcatcgtgcggcacgaaaacaacaagaacggcgtggaccaggaaatcatcttcccacccatcaagaccgatgtgattacaatggaccccaaggacaactgctccaaggacgccaacgataccctgctgctccagctgaccaacaccagcgcctactacatgtacttgttgctgctgctgaagtccgtggtgtacttcgccatcatcacatgctgcctgctgcggagaaccgccttctgctgcaacggcgagaagtct

SEQ ID NO: 8187 - DNA, 2727 bp, Artificial Sequence
  Synthetic Polynucloetide
atggccttaccagtgaccgccttgctcctgccgctggccttgctgctccacgccgccaggccgctcgaggggaaaccaattcccaaccctcttctgggactggattcaaccggcagcggcgacaagcagctggacgccgacgtgtcccccaagcctaccatcttcctgccctctatcgccgagacaaagctccagaaggccggcacctacctgtgcctgctggaaaagttcttcccagatgtgattaagatccactggcaggaaaagaagtccaacaccatcctgggcagccaggaaggcaacaccatgaagaccaacgacacctacatgaagttcagctggctgaccgtgcccgagaagtccctggacaaagaacacagatgcatcgtgcggcacgaaaacaacaagaacggcgtggaccaggaaatcatcttcccacccatcaagaccgatgtgattacaatggaccccaaggacaactgctccaaggacgccaacgataccctgctgctccagctgaccaacaccagcgcctactacatgtacttgttgctgctgctgaagtccgtggtgtacttcgccatcatcacatgctgcctgctgcggagaaccgccttctgctgcaacggcgagaagtctagggccaagcgatctggatctggagcaacaaacttctcactactcaaacaagcaggtgacgtggaggagaatcccgggcctactagcatggccttaccagtgaccgccttgctcctgccgctggccttgctgctccacgccgccaggccgagctacgtgctgacacagcctccatccgtgtctgtggctccaggacagaccgccagaatcacatgcggcggcaagaacatcggcagcaagagcgtgcactggtatcagcagccacctggacaggctccagtggtggtggtgtacgacgacagcgatagacctagcggcatccccgagagattcagcggcagcaattccggcaataccgccacactgaccatcagcagagtggaagctggcgacgaggccgtgtactactgccaagtgtgggacagcagcagcgatcacgtggtgtttggcggcggaacaaagctgacagtgcttggcggaggcggaagtggaggcggaggatctggcggcggaggctctcaactccagctgcaagagtctggccctggcctggtcaagcctagcgaaacactgagcctgacctgtaccgtgtctggcggctctatcagctccagcagctatttctggggctggatcagacaacctcctggcaaaggactggaatggatcggctccatctactacagcggcatcacctactacaaccccagcctgaagtccagagtgaccatctccgtggacaccagcaagaaccagttctccctgaagctgagcagcgtgacagccgccgataccgccgtgtattattgtgccagacatgacggcgctgtggccggcctgtttgattattggggacagggcaccctggtcaccgtgtcatctgctacgcgtgagcagaaactgatctcggaagaggatgggagcggcagccagcctcacaccaagcccagcgtgttcgtgatgaagaacggcaccaacgtggcctgcctcgtgaaagagttctaccccaaggacatcaggatcaacctggtgtccagcaagaagatcaccgagttcgaccccgccatcgtgatctcccccagcggcaagtacaacgccgtgaagctggggaagtacgaggacagcaacagcgtgacctgctccgtgcagcacgacaacaagaccgtgcacagcaccgactttgaagtgaaaaccgactccaccgaccacgtgaagcccaaagagacagagaacaccaagcagcccagcaagagctgccacaagcccaaggccatcgtgcacaccgagaaagtgaacatgatgagcctgaccgtgctgggcctgcggatgctgttcgccaaaaccgtggccgtgaacttcctgctgaccgccaagctgttcttcctccgcgccaagagaagcggatctggcgtgaagcagaccctgaatttcgacctgctgaagctggctggcgacgtggaatccaacccaggcccttctagaggccatatgaccgagtacaagcccacggtgcgcctcgccacccgcgacgacgtccccagggccgtacgcaccctcgccgccgcgttcgccgactaccccgccacgcgccacaccgtcgatccggaccgccacatcgagcgggtcaccgagctgcaagaactcttcctcacgcgcgtcgggctcgacatcggcaaggtgtgggtcgcggacgacggcgccgcggtggcggtctggaccacgccggagagcgtcgaagcgggggcggtgttcgccgagatcggcccgcgcatggccgagttgagcggttcccggctggccgcgcagcaacagatggaaggcctcctggcgccgcaccggcccaaggagcccgcgtggttcctggccaccgtcggcgtctcgcccgaccaccagggcaagggtctgggcagcgccgtcgtgctccccggagtggaggcggccgagcgcgccggggtgcccgccttcctggagacctccgcgccccgcaacctccccttctacgagcggctcggcttcaccgtcaccgccgacgtcgaggtgcccgaaggaccgcgcacctggtgcatgacccgcaagcccggtgcctga

SEQ ID NO: 8188 - DNA, 3102 bp, Artificial Sequence
  Synthetic Polynucloetide
atggccttaccagtgaccgccttgctcctgccgctggccttgctgctccacgccgccaggccgagctacgtgctgacacagcctccatccgtgtctgtggctccaggacagaccgccagaatcacatgcggcggcaagaacatcggcagcaagagcgtgcactggtatcagcagccacctggacaggctccagtggtggtggtgtacgacgacagcgatagacctagcggcatccccgagagattcagcggcagcaattccggcaataccgccacactgaccatcagcagagtggaagctggcgacgaggccgtgtactactgccaagtgtgggacagcagcagcgatcacgtggtgtttggcggcggaacaaagctgacagtgcttggacagcctaaggccaatcctaccgtgacactgttccctccaagcagcgaagaactccaggccaacaaggccacacttgtgtgcctgatctccgacttctaccctggggctgtgacagtggcttggaaggccgatggatctcctgtgaaagccggcgtggaaaccaccaagccatccaagcagagcaacaacaaatacgccgccagctcctacctgagcctgacacctgagcagtggaagtcccacagatcctacagctgccaagtgacccacgaaggcagcaccgtggaaaagacagtggcccctacagagtgcagcggatcccagagcttcggcctgctggaccccaagctgtgctacctgctggatggcatcctgttcatctacggcgtgatcctgaccgccctgttcctgagagtgaagttcagcagaagcgccgacgcccctgcctaccagcagggacagaaccaactgtacaacgagctgaacctgggcagacgggaagagtacgacgtgctggacaagcggagaggcagggaccctgagatgggcggaaagccccagcggagaaagaacccccaggaaggactgtataacgaactccagaaagacaagatggccgaagcctacagcgagatcggcatgaagggcgagcggagaagaggcaagggccacgatggcctgtaccagggcctgagcaccgccaccaaggacacctatgacgccctgcacatgcaggccctgcctccaagaagggccaagcgatctggatctggagcaacaaacttctcactactcaaacaagcaggtgacgtggaggagaatcccgggcctactagtatggactggatttggcgcatccttttccttgtcggcgctgctaccggcgcgcattccttcgaacaactccagctgcaagagtctggccctggcctggtcaagcctagcgaaacactgagcctgacctgtaccgtgtctggcggctctatcagctccagcagctatttctggggctggatcagacaacctcctggcaaaggactggaatggatcggctccatctactacagcggcatcacctactacaaccccagcctgaagtccagagtgaccatctccgtggacaccagcaagaaccagttctccctgaagctgagcagcgtgacagccgccgataccgccgtgtattattgtgccagacatgacggcgctgtggccggcctgtttgattattggggacagggcaccctggtcaccgtgtcatctgctgcctctacaaagggaccctccgtgtttcctctggctcccagcagcaagtctacaagcggaggaacagccgctctgggctgcctggtcaaggattactttcccgagcctgtgaccgtgtcctggaatagcggagcactgacaagcggcgtgcacacctttccagccgtgctgcaaagcagcggcctgtactctctgagcagcgtggtcacagtgcctagctctagcctgggcacccagacctacatctgcaatgtgaaccacaagcctagcaacaccaaggtggacaagagagtggaacccaagagctgtggtacccagagttttgggttgttggaccctaaattgtgctatctgttggacggaatcctgttcatttacggagtgatcctgaccgcattgttcctgcgggttaagttttccagatccgcagacgcacccgcttaccaacaagggcagaaccaactctacaatgaacttaatttggggcggagggaagagtacgacgttctggacaaaaggaggggacgagatcccgagatgggcggaaagcctcagcgaaggaagaatccgcaagaggggctttataacgaactccagaaagataaaatggcagaagcctatagtgagattgggatgaagggagaaaggaggaggggtaaaggtcacgatgggttgtaccaaggattgagcacagccactaaagatacctatgatgcgctccacatgcaggccctgccgccaagacgcgccaagagaagcggatctggcgtgaagcagaccctgaatttcgacctgctgaagctggctggcgacgtggaatccaacccaggcccttctagaggccatatgaccgagtacaagcccacggtgcgcctcgccacccgcgacgacgtccccagggccgtacgcaccctcgccgccgcgttcgccgactaccccgccacgcgccacaccgtcgatccggaccgccacatcgagcgggtcaccgagctgcaagaactcttcctcacgcgcgtcgggctcgacatcggcaaggtgtgggtcgcggacgacggcgccgcggtggcggtctggaccacgccggagagcgtcgaagcgggggcggtgttcgccgagatcggcccgcgcatggccgagttgagcggttcccggctggccgcgcagcaacagatggaaggcctcctggcgccgcaccggcccaaggagcccgcgtggttcctggccaccgtcggcgtctcgcccgaccaccagggcaagggtctgggcagcgccgtcgtgctccccggagtggaggcggccgagcgcgccggggtgcccgccttcctggagacctccgcgccccgcaacctccccttctacgagcggctcggcttcaccgtcaccgccgacgtcgaggtgcccgaaggaccgcgcacctggtgcatgacccgcaagcccggtgcctga

SEQ ID NO: 8189 - DNA, 2457 bp, Artificial Sequence
  Synthetic Polynucloetide
atggccttaccagtgaccgccttgctcctgccgctggccttgctgctccacgccgccaggccgagctacgtgctgacacagcctccatccgtgtctgtggctccaggacagaccgccagaatcacatgcggcggcaagaacatcggcagcaagagcgtgcactggtatcagcagccacctggacaggctccagtggtggtggtgtacgacgacagcgatagacctagcggcatccccgagagattcagcggcagcaattccggcaataccgccacactgaccatcagcagagtggaagctggcgacgaggccgtgtactactgccaagtgtgggacagcagcagcgatcacgtggtgtttggcggcggaacaaagctgacagtgcttctcgaggacctgaagaacgtgttcccacctgaggtggccgtgttcgagcctagcgaggccgagatcagccacacccagaaagccaccctcgtgtgcctggctaccggcttctaccccgaccatgtggaactgtcttggtgggtcaacggcaaagaggtgcacagcggcgtgtctaccgacccccagccactgaaagaacagcccgccctgaacgacagccggtactgcctgagcagcagactgagagtgtccgccaccttctggcagaacccccggaaccacttcagatgccaggtgcagttctacggcctgagcgagaacgacgagtggacccaggacagagccaagcccgtgacccagatcgtgtctgccgaagcctggggcagagccgattgcggatcccagagcttcggcctgctggaccccaagctgtgctacctgctggatggcatcctgttcatctacggcgtgatcctgaccgccctgttcctgagagtgaagttcagcagaagcgccgacgcccctgcctaccagcagggacagaaccaactgtacaacgagctgaacctgggcagacgggaagagtacgacgtgctggacaagcggagaggcagggaccctgagatgggcggaaagccccagcggagaaagaacccccaggaaggactgtataacgaactccagaaagacaagatggccgaagcctacagcgagatcggcatgaagggcgagcggagaagaggcaagggccacgatggcctgtaccagggcctgagcaccgccaccaaggacacctatgacgccctgcacatgcaggccctgcctccaagaagggccaagcgatctggatctggagcaacaaacttctcactactcaaacaagcaggtgacgtggaggagaatcccgggcctactagtatggactggatttggcgcatccttttccttgtcggcgctgctaccggcgcgcattccttcgaacaactccagctgcaagagtctggccctggcctggtcaagcctagcgaaacactgagcctgacctgtaccgtgtctggcggctctatcagctccagcagctatttctggggctggatcagacaacctcctggcaaaggactggaatggatcggctccatctactacagcggcatcacctactacaaccccagcctgaagtccagagtgaccatctccgtggacaccagcaagaaccagttctccctgaagctgagcagcgtgacagccgccgataccgccgtgtattattgtgccagacatgacggcgctgtggccggcctgtttgattattggggacagggcaccctggtcaccgtgtcatctgctacgcgtatccagaaccctgatcctgccgtgtaccagctgcgggatagcaagagcagcgacaagagcgtgtgtctgttcaccgacttcgacagccagaccaacgtgtcccagagcaaggactccgacgtgtacatcaccgataagaccgtgctggacatgcggagcatggacttcaagagcaactccgccgtggcctggtccaacaagtccgatttcgcctgcgccaacgccttcaacaacagcattatccccgaggacacattcttcccaagccccgagagcagctgcggtacccagagttttgggttgttggaccctaaattgtgctatctgttggacggaatcctgttcatttacggagtgatcctgaccgcattgttcctgcgggttaagttttccagatccgcagacgcacccgcttaccaacaagggcagaaccaactctacaatgaacttaatttggggcggagggaagagtacgacgttctggacaaaaggaggggacgagatcccgagatgggcggaaagcctcagcgaaggaagaatccgcaagaggggctttataacgaactccagaaagataaaatggcagaagcctatagtgagattgggatgaagggagaaaggaggaggggtaaaggtcacgatgggttgtaccaaggattgagcacagccactaaagatacctatgatgcgctccacatgcaggccctgccgccaaga

SEQ ID NO: 8190 - DNA, 2457 bp, Artificial Sequence
  Synthetic Polynucloetide
atggccttaccagtgaccgccttgctcctgccgctggccttgctgctccacgccgccaggccgagctacgtgctgacacagcctccatccgtgtctgtggctccaggacagaccgccagaatcacatgcggcggcaagaacatcggcagcaagagcgtgcactggtatcagcagccacctggacaggctccagtggtggtggtgtacgacgacagcgatagacctagcggcatccccgagagattcagcggcagcaattccggcaataccgccacactgaccatcagcagagtggaagctggcgacgaggccgtgtactactgccaagtgtgggacagcagcagcgatcacgtggtgtttggcggcggaacaaagctgacagtgcttctcgaggacctgaagaacgtgttcccacctgaggtggccgtgttcgagcctagcaaggccgagatcgcccacacccagaaagccaccctcgtgtgcctggctaccggcttctaccccgaccatgtggaactgtcttggtgggtcaacggcaaagaggtgcacagcggcgtgtgtaccgacccccagccactgaaagaacagcccgccctgaacgacagccggtactgcctgagcagcagactgagagtgtccgccaccttctggcagaacccccggaaccacttcagatgccaggtgcagttctacggcctgagcgagaacgacgagtggacccaggacagagccaagcccgtgacccagatcgtgtctgccgaagcctggggcagagccgattgcggatcccagagcttcggcctgctggaccccaagctgtgctacctgctggatggcatcctgttcatctacggcgtgatcctgaccgccctgttcctgagagtgaagttcagcagaagcgccgacgcccctgcctaccagcagggacagaaccaactgtacaacgagctgaacctgggcagacgggaagagtacgacgtgctggacaagcggagaggcagggaccctgagatgggcggaaagccccagcggagaaagaacccccaggaaggactgtataacgaactccagaaagacaagatggccgaagcctacagcgagatcggcatgaagggcgagcggagaagaggcaagggccacgatggcctgtaccagggcctgagcaccgccaccaaggacacctatgacgccctgcacatgcaggccctgcctccaagaagggccaagcgatctggatctggagcaacaaacttctcactactcaaacaagcaggtgacgtggaggagaatcccgggcctactagtatggactggatttggcgcatccttttccttgtcggcgctgctaccggcgcgcattccttcgaacaactccagctgcaagagtctggccctggcctggtcaagcctagcgaaacactgagcctgacctgtaccgtgtctggcggctctatcagctccagcagctatttctggggctggatcagacaacctcctggcaaaggactggaatggatcggctccatctactacagcggcatcacctactacaaccccagcctgaagtccagagtgaccatctccgtggacaccagcaagaaccagttctccctgaagctgagcagcgtgacagccgccgataccgccgtgtattattgtgccagacatgacggcgctgtggccggcctgtttgattattggggacagggcaccctggtcaccgtgtcatctgctacgcgtatccagaaccctgatcctgccgtgtaccagctgcgggatagcaagagcagcgacaagagcgtgtgtctgttcaccgacttcgacagccagaccaacgtgtcccagagcaaggactccgacgtgtacatcaccgataagtgcgtgctggacatgcggagcatggacttcaagagcaactccgccgtggcctggtccaacaagtccgatttcgcctgcgccaacgccttcaacaacagcattatccccgaggacacattcttcccaagcagcgacgtgccctgcggtacccagagttttgggttgttggaccctaaattgtgctatctgttggacggaatcctgttcatttacggagtgatcctgaccgcattgttcctgcgggttaagttttccagatccgcagacgcacccgcttaccaacaagggcagaaccaactctacaatgaacttaatttggggcggagggaagagtacgacgttctggacaaaaggaggggacgagatcccgagatgggcggaaagcctcagcgaaggaagaatccgcaagaggggctttataacgaactccagaaagataaaatggcagaagcctatagtgagattgggatgaagggagaaaggaggaggggtaaaggtcacgatgggttgtaccaaggattgagcacagccactaaagatacctatgatgcgctccacatgcaggccctgccgccaaga

SEQ ID NO: 8191 - DNA, 2670 bp, Artificial Sequence
  Synthetic Polynucloetide
atggccttaccagtgaccgccttgctcctgccgctggccttgctgctccacgccgccaggccgagctacgtgctgacacagcctccatccgtgtctgtggctccaggacagaccgccagaatcacatgcggcggcaagaacatcggcagcaagagcgtgcactggtatcagcagccacctggacaggctccagtggtggtggtgtacgacgacagcgatagacctagcggcatccccgagagattcagcggcagcaattccggcaataccgccacactgaccatcagcagagtggaagctggcgacgaggccgtgtactactgccaagtgtgggacagcagcagcgatcacgtggtgtttggcggcggaacaaagctgacagtgcttctcgaggggaaaccaattcccaaccctcttctgggactggattcaaccggcagcggcgaggacctgaagaacgtgttcccacctgaggtggccgtgttcgagcctagcgaggccgagatcagccacacccagaaagccaccctcgtgtgcctggctaccggcttctaccccgaccatgtggaactgtcttggtgggtcaacggcaaagaggtgcacagcggcgtgtctaccgacccccagccactgaaagaacagcccgccctgaacgacagccggtactgcctgagcagcagactgagagtgtccgccaccttctggcagaacccccggaaccacttcagatgccaggtgcagttctacggcctgagcgagaacgacgagtggacccaggacagagccaagcccgtgacccagatcgtgtctgccgaagcctggggcagagccgattgcggatcccagagcttcggcctgctggaccccaagctgtgctacctgctggatggcatcctgttcatctacggcgtgatcctgaccgccctgttcctgagagtgaagttcagcagaagcgccgacgcccctgcctaccagcagggacagaaccaactgtacaacgagctgaacctgggcagacgggaagagtacgacgtgctggacaagcggagaggcagggaccctgagatgggcggaaagccccagcggagaaagaacccccaggaaggactgtataacgaactccagaaagacaagatggccgaagcctacagcgagatcggcatgaagggcgagcggagaagaggcaagggccacgatggcctgtaccagggcctgagcaccgccaccaaggacacctatgacgccctgcacatgcaggccctgcctccaagaagggccaagcgatctggatctggagcaacaaacttctcactactcaaacaagcaggtgacgtggaggagaatcccgggcctactagtatggactggatttggcgcatccttttccttgtcggcgctgctaccggcgcgcattccttcgaacaactccagctgcaagagtctggccctggcctggtcaagcctagcgaaacactgagcctgacctgtaccgtgtctggcggctctatcagctccagcagctatttctggggctggatcagacaacctcctggcaaaggactggaatggatcggctccatctactacagcggcatcacctactacaaccccagcctgaagtccagagtgaccatctccgtggacaccagcaagaaccagttctccctgaagctgagcagcgtgacagccgccgataccgccgtgtattattgtgccagacatgacggcgctgtggccggcctgtttgattattggggacagggcaccctggtcaccgtgtcatctgctacgcgtgagcagaaactgatctcggaagaggatgggagcggcatccagaaccctgatcctgccgtgtaccagctgcgggatagcaagagcagcgacaagagcgtgtgtctgttcaccgacttcgacagccagaccaacgtgtcccagagcaaggactccgacgtgtacatcaccgataagaccgtgctggacatgcggagcatggacttcaagagcaactccgccgtggcctggtccaacaagtccgatttcgcctgcgccaacgccttcaacaacagcattatccccgaggacacattcttcccaagccccgagagcagctgcggtacccagagttttgggttgttggaccctaaattgtgctatctgttggacggaatcctgttcatttacggagtgatcctgaccgcattgttcctgaggagcaagcggtcacggctgctccacagcgattacatgaatatgacaccacgaagaccgggtcctactcgcaaacactaccaaccctacgcacctccccgcgactttgcagcgtaccgatctcgggttaagttttccagatccgcagacgcacccgcttaccaacaagggcagaaccaactctacaatgaacttaatttggggcggagggaagagtacgacgttctggacaaaaggaggggacgagatcccgagatgggcggaaagcctcagcgaaggaagaatccgcaagaggggctttataacgaactccagaaagataaaatggcagaagcctatagtgagattgggatgaagggagaaaggaggaggggtaaaggtcacgatgggttgtaccaaggattgagcacagccactaaagatacctatgatgcgctccacatgcaggccctgccgccaaga

SEQ ID NO: 8192 - DNA, 2793 bp, Artificial Sequence
  Synthetic Polynucloetide
atggccttaccagtgaccgccttgctcctgccgctggccttgctgctccacgccgccaggccgagctacgtgctgacacagcctccatccgtgtctgtggctccaggacagaccgccagaatcacatgcggcggcaagaacatcggcagcaagagcgtgcactggtatcagcagccacctggacaggctccagtggtggtggtgtacgacgacagcgatagacctagcggcatccccgagagattcagcggcagcaattccggcaataccgccacactgaccatcagcagagtggaagctggcgacgaggccgtgtactactgccaagtgtgggacagcagcagcgatcacgtggtgtttggcggcggaacaaagctgacagtgcttctcgaggggaaaccaattcccaaccctcttctgggactggattcaaccggcagcggcgaggacctgaagaacgtgttcccacctgaggtggccgtgttcgagcctagcgaggccgagatcagccacacccagaaagccaccctcgtgtgcctggctaccggcttctaccccgaccatgtggaactgtcttggtgggtcaacggcaaagaggtgcacagcggcgtgtctaccgacccccagccactgaaagaacagcccgccctgaacgacagccggtactgcctgagcagcagactgagagtgtccgccaccttctggcagaacccccggaaccacttcagatgccaggtgcagttctacggcctgagcgagaacgacgagtggacccaggacagagccaagcccgtgacccagatcgtgtctgccgaagcctggggcagagccgattgcggatcccagagcttcggcctgctggaccccaagctgtgctacctgctggatggcatcctgttcatctacggcgtgatcctgaccgccctgttcctgaggagtaagaggagcaggctcctgcacagtgactacatgaacatgactccacgccgccccggacccacccgcaagcattaccagccctatgccccaccacgcgacttcgcagcctatcgctccagagtgaagttcagcagaagcgccgacgcccctgcctaccagcagggacagaaccaactgtacaacgagctgaacctgggcagacgggaagagtacgacgtgctggacaagcggagaggcagggaccctgagatgggcggaaagccccagcggagaaagaacccccaggaaggactgtataacgaactccagaaagacaagatggccgaagcctacagcgagatcggcatgaagggcgagcggagaagaggcaagggccacgatggcctgtaccagggcctgagcaccgccaccaaggacacctatgacgccctgcacatgcaggccctgcctccaagaagggccaagcgatctggatctggagcaacaaacttctcactactcaaacaagcaggtgacgtggaggagaatcccgggcctactagtatggactggatttggcgcatccttttccttgtcggcgctgctaccggcgcgcattccttcgaacaactccagctgcaagagtctggccctggcctggtcaagcctagcgaaacactgagcctgacctgtaccgtgtctggcggctctatcagctccagcagctatttctggggctggatcagacaacctcctggcaaaggactggaatggatcggctccatctactacagcggcatcacctactacaaccccagcctgaagtccagagtgaccatctccgtggacaccagcaagaaccagttctccctgaagctgagcagcgtgacagccgccgataccgccgtgtattattgtgccagacatgacggcgctgtggccggcctgtttgattattggggacagggcaccctggtcaccgtgtcatctgctacgcgtgagcagaaactgatctcggaagaggatgggagcggcatccagaaccctgatcctgccgtgtaccagctgcgggatagcaagagcagcgacaagagcgtgtgtctgttcaccgacttcgacagccagaccaacgtgtcccagagcaaggactccgacgtgtacatcaccgataagaccgtgctggacatgcggagcatggacttcaagagcaactccgccgtggcctggtccaacaagtccgatttcgcctgcgccaacgccttcaacaacagcattatccccgaggacacattcttcccaagccccgagagcagctgcggtacccagagttttgggttgttggaccctaaattgtgctatctgttggacggaatcctgttcatttacggagtgatcctgaccgcattgttcctgaggagcaagcggtcacggctgctccacagcgattacatgaatatgacaccacgaagaccgggtcctactcgcaaacactaccaaccctacgcacctccccgcgactttgcagcgtaccgatctcgggttaagttttccagatccgcagacgcacccgcttaccaacaagggcagaaccaactctacaatgaacttaatttggggcggagggaagagtacgacgttctggacaaaaggaggggacgagatcccgagatgggcggaaagcctcagcgaaggaagaatccgcaagaggggctttataacgaactccagaaagataaaatggcagaagcctatagtgagattgggatgaagggagaaaggaggaggggtaaaggtcacgatgggttgtaccaaggattgagcacagccactaaagatacctatgatgcgctccacatgcaggccctgccgccaaga

SEQ ID NO: 8193 - DNA, 2676 bp, Artificial Sequence
  Synthetic Polynucloetide
atggccttaccagtgaccgccttgctcctgccgctggccttgctgctccacgccgccaggccgagctacgtgctgacacagcctccatccgtgtctgtggctccaggacagaccgccagaatcacatgcggcggcaagaacatcggcagcaagagcgtgcactggtatcagcagccacctggacaggctccagtggtggtggtgtacgacgacagcgatagacctagcggcatccccgagagattcagcggcagcaattccggcaataccgccacactgaccatcagcagagtggaagctggcgacgaggccgtgtactactgccaagtgtgggacagcagcagcgatcacgtggtgtttggcggcggaacaaagctgacagtgcttctcgaggggaaaccaattcccaaccctcttctgggactggattcaaccggcagcggcgaggacctgaagaacgtgttcccacctgaggtggccgtgttcgagcctagcgaggccgagatcagccacacccagaaagccaccctcgtgtgcctggctaccggcttctaccccgaccatgtggaactgtcttggtgggtcaacggcaaagaggtgcacagcggcgtgtctaccgacccccagccactgaaagaacagcccgccctgaacgacagccggtactgcctgagcagcagactgagagtgtccgccaccttctggcagaacccccggaaccacttcagatgccaggtgcagttctacggcctgagcgagaacgacgagtggacccaggacagagccaagcccgtgacccagatcgtgtctgccgaagcctggggcagagccgattgcggatcccagagcttcggcctgctggaccccaagctgtgctacctgctggatggcatcctgttcatctacggcgtgatcctgaccgccctgttcctgagagtgaagttcagcagaagcgccgacgcccctgcctaccagcagggacagaaccaactgtacaacgagctgaacctgggcagacgggaagagtacgacgtgctggacaagcggagaggcagggaccctgagatgggcggaaagccccagcggagaaagaacccccaggaaggactgtataacgaactccagaaagacaagatggccgaagcctacagcgagatcggcatgaagggcgagcggagaagaggcaagggccacgatggcctgtaccagggcctgagcaccgccaccaaggacacctatgacgccctgcacatgcaggccctgcctccaagaagggccaagcgatctggatctggagcaacaaacttctcactactcaaacaagcaggtgacgtggaggagaatcccgggcctactagtatggactggatttggcgcatccttttccttgtcggcgctgctaccggcgcgcattccttcgaacaactccagctgcaagagtctggccctggcctggtcaagcctagcgaaacactgagcctgacctgtaccgtgtctggcggctctatcagctccagcagctatttctggggctggatcagacaacctcctggcaaaggactggaatggatcggctccatctactacagcggcatcacctactacaaccccagcctgaagtccagagtgaccatctccgtggacaccagcaagaaccagttctccctgaagctgagcagcgtgacagccgccgataccgccgtgtattattgtgccagacatgacggcgctgtggccggcctgtttgattattggggacagggcaccctggtcaccgtgtcatctgctacgcgtgagcagaaactgatctcggaagaggatctggggagcggcatccagaaccctgatcctgccgtgtaccagctgcgggatagcaagagcagcgacaagagcgtgtgtctgttcaccgacttcgacagccagaccaacgtgtcccagagcaaggactccgacgtgtacatcaccgataagaccgtgctggacatgcggagcatggacttcaagagcaactccgccgtggcctggtccaacaagtccgatttcgcctgcgccaacgccttcaacaacagcattatccccgaggacacattcttcccaagccccgagagcagctgcggtacccagagttttgggttgttggaccctaaattgtgctatctgttggacggaatcctgttcatttacggagtgatcctgaccgcattgttcctgaagagaggccggaagaagctgctgtacatcttcaagcagcctttcatgcggcccgtgcagaccacccaggaagaggacggctgctcctgccggttccccgaggaagaagaaggcggctgcgagctgcgggttaagttttccagatccgcagacgcacccgcttaccaacaagggcagaaccaactctacaatgaacttaatttggggcggagggaagagtacgacgttctggacaaaaggaggggacgagatcccgagatgggcggaaagcctcagcgaaggaagaatccgcaagaggggctttataacgaactccagaaagataaaatggcagaagcctatagtgagattgggatgaagggagaaaggaggaggggtaaaggtcacgatgggttgtaccaaggattgagcacagccactaaagatacctatgatgcgctccacatgcaggccctgccgccaaga

SEQ ID NO: 8194 - DNA, 2802 bp, Artificial Sequence
  Synthetic Polynucloetide
atggccttaccagtgaccgccttgctcctgccgctggccttgctgctccacgccgccaggccgagctacgtgctgacacagcctccatccgtgtctgtggctccaggacagaccgccagaatcacatgcggcggcaagaacatcggcagcaagagcgtgcactggtatcagcagccacctggacaggctccagtggtggtggtgtacgacgacagcgatagacctagcggcatccccgagagattcagcggcagcaattccggcaataccgccacactgaccatcagcagagtggaagctggcgacgaggccgtgtactactgccaagtgtgggacagcagcagcgatcacgtggtgtttggcggcggaacaaagctgacagtgcttctcgaggggaaaccaattcccaaccctcttctgggactggattcaaccggcagcggcgaggacctgaagaacgtgttcccacctgaggtggccgtgttcgagcctagcgaggccgagatcagccacacccagaaagccaccctcgtgtgcctggctaccggcttctaccccgaccatgtggaactgtcttggtgggtcaacggcaaagaggtgcacagcggcgtgtctaccgacccccagccactgaaagaacagcccgccctgaacgacagccggtactgcctgagcagcagactgagagtgtccgccaccttctggcagaacccccggaaccacttcagatgccaggtgcagttctacggcctgagcgagaacgacgagtggacccaggacagagccaagcccgtgacccagatcgtgtctgccgaagcctggggcagagccgattgcggatcccagagcttcggcctgctggaccccaagctgtgctacctgctggatggcatcctgttcatctacggcgtgatcctgaccgccctgttcctgaaacggggcagaaagaaactcctgtatatattcaaacaaccatttatgagaccagtacaaactactcaagaggaagatggctgtagctgccgatttccagaagaagaagaaggaggatgtgaactgagagtgaagttcagcagaagcgccgacgcccctgcctaccagcagggacagaaccaactgtacaacgagctgaacctgggcagacgggaagagtacgacgtgctggacaagcggagaggcagggaccctgagatgggcggaaagccccagcggagaaagaacccccaggaaggactgtataacgaactccagaaagacaagatggccgaagcctacagcgagatcggcatgaagggcgagcggagaagaggcaagggccacgatggcctgtaccagggcctgagcaccgccaccaaggacacctatgacgccctgcacatgcaggccctgcctccaagaagggccaagcgatctggatctggagcaacaaacttctcactactcaaacaagcaggtgacgtggaggagaatcccgggcctactagtatggactggatttggcgcatccttttccttgtcggcgctgctaccggcgcgcattccttcgaacaactccagctgcaagagtctggccctggcctggtcaagcctagcgaaacactgagcctgacctgtaccgtgtctggcggctctatcagctccagcagctatttctggggctggatcagacaacctcctggcaaaggactggaatggatcggctccatctactacagcggcatcacctactacaaccccagcctgaagtccagagtgaccatctccgtggacaccagcaagaaccagttctccctgaagctgagcagcgtgacagccgccgataccgccgtgtattattgtgccagacatgacggcgctgtggccggcctgtttgattattggggacagggcaccctggtcaccgtgtcatctgctacgcgtgagcagaaactgatctcggaagaggatctggggagcggcatccagaaccctgatcctgccgtgtaccagctgcgggatagcaagagcagcgacaagagcgtgtgtctgttcaccgacttcgacagccagaccaacgtgtcccagagcaaggactccgacgtgtacatcaccgataagaccgtgctggacatgcggagcatggacttcaagagcaactccgccgtggcctggtccaacaagtccgatttcgcctgcgccaacgccttcaacaacagcattatccccgaggacacattcttcccaagccccgagagcagctgcggtacccagagttttgggttgttggaccctaaattgtgctatctgttggacggaatcctgttcatttacggagtgatcctgaccgcattgttcctgaagagaggccggaagaagctgctgtacatcttcaagcagcctttcatgcggcccgtgcagaccacccaggaagaggacggctgctcctgccggttccccgaggaagaagaaggcggctgcgagctgcgggttaagttttccagatccgcagacgcacccgcttaccaacaagggcagaaccaactctacaatgaacttaatttggggcggagggaagagtacgacgttctggacaaaaggaggggacgagatcccgagatgggcggaaagcctcagcgaaggaagaatccgcaagaggggctttataacgaactccagaaagataaaatggcagaagcctatagtgagattgggatgaagggagaaaggaggaggggtaaaggtcacgatgggttgtaccaaggattgagcacagccactaaagatacctatgatgcgctccacatgcaggccctgccgccaaga

SEQ ID NO: 8195 - DNA, 2475 bp, Artificial Sequence
  Synthetic Polynucloetide
atggccttaccagtgaccgccttgctcctgccgctggccttgctgctccacgccgccaggccgagctacgtgctgacacagcctccatccgtgtctgtggctccaggacagaccgccagaatcacatgcggcggcaagaacatcggcagcaagagcgtgcactggtatcagcagccacctggacaggctccagtggtggtggtgtacgacgacagcgatagacctagcggcatccccgagagattcagcggcagcaattccggcaataccgccacactgaccatcagcagagtggaagctggcgacgaggccgtgtactactgccaagtgtgggacagcagcagcgatcacgtggtgtttggcggcggaacaaagctgacagtgcttctcgagcagagcttcggcctgctggaccccaagctgtgctacctgctggatggcatcctgttcatctacggcgtgatcctgaccgccctgttcctgagagtgaagttcagcagaagcgccgacgcccctgcctaccagcagggacagaaccaactgtacaacgagctgaacctgggcagacgggaagagtacgacgtgctggacaagcggagaggcagggaccctgagatgggcggaaagccccagcggagaaagaacccccaggaaggactgtataacgaactccagaaagacaagatggccgaagcctacagcgagatcggcatgaagggcgagcggagaagaggcaagggccacgatggcctgtaccagggcctgagcaccgccaccaaggacacctatgacgccctgcacatgcaggccctgcctccaagaagggccaagcgatctggatctggagcaacaaacttctcactactcaaacaagcaggtgacgtggaggagaatcccgggcctactagtatggactggatttggcgcatccttttccttgtcggcgctgctaccggcgcgcattccttcgaacaactccagctgcaagagtctggccctggcctggtcaagcctagcgaaacactgagcctgacctgtaccgtgtctggcggctctatcagctccagcagctatttctggggctggatcagacaacctcctggcaaaggactggaatggatcggctccatctactacagcggcatcacctactacaaccccagcctgaagtccagagtgaccatctccgtggacaccagcaagaaccagttctccctgaagctgagcagcgtgacagccgccgataccgccgtgtattattgtgccagacatgacggcgctgtggccggcctgtttgattattggggacagggcaccctggtcaccgtgtcatctgctacgcgtcagagttttgggttgttggaccctaaattgtgctatctgttggacggaatcctgttcatttacggagtgatcctgaccgcattgttcctgcgggttaagttttccagatccgcagacgcacccgcttaccaacaagggcagaaccaactctacaatgaacttaatttggggcggagggaagagtacgacgttctggacaaaaggaggggacgagatcccgagatgggcggaaagcctcagcgaaggaagaatccgcaagaggggctttataacgaactccagaaagataaaatggcagaagcctatagtgagattgggatgaagggagaaaggaggaggggtaaaggtcacgatgggttgtaccaaggattgagcacagccactaaagatacctatgatgcgctccacatgcaggccctgccgccaagacgcgccaagagaagcggatctggcgtgaagcagaccctgaatttcgacctgctgaagctggctggcgacgtggaatccaacccaggcccttctagaggccatatgaccgagtacaagcccacggtgcgcctcgccacccgcgacgacgtccccagggccgtacgcaccctcgccgccgcgttcgccgactaccccgccacgcgccacaccgtcgatccggaccgccacatcgagcgggtcaccgagctgcaagaactcttcctcacgcgcgtcgggctcgacatcggcaaggtgtgggtcgcggacgacggcgccgcggtggcggtctggaccacgccggagagcgtcgaagcgggggcggtgttcgccgagatcggcccgcgcatggccgagttgagcggttcccggctggccgcgcagcaacagatggaaggcctcctggcgccgcaccggcccaaggagcccgcgtggttcctggccaccgtcggcgtctcgcccgaccaccagggcaagggtctgggcagcgccgtcgtgctccccggagtggaggcggccgagcgcgccggggtgcccgccttcctggagacctccgcgccccgcaacctccccttctacgagcggctcggcttcaccgtcaccgccgacgtcgaggtgcccgaaggaccgcgcacctggtgcatgacccgcaagcccggtgcctga

SEQ ID NO: 8196 - DNA, 1947 bp, Artificial Sequence
  Synthetic Polynucloetide
atggccttaccagtgaccgccttgctcctgccgctggccttgctgctccacgccgccaggccgagctacgtgctgacacagcctccatccgtgtctgtggctccaggacagaccgccagaatcacatgcggcggcaagaacatcggcagcaagagcgtgcactggtatcagcagccacctggacaggctccagtggtggtggtgtacgacgacagcgatagacctagcggcatccccgagagattcagcggcagcaattccggcaataccgccacactgaccatcagcagagtggaagctggcgacgaggccgtgtactactgccaagtgtgggacagcagcagcgatcacgtggtgtttggcggcggaacaaagctgacagtgcttctcgagggacagcctaaggccaatcctaccgtgacactgttccctccaagcagcgaagaactccaggccaacaaggccacacttgtgtgcctgatctccgacttctaccctggggctgtgacagtggcttggaaggccgatggatctcctgtgaaagccggcgtggaaaccaccaagccatccaagcagagcaacaacaaatacgccgccagctcctacctgagcctgacacctgagcagtggaagtcccacagatcctacagctgccaagtgacccacgaaggcagcaccgtggaaaagacagtggcccctacagagtgcagccccatcaagaccgatgtgattacaatggaccccaaggacaactgctccaaggacgccaacgataccctgctgctccagctgaccaacaccagcgcctactacatgtacttgttgctgctgctgaagtccgtggtgtacttcgccatcatcacatgctgcctgctgcggagaaccgccttctgctgcaacggcgagaagtctagggccaagcgatctggatctggagcaacaaacttctcactactcaaacaagcaggtgacgtggaggagaatcccgggcctactagtatggactggatttggcgcatccttttccttgtcggcgctgctaccggcgcgcattccttcgaacaactccagctgcaagagtctggccctggcctggtcaagcctagcgaaacactgagcctgacctgtaccgtgtctggcggctctatcagctccagcagctatttctggggctggatcagacaacctcctggcaaaggactggaatggatcggctccatctactacagcggcatcacctactacaaccccagcctgaagtccagagtgaccatctccgtggacaccagcaagaaccagttctccctgaagctgagcagcgtgacagccgccgataccgccgtgtattattgtgccagacatgacggcgctgtggccggcctgtttgattattggggacagggcaccctggtcaccgtgtcatctgctacgcgtgcctctacaaagggaccctccgtgtttcctctggctcccagcagcaagtctacaagcggaggaacagccgctctgggctgcctggtcaaggattactttcccgagcctgtgaccgtgtcctggaatagcggagcactgacaagcggcgtgcacacctttccagccgtgctgcaaagcagcggcctgtactctctgagcagcgtggtcacagtgcctagctctagcctgggcacccagacctacatctgcaatgtgaaccacaagcctagcaacaccaaggtggacaagagagtggaacccaagagctgtgaagtgaaaaccgactccaccgaccacgtgaagcccaaagagacagagaacaccaagcagcccagcaagagctgccacaagcccaaggccatcgtgcacaccgagaaagtgaacatgatgagcctgaccgtgctgggcctgcggatgctgttcgccaaaaccgtggccgtgaacttcctgctgaccgccaagctgttcttcctc

SEQ ID NO: 8197 - DNA, 1881 bp, Artificial Sequence
  Synthetic Polynucloetide
atggccttaccagtgaccgccttgctcctgccgctggccttgctgctccacgccgccaggccgagctacgtgctgacacagcctccatccgtgtctgtggctccaggacagaccgccagaatcacatgcggcggcaagaacatcggcagcaagagcgtgcactggtatcagcagccacctggacaggctccagtggtggtggtgtacgacgacagcgatagacctagcggcatccccgagagattcagcggcagcaattccggcaataccgccacactgaccatcagcagagtggaagctggcgacgaggccgtgtactactgccaagtgtgggacagcagcagcgatcacgtggtgtttggcggcggaacaaagctgacagtgcttctcgagggacagcctaaggccaatcctaccgtgacactgttccctccaagcagcgaagaactccaggccaacaaggccacacttgtgtgcctgatctccgacttctaccctggggctgtgacagtggcttggaaggccgatggatctcctgtgaaagccggcgtggaaaccaccaagccatccaagcagagcaacaacaaatacgccgccagctcctacctgagcctgacacctgagcagtggaagtcccacagatcctacagctgccaagtgacccacgaaggcagcaccgtggaaaagacagtggcccctacagagtgcagcggcagagccgattgcggcatcaccagcgccagctaccaccagggcgtgctgagcgccaccatcctgtacgagatcctgctgggcaaggccaccctgtacgccgtgctggtgtctgccctggtgctgatggctatggtcaagcggaaggacagccggggaagggccaagcgatctggatctggagcaacaaacttctcactactcaaacaagcaggtgacgtggaggagaatcccgggcctactagtatggactggatttggcgcatccttttccttgtcggcgctgctaccggcgcgcattccttcgaacaactccagctgcaagagtctggccctggcctggtcaagcctagcgaaacactgagcctgacctgtaccgtgtctggcggctctatcagctccagcagctatttctggggctggatcagacaacctcctggcaaaggactggaatggatcggctccatctactacagcggcatcacctactacaaccccagcctgaagtccagagtgaccatctccgtggacaccagcaagaaccagttctccctgaagctgagcagcgtgacagccgccgataccgccgtgtattattgtgccagacatgacggcgctgtggccggcctgtttgattattggggacagggcaccctggtcaccgtgtcatctgctacgcgtgcctctacaaagggaccctccgtgtttcctctggctcccagcagcaagtctacaagcggaggaacagccgctctgggctgcctggtcaaggattactttcccgagcctgtgaccgtgtcctggaatagcggagcactgacaagcggcgtgcacacctttccagccgtgctgcaaagcagcggcctgtactctctgagcagcgtggtcacagtgcctagctctagcctgggcacccagacctacatctgcaatgtgaaccacaagcctagcaacaccaaggtggacaagagagtggaacccaagagctgtatccccgaggacacattcttcccaagcagcgacgtgccctgcgacgtgaagctggtggaaaagagcttcgagacagacaccaacctgaacttccagaacctgagcgtgatcggcttcagaatcctgctgctgaaagtggccggctttaacctgctgatgaccctgcggctgtggtccagc

SEQ ID NO: 8198 - DNA, 1881 bp, Artificial Sequence
  Synthetic Polynucloetide
atggccttaccagtgaccgccttgctcctgccgctggccttgctgctccacgccgccaggccgagctacgtgctgacacagcctccatccgtgtctgtggctccaggacagaccgccagaatcacatgcggcggcaagaacatcggcagcaagagcgtgcactggtatcagcagccacctggacaggctccagtggtggtggtgtacgacgacagcgatagacctagcggcatccccgagagattcagcggcagcaattccggcaataccgccacactgaccatcagcagagtggaagctggcgacgaggccgtgtactactgccaagtgtgggacagcagcagcgatcacgtggtgtttggcggcggaacaaagctgacagtgcttctcgagggacagcctaaggccaatcctaccgtgacactgttccctccaagcagcgaagaactccaggccaacaaggccacacttgtgtgcctgatctccgacttctaccctggggctgtgacagtggcttggaaggccgatggatctcctgtgaaagccggcgtggaaaccaccaagccatccaagcagagcaacaacaaatacgccgccagctcctacctgagcctgacacctgagcagtggaagtcccacagatcctacagctgccaagtgacccacgaaggcagcaccgtggaaaagacagtggcccctacagagtgcagcggcagagccgattgcggctttaccagcgagagctaccagcagggcgtgctgagcgccaccatcctgtacgagatcctgctgggcaaggccaccctgtacgccgtgctggtgtctgccctggtgctgatggctatggtcaagcggaaggacagccggggaagggccaagcgatctggatctggagcaacaaacttctcactactcaaacaagcaggtgacgtggaggagaatcccgggcctactagtatggactggatttggcgcatccttttccttgtcggcgctgctaccggcgcgcattccttcgaacaactccagctgcaagagtctggccctggcctggtcaagcctagcgaaacactgagcctgacctgtaccgtgtctggcggctctatcagctccagcagctatttctggggctggatcagacaacctcctggcaaaggactggaatggatcggctccatctactacagcggcatcacctactacaaccccagcctgaagtccagagtgaccatctccgtggacaccagcaagaaccagttctccctgaagctgagcagcgtgacagccgccgataccgccgtgtattattgtgccagacatgacggcgctgtggccggcctgtttgattattggggacagggcaccctggtcaccgtgtcatctgctacgcgtgcctctacaaagggaccctccgtgtttcctctggctcccagcagcaagtctacaagcggaggaacagccgctctgggctgcctggtcaaggattactttcccgagcctgtgaccgtgtcctggaatagcggagcactgacaagcggcgtgcacacctttccagccgtgctgcaaagcagcggcctgtactctctgagcagcgtggtcacagtgcctagctctagcctgggcacccagacctacatctgcaatgtgaaccacaagcctagcaacaccaaggtggacaagagagtggaacccaagagctgtatccccgaggacacattcttcccaagccccgagagcagctgcgacgtgaagctggtggaaaagagcttcgagacagacaccaacctgaacttccagaacctgagcgtgatcggcttcagaatcctgctgctgaaagtggccggctttaacctgctgatgaccctgcggctgtggtccagc

SEQ ID NO: 8199 - DNA, 1359 bp, Artificial Sequence
  Synthetic Polynucloetide
atggccttaccagtgaccgccttgctcctgccgctggccttgctgctccacgccgccaggccgagctacgtgctgacacagcctccatccgtgtctgtggctccaggacagaccgccagaatcacatgcggcggcaagaacatcggcagcaagagcgtgcactggtatcagcagccacctggacaggctccagtggtggtggtgtacgacgacagcgatagacctagcggcatccccgagagattcagcggcagcaattccggcaataccgccacactgaccatcagcagagtggaagctggcgacgaggccgtgtactactgccaagtgtgggacagcagcagcgatcacgtggtgtttggcggcggaacaaagctgacagtgcttggcggaggcggaagtggaggcggaggatctggcggcggaggctctcaactccagctgcaagagtctggccctggcctggtcaagcctagcgaaacactgagcctgacctgtaccgtgtctggcggctctatcagctccagcagctatttctggggctggatcagacaacctcctggcaaaggactggaatggatcggctccatctactacagcggcatcacctactacaaccccagcctgaagtccagagtgaccatctccgtggacaccagcaagaaccagttctccctgaagctgagcagcgtgacagccgccgataccgccgtgtattattgtgccagacatgacggcgctgtggccggcctgtttgattattggggacagggcaccctggtcaccgtgtcatctgctacgcgtgacggtaacgaggagatgggaggaatcactcaaaccccttacaaagtctcaatttcaggaacaactgttatccttacatgtccccagtatcctggcagcgagatcctttggcagcataacgacaagaatatagggggagatgaagacgataagaatatcggatctgacgaggatcacttgagcctgaaagagttctccgagcttgaacaaagcggatattatgtgtgctatccgcgcgggtcaaagccggaagacgctaacttttacctttatctccgagccagagtgtgcgaaaattgcatggaaatggacgttatgtccgttgctacaatagttatcgtagatatatgcatcacgggtggactgcttctgctggtttattattggtccaagaatagaaaggccaaagctaaacccgtgaccagaggcgctggcgcaggcggaaggcaaaggggacaaaacaaagaacggccaccaccagtgccaaatccagattatgagcctattcggaaaggacagagggacctgtactctggcctgaatcagagaagaatc

SEQ ID NO: 8200 - DNA, 1254 bp, Artificial Sequence
  Synthetic Polynucloetide
atggccttaccagtgaccgccttgctcctgccgctggccttgctgctccacgccgccaggccgagctacgtgctgacacagcctccatccgtgtctgtggctccaggacagaccgccagaatcacatgcggcggcaagaacatcggcagcaagagcgtgcactggtatcagcagccacctggacaggctccagtggtggtggtgtacgacgacagcgatagacctagcggcatccccgagagattcagcggcagcaattccggcaataccgccacactgaccatcagcagagtggaagctggcgacgaggccgtgtactactgccaagtgtgggacagcagcagcgatcacgtggtgtttggcggcggaacaaagctgacagtgcttggcggaggcggaagtggaggcggaggatctggcggcggaggctctcaactccagctgcaagagtctggccctggcctggtcaagcctagcgaaacactgagcctgacctgtaccgtgtctggcggctctatcagctccagcagctatttctggggctggatcagacaacctcctggcaaaggactggaatggatcggctccatctactacagcggcatcacctactacaaccccagcctgaagtccagagtgaccatctccgtggacaccagcaagaaccagttctccctgaagctgagcagcgtgacagccgccgataccgccgtgtattattgtgccagacatgacggcgctgtggccggcctgtttgattattggggacagggcaccctggtcaccgtgtcatctgctacgcgtttcaagatccccatcgaggaactggaagatcgggtgttcgtgaactgcaacacctctatcacctgggtggaaggcaccgtgggaacactgctgagcgacatcaccagactggacctcggcaagcggattctggaccctcggggcatctacagatgcaacggcaccgacatctacaaggacaaagaaagcaccgtgcaggtccactacagaatgtgccagtcctgcgtggaactggaccctgctacagtggccggcatcatcgtgaccgatgtgatcgctactctgctgctggctctgggagtgttctgcttcgccggacacgaaacaggcagactgtctggcgctgccgatacacaggccctgctgagaaacgaccaagtgtatcagcccctgcgcgacagagatgatgcccagtattctcacctcggcggcaactgggctagaaacaag

SEQ ID NO: 8201 - DNA, 1284 bp, Artificial Sequence
  Synthetic Polynucloetide
atggccttaccagtgaccgccttgctcctgccgctggccttgctgctccacgccgccaggccgagctacgtgctgacacagcctccatccgtgtctgtggctccaggacagaccgccagaatcacatgcggcggcaagaacatcggcagcaagagcgtgcactggtatcagcagccacctggacaggctccagtggtggtggtgtacgacgacagcgatagacctagcggcatccccgagagattcagcggcagcaattccggcaataccgccacactgaccatcagcagagtggaagctggcgacgaggccgtgtactactgccaagtgtgggacagcagcagcgatcacgtggtgtttggcggcggaacaaagctgacagtgcttggcggaggcggaagtggaggcggaggatctggcggcggaggctctcaactccagctgcaagagtctggccctggcctggtcaagcctagcgaaacactgagcctgacctgtaccgtgtctggcggctctatcagctccagcagctatttctggggctggatcagacaacctcctggcaaaggactggaatggatcggctccatctactacagcggcatcacctactacaaccccagcctgaagtccagagtgaccatctccgtggacaccagcaagaaccagttctccctgaagctgagcagcgtgacagccgccgataccgccgtgtattattgtgccagacatgacggcgctgtggccggcctgtttgattattggggacagggcaccctggtcaccgtgtcatctgctacgcgtcagagcatcaagggcaaccacctggtcaaggtgtacgactaccaagaggacggcagcgtgctgctgacatgtgatgccgaggccaagaacatcacctggtttaaggacggcaagatgatcggcttcctgaccgaggacaagaagaagtggaacctgggcagcaacgctaaggaccccagaggcatgtatcagtgcaagggcagccagaacaagagcaagcccctccaggtgtactaccggatgtgccagaactgcatcgagctgaacgccgctaccatcagcggctttctgttcgccgagatcgtgtccatcttcgtgctggccgtgggcgtgtactttatcgctggacaggatggcgtgcggcagagcagagcttccgataagcaaaccctgctgcctaacgaccagctgtaccagcctctgaaggacagagaggacgaccagtacagccacctccagggcaatcagctgagaagaaac

SEQ ID NO: 8202 - DNA, 1233 bp, Artificial Sequence
  Synthetic Polynucloetide
atggccttaccagtgaccgccttgctcctgccgctggccttgctgctccacgccgccaggccgagctacgtgctgacacagcctccatccgtgtctgtggctccaggacagaccgccagaatcacatgcggcggcaagaacatcggcagcaagagcgtgcactggtatcagcagccacctggacaggctccagtggtggtggtgtacgacgacagcgatagacctagcggcatccccgagagattcagcggcagcaattccggcaataccgccacactgaccatcagcagagtggaagctggcgacgaggccgtgtactactgccaagtgtgggacagcagcagcgatcacgtggtgtttggcggcggaacaaagctgacagtgcttggcggaggcggaagtggaggcggaggatctggcggcggaggctctcaactccagctgcaagagtctggccctggcctggtcaagcctagcgaaacactgagcctgacctgtaccgtgtctggcggctctatcagctccagcagctatttctggggctggatcagacaacctcctggcaaaggactggaatggatcggctccatctactacagcggcatcacctactacaaccccagcctgaagtccagagtgaccatctccgtggacaccagcaagaaccagttctccctgaagctgagcagcgtgacagccgccgataccgccgtgtattattgtgccagacatgacggcgctgtggccggcctgtttgattattggggacagggcaccctggtcaccgtgtcatctgctacgcgtcagagttttgggttgttggaccctaaattgtgctatctgttggacggaatcctgttcatttacggagtgatcctgaccgcattgttcctgcgggttaagttttccagatccgcagacgcacccgcttaccaacaagggcagaaccaactctacaatgaacttaatttggggcggagggaagagtacgacgttctggacaaaaggaggggacgagatcccgagatgggcggaaagcctcagcgaaggaagaatccgcaagaggggctttataacgaactccagaaagataaaatggcagaagcctatagtgagattgggatgaagggagaaaggaggaggggtaaaggtcacgatgggttgtaccaaggattgagcacagccactaaagatacctatgatgcgctccacatgcaggccctgccgccaaga

SEQ ID NO: 8203 - DNA, 1359 bp, Artificial Sequence
  Synthetic Polynucloetide
atggccttaccagtgaccgccttgctcctgccgctggccttgctgctccacgccgccaggccgcaactccagctgcaagagtctggccctggcctggtcaagcctagcgaaacactgagcctgacctgtaccgtgtctggcggctctatcagctccagcagctatttctggggctggatcagacaacctcctggcaaaggactggaatggatcggctccatctactacagcggcatcacctactacaaccccagcctgaagtccagagtgaccatctccgtggacaccagcaagaaccagttctccctgaagctgagcagcgtgacagccgccgataccgccgtgtattattgtgccagacatgacggcgctgtggccggcctgtttgattattggggacagggcaccctggtcaccgtgtcatctgctggcggaggcggaagtggaggcggaggatctggcggcggaggctctagctacgtgctgacacagcctccatccgtgtctgtggctccaggacagaccgccagaatcacatgcggcggcaagaacatcggcagcaagagcgtgcactggtatcagcagccacctggacaggctccagtggtggtggtgtacgacgacagcgatagacctagcggcatccccgagagattcagcggcagcaattccggcaataccgccacactgaccatcagcagagtggaagctggcgacgaggccgtgtactactgccaagtgtgggacagcagcagcgatcacgtggtgtttggcggcggaacaaagctgacagtgcttacgcgtgacggtaacgaggagatgggaggaatcactcaaaccccttacaaagtctcaatttcaggaacaactgttatccttacatgtccccagtatcctggcagcgagatcctttggcagcataacgacaagaatatagggggagatgaagacgataagaatatcggatctgacgaggatcacttgagcctgaaagagttctccgagcttgaacaaagcggatattatgtgtgctatccgcgcgggtcaaagccggaagacgctaacttttacctttatctccgagccagagtgtgcgaaaattgcatggaaatggacgttatgtccgttgctacaatagttatcgtagatatatgcatcacgggtggactgcttctgctggtttattattggtccaagaatagaaaggccaaagctaaacccgtgaccagaggcgctggcgcaggcggaaggcaaaggggacaaaacaaagaacggccaccaccagtgccaaatccagattatgagcctattcggaaaggacagagggacctgtactctggcctgaatcagagaagaatc

SEQ ID NO: 8204 - DNA, 1254 bp, Artificial Sequence
  Synthetic Polynucloetide
atggccttaccagtgaccgccttgctcctgccgctggccttgctgctccacgccgccaggccgcaactccagctgcaagagtctggccctggcctggtcaagcctagcgaaacactgagcctgacctgtaccgtgtctggcggctctatcagctccagcagctatttctggggctggatcagacaacctcctggcaaaggactggaatggatcggctccatctactacagcggcatcacctactacaaccccagcctgaagtccagagtgaccatctccgtggacaccagcaagaaccagttctccctgaagctgagcagcgtgacagccgccgataccgccgtgtattattgtgccagacatgacggcgctgtggccggcctgtttgattattggggacagggcaccctggtcaccgtgtcatctgctggcggaggcggaagtggaggcggaggatctggcggcggaggctctagctacgtgctgacacagcctccatccgtgtctgtggctccaggacagaccgccagaatcacatgcggcggcaagaacatcggcagcaagagcgtgcactggtatcagcagccacctggacaggctccagtggtggtggtgtacgacgacagcgatagacctagcggcatccccgagagattcagcggcagcaattccggcaataccgccacactgaccatcagcagagtggaagctggcgacgaggccgtgtactactgccaagtgtgggacagcagcagcgatcacgtggtgtttggcggcggaacaaagctgacagtgcttacgcgtttcaagatccccatcgaggaactggaagatcgggtgttcgtgaactgcaacacctctatcacctgggtggaaggcaccgtgggaacactgctgagcgacatcaccagactggacctcggcaagcggattctggaccctcggggcatctacagatgcaacggcaccgacatctacaaggacaaagaaagcaccgtgcaggtccactacagaatgtgccagtcctgcgtggaactggaccctgctacagtggccggcatcatcgtgaccgatgtgatcgctactctgctgctggctctgggagtgttctgcttcgccggacacgaaacaggcagactgtctggcgctgccgatacacaggccctgctgagaaacgaccaagtgtatcagcccctgcgcgacagagatgatgcccagtattctcacctcggcggcaactgggctagaaacaag

SEQ ID NO: 8205 - DNA, 1284 bp, Artificial Sequence
  Synthetic Polynucloetide
atggccttaccagtgaccgccttgctcctgccgctggccttgctgctccacgccgccaggccgcaactccagctgcaagagtctggccctggcctggtcaagcctagcgaaacactgagcctgacctgtaccgtgtctggcggctctatcagctccagcagctatttctggggctggatcagacaacctcctggcaaaggactggaatggatcggctccatctactacagcggcatcacctactacaaccccagcctgaagtccagagtgaccatctccgtggacaccagcaagaaccagttctccctgaagctgagcagcgtgacagccgccgataccgccgtgtattattgtgccagacatgacggcgctgtggccggcctgtttgattattggggacagggcaccctggtcaccgtgtcatctgctggcggaggcggaagtggaggcggaggatctggcggcggaggctctagctacgtgctgacacagcctccatccgtgtctgtggctccaggacagaccgccagaatcacatgcggcggcaagaacatcggcagcaagagcgtgcactggtatcagcagccacctggacaggctccagtggtggtggtgtacgacgacagcgatagacctagcggcatccccgagagattcagcggcagcaattccggcaataccgccacactgaccatcagcagagtggaagctggcgacgaggccgtgtactactgccaagtgtgggacagcagcagcgatcacgtggtgtttggcggcggaacaaagctgacagtgcttacgcgtcagagcatcaagggcaaccacctggtcaaggtgtacgactaccaagaggacggcagcgtgctgctgacatgtgatgccgaggccaagaacatcacctggtttaaggacggcaagatgatcggcttcctgaccgaggacaagaagaagtggaacctgggcagcaacgctaaggaccccagaggcatgtatcagtgcaagggcagccagaacaagagcaagcccctccaggtgtactaccggatgtgccagaactgcatcgagctgaacgccgctaccatcagcggctttctgttcgccgagatcgtgtccatcttcgtgctggccgtgggcgtgtactttatcgctggacaggatggcgtgcggcagagcagagcttccgataagcaaaccctgctgcctaacgaccagctgtaccagcctctgaaggacagagaggacgaccagtacagccacctccagggcaatcagctgagaagaaac

SEQ ID NO: 8206 - DNA, 1233 bp, Artificial Sequence
  Synthetic Polynucloetide
atggccttaccagtgaccgccttgctcctgccgctggccttgctgctccacgccgccaggccgcaactccagctgcaagagtctggccctggcctggtcaagcctagcgaaacactgagcctgacctgtaccgtgtctggcggctctatcagctccagcagctatttctggggctggatcagacaacctcctggcaaaggactggaatggatcggctccatctactacagcggcatcacctactacaaccccagcctgaagtccagagtgaccatctccgtggacaccagcaagaaccagttctccctgaagctgagcagcgtgacagccgccgataccgccgtgtattattgtgccagacatgacggcgctgtggccggcctgtttgattattggggacagggcaccctggtcaccgtgtcatctgctggcggaggcggaagtggaggcggaggatctggcggcggaggctctagctacgtgctgacacagcctccatccgtgtctgtggctccaggacagaccgccagaatcacatgcggcggcaagaacatcggcagcaagagcgtgcactggtatcagcagccacctggacaggctccagtggtggtggtgtacgacgacagcgatagacctagcggcatccccgagagattcagcggcagcaattccggcaataccgccacactgaccatcagcagagtggaagctggcgacgaggccgtgtactactgccaagtgtgggacagcagcagcgatcacgtggtgtttggcggcggaacaaagctgacagtgcttacgcgtcagagttttgggttgttggaccctaaattgtgctatctgttggacggaatcctgttcatttacggagtgatcctgaccgcattgttcctgcgggttaagttttccagatccgcagacgcacccgcttaccaacaagggcagaaccaactctacaatgaacttaatttggggcggagggaagagtacgacgttctggacaaaaggaggggacgagatcccgagatgggcggaaagcctcagcgaaggaagaatccgcaagaggggctttataacgaactccagaaagataaaatggcagaagcctatagtgagattgggatgaagggagaaaggaggaggggtaaaggtcacgatgggttgtaccaaggattgagcacagccactaaagatacctatgatgcgctccacatgcaggccctgccgccaaga

SEQ ID NO: 8207 - DNA, 1935 bp, Artificial Sequence
  Synthetic Polynucloetide
atggccttaccagtgaccgccttgctcctgccgctggccttgctgctccacgccgccaggccgagctacgtgctgacacagcctccatccgtgtctgtggctccaggacagaccgccagaatcacatgcggcggcaagaacatcggcagcaagagcgtgcactggtatcagcagccacctggacaggctccagtggtggtggtgtacgacgacagcgatagacctagcggcatccccgagagattcagcggcagcaattccggcaataccgccacactgaccatcagcagagtggaagctggcgacgaggccgtgtactactgccaagtgtgggacagcagcagcgatcacgtggtgtttggcggcggaacaaagctgacagtgcttggcggaggcggaagtggaggcggaggatctggcggcggaggctctcaactccagctgcaagagtctggccctggcctggtcaagcctagcgaaacactgagcctgacctgtaccgtgtctggcggctctatcagctccagcagctatttctggggctggatcagacaacctcctggcaaaggactggaatggatcggctccatctactacagcggcatcacctactacaaccccagcctgaagtccagagtgaccatctccgtggacaccagcaagaaccagttctccctgaagctgagcagcgtgacagccgccgataccgccgtgtattattgtgccagacatgacggcgctgtggccggcctgtttgattattggggacagggcaccctggtcaccgtgtcatctgctacgcgtgggagcggcatccagaaccctgatcctgccgtgtaccagctgcgggatagcaagagcagcgacaagagcgtgtgtctgttcaccgacttcgacagccagaccaacgtgtcccagagcaaggactccgacgtgtacatcaccgataagaccgtgctggacatgcggagcatggacttcaagagcaactccgccgtggcctggtccaacaagtccgatttcgcctgcgccaacgccttcaacaacagcattatccccgaggacacattcttcccaagccccgagagcagctgcgacgtgaagctggtggaaaagagcttcgagacagacaccaacctgaacttccagaacctgagcgtgatcggcttcagaatcctgctgctgaaagtggccggctttaacctgctgatgaccctgcggctgtggtccagccgcgccaagagaagcggatctggcgtgaagcagaccctgaatttcgacctgctgaagctggctggcgacgtggaatccaacccaggcccttctagaggccatatgaccgagtacaagcccacggtgcgcctcgccacccgcgacgacgtccccagggccgtacgcaccctcgccgccgcgttcgccgactaccccgccacgcgccacaccgtcgatccggaccgccacatcgagcgggtcaccgagctgcaagaactcttcctcacgcgcgtcgggctcgacatcggcaaggtgtgggtcgcggacgacggcgccgcggtggcggtctggaccacgccggagagcgtcgaagcgggggcggtgttcgccgagatcggcccgcgcatggccgagttgagcggttcccggctggccgcgcagcaacagatggaaggcctcctggcgccgcaccggcccaaggagcccgcgtggttcctggccaccgtcggcgtctcgcccgaccaccagggcaagggtctgggcagcgccgtcgtgctccccggagtggaggcggccgagcgcgccggggtgcccgccttcctggagacctccgcgccccgcaacctccccttctacgagcggctcggcttcaccgtcaccgccgacgtcgaggtgcccgaaggaccgcgcacctggtgcatgacccgcaagcccggtgcctga

SEQ ID NO: 8208 - DNA, 2031 bp, Artificial Sequence
  Synthetic Polynucloetide
atggccttaccagtgaccgccttgctcctgccgctggccttgctgctccacgccgccaggccgagctacgtgctgacacagcctccatccgtgtctgtggctccaggacagaccgccagaatcacatgcggcggcaagaacatcggcagcaagagcgtgcactggtatcagcagccacctggacaggctccagtggtggtggtgtacgacgacagcgatagacctagcggcatccccgagagattcagcggcagcaattccggcaataccgccacactgaccatcagcagagtggaagctggcgacgaggccgtgtactactgccaagtgtgggacagcagcagcgatcacgtggtgtttggcggcggaacaaagctgacagtgcttggcggaggcggaagtggaggcggaggatctggcggcggaggctctcaactccagctgcaagagtctggccctggcctggtcaagcctagcgaaacactgagcctgacctgtaccgtgtctggcggctctatcagctccagcagctatttctggggctggatcagacaacctcctggcaaaggactggaatggatcggctccatctactacagcggcatcacctactacaaccccagcctgaagtccagagtgaccatctccgtggacaccagcaagaaccagttctccctgaagctgagcagcgtgacagccgccgataccgccgtgtattattgtgccagacatgacggcgctgtggccggcctgtttgattattggggacagggcaccctggtcaccgtgtcatctgctctcgaggacctgaagaacgtgttcccacctgaggtggccgtgttcgagcctagcgaggccgagatcagccacacccagaaagccaccctcgtgtgcctggctaccggcttctaccccgaccatgtggaactgtcttggtgggtcaacggcaaagaggtgcacagcggcgtgtctaccgacccccagccactgaaagaacagcccgccctgaacgacagccggtactgcctgagcagcagactgagagtgtccgccaccttctggcagaacccccggaaccacttcagatgccaggtgcagttctacggcctgagcgagaacgacgagtggacccaggacagagccaagcccgtgacccagatcgtgtctgccgaagcctggggcagagccgattgcggctttaccagcgagagctaccagcagggcgtgctgagcgccaccatcctgtacgagatcctgctgggcaaggccaccctgtacgccgtgctggtgtctgccctggtgctgatggctatggtcaagcggaaggacagccggggaagggccaagcgatctggatctggagcaacaaacttctcactactcaaacaagcaggtgacgtggaggagaatcccgggcctactagaggccatatgaccgagtacaagcccacggtgcgcctcgccacccgcgacgacgtccccagggccgtacgcaccctcgccgccgcgttcgccgactaccccgccacgcgccacaccgtcgatccggaccgccacatcgagcgggtcaccgagctgcaagaactcttcctcacgcgcgtcgggctcgacatcggcaaggtgtgggtcgcggacgacggcgccgcggtggcggtctggaccacgccggagagcgtcgaagcgggggcggtgttcgccgagatcggcccgcgcatggccgagttgagcggttcccggctggccgcgcagcaacagatggaaggcctcctggcgccgcaccggcccaaggagcccgcgtggttcctggccaccgtcggcgtctcgcccgaccaccagggcaagggtctgggcagcgccgtcgtgctccccggagtggaggcggccgagcgcgccggggtgcccgccttcctggagacctccgcgccccgcaacctccccttctacgagcggctcggcttcaccgtcaccgccgacgtcgaggtgcccgaaggaccgcgcacctggtgcatgacccgcaagcccggtgcctga

SEQ ID NO: 8209 - DNA, 2181 bp, Artificial Sequence
  Synthetic Polynucloetide
atggccttaccagtgaccgccttgctcctgccgctggccttgctgctccacgccgccaggccgagctacgtgctgacacagcctccatccgtgtctgtggctccaggacagaccgccagaatcacatgcggcggcaagaacatcggcagcaagagcgtgcactggtatcagcagccacctggacaggctccagtggtggtggtgtacgacgacagcgatagacctagcggcatccccgagagattcagcggcagcaattccggcaataccgccacactgaccatcagcagagtggaagctggcgacgaggccgtgtactactgccaagtgtgggacagcagcagcgatcacgtggtgtttggcggcggaacaaagctgacagtgcttggcggaggcggaagtggaggcggaggatctggcggcggaggctctcaactccagctgcaagagtctggccctggcctggtcaagcctagcgaaacactgagcctgacctgtaccgtgtctggcggctctatcagctccagcagctatttctggggctggatcagacaacctcctggcaaaggactggaatggatcggctccatctactacagcggcatcacctactacaaccccagcctgaagtccagagtgaccatctccgtggacaccagcaagaaccagttctccctgaagctgagcagcgtgacagccgccgataccgccgtgtattattgtgccagacatgacggcgctgtggccggcctgtttgattattggggacagggcaccctggtcaccgtgtcatctgctacgcgtgagcagaaactgatctcggaagaggatctggggagcggcaccccattcccttctctggcccctcccatcatgctgctggtggacggcaagcagcagatggtggtcgtgtgcctggtgctggatgtggccccacctggactggacagccccatctggtttagcgccggcaatggctctgccctggacgcctttacctacggcccaagccctgccaccgatggcacctggacaaatctggcccacctgagcctgcccagcgaggaactggcttcttgggagcctctcgtgtgccacacaggacctggcgctgagggacacagcagatccacccagcctatgcacctgtctggcgaggccagcaccgccagaacctgtcctcaggaacctctgagaggcacccctggcggagcactgtggctgggagtgctgagactgctgctgttcaagctgctgctgtttgacctgctgctgacctgctcctgtctgtgcgatcctgccggccctctgccttctcctgccaccaccacaagactgagagccctgggcagccacagactgcaccctgccacagagacaggcggcagagaggccacaagcagccctagaccccagcccagagacagaagatggggcgataccccccctggcagaaagcctggatctccagtccgcgccaagagaagcggatctggcgtgaagcagaccctgaatttcgacctgctgaagctggctggcgacgtggaatccaacccaggcccttctagatctagaggccatatgaccgagtacaagcccacggtgcgcctcgccacccgcgacgacgtccccagggccgtacgcaccctcgccgccgcgttcgccgactaccccgccacgcgccacaccgtcgatccggaccgccacatcgagcgggtcaccgagctgcaagaactcttcctcacgcgcgtcgggctcgacatcggcaaggtgtgggtcgcggacgacggcgccgcggtggcggtctggaccacgccggagagcgtcgaagcgggggcggtgttcgccgagatcggcccgcgcatggccgagttgagcggttcccggctggccgcgcagcaacagatggaaggcctcctggcgccgcaccggcccaaggagcccgcgtggttcctggccaccgtcggcgtctcgcccgaccaccagggcaagggtctgggcagcgccgtcgtgctccccggagtggaggcggccgagcgcgccggggtgcccgccttcctggagacctccgcgccccgcaacctccccttctacgagcggctcggcttcaccgtcaccgccgacgtcgaggtgcccgaaggaccgcgcacctggtgcatgacccgcaagcccggtgcctga

SEQ ID NO: 8210 - DNA, 1620 bp, Artificial Sequence; identical to SEQ ID NO: 7934
  Synthetic Polynucloetide

SEQ ID NO: 8211 - DNA, 927 bp, Artificial Sequence; identical to SEQ ID NO: 7935
  Synthetic Polynucloetide

SEQ ID NO: 8212 - DNA, 1356 bp, Artificial Sequence; identical to SEQ ID NO: 7453
  Synthetic Polynucloetide

SEQ ID NO: 8213 - DNA, 855 bp, Artificial Sequence; identical to SEQ ID NO: 7454
  Synthetic Polynucloetide

SEQ ID NO: 8214 - DNA, 1674 bp, Artificial Sequence; identical to SEQ ID NO: 7938
  Synthetic Polynucloetide

SEQ ID NO: 8215 - DNA, 984 bp, Artificial Sequence; identical to SEQ ID NO: 7939
  Synthetic Polynucloetide

SEQ ID NO: 8216 - DNA, 1392 bp, Artificial Sequence; identical to SEQ ID NO: 7457
  Synthetic Polynucloetide

SEQ ID NO: 8217 - DNA, 894 bp, Artificial Sequence; identical to SEQ ID NO: 7458
  Synthetic Polynucloetide

SEQ ID NO: 8218 - DNA, 1935 bp, Artificial Sequence
  Synthetic Polynucloetide
atggccttaccagtgaccgccttgctcctgccgctggccttgctgctccacgccgccaggccgagctacgtgctgacacagcctccatccgtgtctgtggctccaggacagaccgccagaatcacatgcggcggcaagaacatcggcagcaagagcgtgcactggtatcagcagccacctggacaggctccagtggtggtggtgtacgacgacagcgatagacctagcggcatccccgagagattcagcggcagcaattccggcaataccgccacactgaccatcagcagagtggaagctggcgacgaggccgtgtactactgccaagtgtgggacagcagcagcgatcacgtggtgtttggcggcggaacaaagctgacagtgcttggcggaggcggaagtggaggcggaggatctggcggcggaggctctcaactccagctgcaagagtctggccctggcctggtcaagcctagcgaaacactgagcctgacctgtaccgtgtctggcggctctatcagctccagcagctatttctggggctggatcagacaacctcctggcaaaggactggaatggatcggctccatctactacagcggcatcacctactacaaccccagcctgaagtccagagtgaccatctccgtggacaccagcaagaaccagttctccctgaagctgagcagcgtgacagccgccgataccgccgtgtattattgtgccagacatgacggcgctgtggccggcctgtttgattattggggacagggcaccctggtcaccgtgtcatctgctacgcgtgggagcggcatccagaaccctgatcctgccgtgtaccagctgcgggatagcaagagcagcgacaagagcgtgtgtctgttcaccgacttcgacagccagaccaacgtgtcccagagcaaggactccgacgtgtacatcaccgataagaccgtgctggacatgcggagcatggacttcaagagcaactccgccgtggcctggtccaacaagtccgatttcgcctgcgccaacgccttcaacaacagcattatccccgaggacacattcttcccaagcagcgacgtgccctgcgacgtgaagctggtggaaaagagcttcgagacagacaccaacctgaacttccagaacctgagcgtgatcggcttcagaatcctgctgctgaaagtggccggctttaacctgctgatgaccctgcggctgtggtccagccgcgccaagagaagcggatctggcgtgaagcagaccctgaatttcgacctgctgaagctggctggcgacgtggaatccaacccaggcccttctagaggccatatgaccgagtacaagcccacggtgcgcctcgccacccgcgacgacgtccccagggccgtacgcaccctcgccgccgcgttcgccgactaccccgccacgcgccacaccgtcgatccggaccgccacatcgagcgggtcaccgagctgcaagaactcttcctcacgcgcgtcgggctcgacatcggcaaggtgtgggtcgcggacgacggcgccgcggtggcggtctggaccacgccggagagcgtcgaagcgggggcggtgttcgccgagatcggcccgcgcatggccgagttgagcggttcccggctggccgcgcagcaacagatggaaggcctcctggcgccgcaccggcccaaggagcccgcgtggttcctggccaccgtcggcgtctcgcccgaccaccagggcaagggtctgggcagcgccgtcgtgctccccggagtggaggcggccgagcgcgccggggtgcccgccttcctggagacctccgcgccccgcaacctccccttctacgagcggctcggcttcaccgtcaccgccgacgtcgaggtgcccgaaggaccgcgcacctggtgcatgacccgcaagcccggtgcctga

SEQ ID NO: 8219 - DNA, 2031 bp, Artificial Sequence
  Synthetic Polynucloetide
atggccttaccagtgaccgccttgctcctgccgctggccttgctgctccacgccgccaggccgagctacgtgctgacacagcctccatccgtgtctgtggctccaggacagaccgccagaatcacatgcggcggcaagaacatcggcagcaagagcgtgcactggtatcagcagccacctggacaggctccagtggtggtggtgtacgacgacagcgatagacctagcggcatccccgagagattcagcggcagcaattccggcaataccgccacactgaccatcagcagagtggaagctggcgacgaggccgtgtactactgccaagtgtgggacagcagcagcgatcacgtggtgtttggcggcggaacaaagctgacagtgcttggcggaggcggaagtggaggcggaggatctggcggcggaggctctcaactccagctgcaagagtctggccctggcctggtcaagcctagcgaaacactgagcctgacctgtaccgtgtctggcggctctatcagctccagcagctatttctggggctggatcagacaacctcctggcaaaggactggaatggatcggctccatctactacagcggcatcacctactacaaccccagcctgaagtccagagtgaccatctccgtggacaccagcaagaaccagttctccctgaagctgagcagcgtgacagccgccgataccgccgtgtattattgtgccagacatgacggcgctgtggccggcctgtttgattattggggacagggcaccctggtcaccgtgtcatctgctctcgaggacctgaagaacgtgttcccacctgaggtggccgtgttcgagcctagcaaggccgagatcgcccacacccagaaagccaccctcgtgtgcctggctaccggcttctaccccgaccatgtggaactgtcttggtgggtcaacggcaaagaggtgcacagcggcgtgtctaccgacccccagccactgaaagaacagcccgccctgaacgacagccggtactgcctgagcagcagactgagagtgtccgccaccttctggcagaacccccggaaccacttcagatgccaggtgcagttctacggcctgagcgagaacgacgagtggacccaggacagagccaagcccgtgacccagatcgtgtctgccgaagcctggggcagagccgattgcggcatcaccagcgccagctaccaccagggcgtgctgagcgccaccatcctgtacgagatcctgctgggcaaggccaccctgtacgccgtgctggtgtctgccctggtgctgatggctatggtcaagcggaaggacagccggggaagggccaagcgatctggatctggagcaacaaacttctcactactcaaacaagcaggtgacgtggaggagaatcccgggcctactagaggccatatgaccgagtacaagcccacggtgcgcctcgccacccgcgacgacgtccccagggccgtacgcaccctcgccgccgcgttcgccgactaccccgccacgcgccacaccgtcgatccggaccgccacatcgagcgggtcaccgagctgcaagaactcttcctcacgcgcgtcgggctcgacatcggcaaggtgtgggtcgcggacgacggcgccgcggtggcggtctggaccacgccggagagcgtcgaagcgggggcggtgttcgccgagatcggcccgcgcatggccgagttgagcggttcccggctggccgcgcagcaacagatggaaggcctcctggcgccgcaccggcccaaggagcccgcgtggttcctggccaccgtcggcgtctcgcccgaccaccagggcaagggtctgggcagcgccgtcgtgctccccggagtggaggcggccgagcgcgccggggtgcccgccttcctggagacctccgcgccccgcaacctccccttctacgagcggctcggcttcaccgtcaccgccgacgtcgaggtgcccgaaggaccgcgcacctggtgcatgacccgcaagcccggtgcctga

SEQ ID NO: 8220 - DNA, 2100 bp, Artificial Sequence
  Synthetic Polynucloetide
atggccttaccagtgaccgccttgctcctgccgctggccttgctgctccacgccgccaggccgagctacgtgctgacacagcctccatccgtgtctgtggctccaggacagaccgccagaatcacatgcggcggcaagaacatcggcagcaagagcgtgcactggtatcagcagccacctggacaggctccagtggtggtggtgtacgacgacagcgatagacctagcggcatccccgagagattcagcggcagcaattccggcaataccgccacactgaccatcagcagagtggaagctggcgacgaggccgtgtactactgccaagtgtgggacagcagcagcgatcacgtggtgtttggcggcggaacaaagctgacagtgcttggcggaggcggaagtggaggcggaggatctggcggcggaggctctcaactccagctgcaagagtctggccctggcctggtcaagcctagcgaaacactgagcctgacctgtaccgtgtctggcggctctatcagctccagcagctatttctggggctggatcagacaacctcctggcaaaggactggaatggatcggctccatctactacagcggcatcacctactacaaccccagcctgaagtccagagtgaccatctccgtggacaccagcaagaaccagttctccctgaagctgagcagcgtgacagccgccgataccgccgtgtattattgtgccagacatgacggcgctgtggccggcctgtttgattattggggacagggcaccctggtcaccgtgtcatctgctacgcgtgggtctggaggcggaggcagcggcggaggcgggagcggcgacggtaacgaggagatgggaggaatcactcaaaccccttacaaagtctcaatttcaggaacaactgttatccttacatgtccccagtatcctggcagcgagatcctttggcagcataacgacaagaatatagggggagatgaagacgataagaatatcggatctgacgaggatcacttgagcctgaaagagttctccgagcttgaacaaagcggatattatgtgtgctatccgcgcgggtcaaagccggaagacgctaacttttacctttatctccgagccagagtgtgcgaaaattgcatggaaatggacgttatgtccgttgctacaatagttatcgtagatatatgcatcacgggtggactgcttctgctggtttattattggtccaagaatagaaaggccaaagctaaacccgtgaccagaggcgctggcgcaggcggaaggcaaaggggacaaaacaaagaacggccaccaccagtgccaaatccagattatgagcctattcggaaaggacagagggacctgtactctggcctgaatcagagaagaatccgcgccaagagaagcggatctggcgtgaagcagaccctgaatttcgacctgctgaagctggctggcgacgtggaatccaacccaggcccttctagaggccatatgaccgagtacaagcccacggtgcgcctcgccacccgcgacgacgtccccagggccgtacgcaccctcgccgccgcgttcgccgactaccccgccacgcgccacaccgtcgatccggaccgccacatcgagcgggtcaccgagctgcaagaactcttcctcacgcgcgtcgggctcgacatcggcaaggtgtgggtcgcggacgacggcgccgcggtggcggtctggaccacgccggagagcgtcgaagcgggggcggtgttcgccgagatcggcccgcgcatggccgagttgagcggttcccggctggccgcgcagcaacagatggaaggcctcctggcgccgcaccggcccaaggagcccgcgtggttcctggccaccgtcggcgtctcgcccgaccaccagggcaagggtctgggcagcgccgtcgtgctccccggagtggaggcggccgagcgcgccggggtgcccgccttcctggagacctccgcgccccgcaacctccccttctacgagcggctcggcttcaccgtcaccgccgacgtcgaggtgcccgaaggaccgcgcacctggtgcatgacccgcaagcccggtgcctga

SEQ ID NO: 8221 - DNA, 1995 bp, Artificial Sequence
  Synthetic Polynucloetide
atggccttaccagtgaccgccttgctcctgccgctggccttgctgctccacgccgccaggccgagctacgtgctgacacagcctccatccgtgtctgtggctccaggacagaccgccagaatcacatgcggcggcaagaacatcggcagcaagagcgtgcactggtatcagcagccacctggacaggctccagtggtggtggtgtacgacgacagcgatagacctagcggcatccccgagagattcagcggcagcaattccggcaataccgccacactgaccatcagcagagtggaagctggcgacgaggccgtgtactactgccaagtgtgggacagcagcagcgatcacgtggtgtttggcggcggaacaaagctgacagtgcttggcggaggcggaagtggaggcggaggatctggcggcggaggctctcaactccagctgcaagagtctggccctggcctggtcaagcctagcgaaacactgagcctgacctgtaccgtgtctggcggctctatcagctccagcagctatttctggggctggatcagacaacctcctggcaaaggactggaatggatcggctccatctactacagcggcatcacctactacaaccccagcctgaagtccagagtgaccatctccgtggacaccagcaagaaccagttctccctgaagctgagcagcgtgacagccgccgataccgccgtgtattattgtgccagacatgacggcgctgtggccggcctgtttgattattggggacagggcaccctggtcaccgtgtcatctgctacgcgtgggtctggaggcggaggcagcggcggaggcgggagcggcttcaagatccccatcgaggaactggaagatcgggtgttcgtgaactgcaacacctctatcacctgggtggaaggcaccgtgggaacactgctgagcgacatcaccagactggacctcggcaagcggattctggaccctcggggcatctacagatgcaacggcaccgacatctacaaggacaaagaaagcaccgtgcaggtccactacagaatgtgccagtcctgcgtggaactggaccctgctacagtggccggcatcatcgtgaccgatgtgatcgctactctgctgctggctctgggagtgttctgcttcgccggacacgaaacaggcagactgtctggcgctgccgatacacaggccctgctgagaaacgaccaagtgtatcagcccctgcgcgacagagatgatgcccagtattctcacctcggcggcaactgggctagaaacaagcgcgccaagagaagcggatctggcgtgaagcagaccctgaatttcgacctgctgaagctggctggcgacgtggaatccaacccaggcccttctagaggccatatgaccgagtacaagcccacggtgcgcctcgccacccgcgacgacgtccccagggccgtacgcaccctcgccgccgcgttcgccgactaccccgccacgcgccacaccgtcgatccggaccgccacatcgagcgggtcaccgagctgcaagaactcttcctcacgcgcgtcgggctcgacatcggcaaggtgtgggtcgcggacgacggcgccgcggtggcggtctggaccacgccggagagcgtcgaagcgggggcggtgttcgccgagatcggcccgcgcatggccgagttgagcggttcccggctggccgcgcagcaacagatggaaggcctcctggcgccgcaccggcccaaggagcccgcgtggttcctggccaccgtcggcgtctcgcccgaccaccagggcaagggtctgggcagcgccgtcgtgctccccggagtggaggcggccgagcgcgccggggtgcccgccttcctggagacctccgcgccccgcaacctccccttctacgagcggctcggcttcaccgtcaccgccgacgtcgaggtgcccgaaggaccgcgcacctggtgcatgacccgcaagcccggtgcctga

SEQ ID NO: 8222 - DNA, 2025 bp, Artificial Sequence
  Synthetic Polynucloetide
atggccttaccagtgaccgccttgctcctgccgctggccttgctgctccacgccgccaggccgagctacgtgctgacacagcctccatccgtgtctgtggctccaggacagaccgccagaatcacatgcggcggcaagaacatcggcagcaagagcgtgcactggtatcagcagccacctggacaggctccagtggtggtggtgtacgacgacagcgatagacctagcggcatccccgagagattcagcggcagcaattccggcaataccgccacactgaccatcagcagagtggaagctggcgacgaggccgtgtactactgccaagtgtgggacagcagcagcgatcacgtggtgtttggcggcggaacaaagctgacagtgcttggcggaggcggaagtggaggcggaggatctggcggcggaggctctcaactccagctgcaagagtctggccctggcctggtcaagcctagcgaaacactgagcctgacctgtaccgtgtctggcggctctatcagctccagcagctatttctggggctggatcagacaacctcctggcaaaggactggaatggatcggctccatctactacagcggcatcacctactacaaccccagcctgaagtccagagtgaccatctccgtggacaccagcaagaaccagttctccctgaagctgagcagcgtgacagccgccgataccgccgtgtattattgtgccagacatgacggcgctgtggccggcctgtttgattattggggacagggcaccctggtcaccgtgtcatctgctacgcgtgggtctggaggcggaggcagcggcggaggcgggagcggccagagcatcaagggcaaccacctggtcaaggtgtacgactaccaagaggacggcagcgtgctgctgacatgtgatgccgaggccaagaacatcacctggtttaaggacggcaagatgatcggcttcctgaccgaggacaagaagaagtggaacctgggcagcaacgctaaggaccccagaggcatgtatcagtgcaagggcagccagaacaagagcaagcccctccaggtgtactaccggatgtgccagaactgcatcgagctgaacgccgctaccatcagcggctttctgttcgccgagatcgtgtccatcttcgtgctggccgtgggcgtgtactttatcgctggacaggatggcgtgcggcagagcagagcttccgataagcaaaccctgctgcctaacgaccagctgtaccagcctctgaaggacagagaggacgaccagtacagccacctccagggcaatcagctgagaagaaaccgcgccaagagaagcggatctggcgtgaagcagaccctgaatttcgacctgctgaagctggctggcgacgtggaatccaacccaggcccttctagaggccatatgaccgagtacaagcccacggtgcgcctcgccacccgcgacgacgtccccagggccgtacgcaccctcgccgccgcgttcgccgactaccccgccacgcgccacaccgtcgatccggaccgccacatcgagcgggtcaccgagctgcaagaactcttcctcacgcgcgtcgggctcgacatcggcaaggtgtgggtcgcggacgacggcgccgcggtggcggtctggaccacgccggagagcgtcgaagcgggggcggtgttcgccgagatcggcccgcgcatggccgagttgagcggttcccggctggccgcgcagcaacagatggaaggcctcctggcgccgcaccggcccaaggagcccgcgtggttcctggccaccgtcggcgtctcgcccgaccaccagggcaagggtctgggcagcgccgtcgtgctccccggagtggaggcggccgagcgcgccggggtgcccgccttcctggagacctccgcgccccgcaacctccccttctacgagcggctcggcttcaccgtcaccgccgacgtcgaggtgcccgaaggaccgcgcacctggtgcatgacccgcaagcccggtgcctga

SEQ ID NO: 8223 - DNA, 1974 bp, Artificial Sequence
  Synthetic Polynucloetide
atggccttaccagtgaccgccttgctcctgccgctggccttgctgctccacgccgccaggccgagctacgtgctgacacagcctccatccgtgtctgtggctccaggacagaccgccagaatcacatgcggcggcaagaacatcggcagcaagagcgtgcactggtatcagcagccacctggacaggctccagtggtggtggtgtacgacgacagcgatagacctagcggcatccccgagagattcagcggcagcaattccggcaataccgccacactgaccatcagcagagtggaagctggcgacgaggccgtgtactactgccaagtgtgggacagcagcagcgatcacgtggtgtttggcggcggaacaaagctgacagtgcttggcggaggcggaagtggaggcggaggatctggcggcggaggctctcaactccagctgcaagagtctggccctggcctggtcaagcctagcgaaacactgagcctgacctgtaccgtgtctggcggctctatcagctccagcagctatttctggggctggatcagacaacctcctggcaaaggactggaatggatcggctccatctactacagcggcatcacctactacaaccccagcctgaagtccagagtgaccatctccgtggacaccagcaagaaccagttctccctgaagctgagcagcgtgacagccgccgataccgccgtgtattattgtgccagacatgacggcgctgtggccggcctgtttgattattggggacagggcaccctggtcaccgtgtcatctgctacgcgtgggtctggaggcggaggcagcggcggaggcgggagcggccagagttttgggttgttggaccctaaattgtgctatctgttggacggaatcctgttcatttacggagtgatcctgaccgcattgttcctgcgggttaagttttccagatccgcagacgcacccgcttaccaacaagggcagaaccaactctacaatgaacttaatttggggcggagggaagagtacgacgttctggacaaaaggaggggacgagatcccgagatgggcggaaagcctcagcgaaggaagaatccgcaagaggggctttataacgaactccagaaagataaaatggcagaagcctatagtgagattgggatgaagggagaaaggaggaggggtaaaggtcacgatgggttgtaccaaggattgagcacagccactaaagatacctatgatgcgctccacatgcaggccctgccgccaagacgcgccaagagaagcggatctggcgtgaagcagaccctgaatttcgacctgctgaagctggctggcgacgtggaatccaacccaggcccttctagaggccatatgaccgagtacaagcccacggtgcgcctcgccacccgcgacgacgtccccagggccgtacgcaccctcgccgccgcgttcgccgactaccccgccacgcgccacaccgtcgatccggaccgccacatcgagcgggtcaccgagctgcaagaactcttcctcacgcgcgtcgggctcgacatcggcaaggtgtgggtcgcggacgacggcgccgcggtggcggtctggaccacgccggagagcgtcgaagcgggggcggtgttcgccgagatcggcccgcgcatggccgagttgagcggttcccggctggccgcgcagcaacagatggaaggcctcctggcgccgcaccggcccaaggagcccgcgtggttcctggccaccgtcggcgtctcgcccgaccaccagggcaagggtctgggcagcgccgtcgtgctccccggagtggaggcggccgagcgcgccggggtgcccgccttcctggagacctccgcgccccgcaacctccccttctacgagcggctcggcttcaccgtcaccgccgacgtcgaggtgcccgaaggaccgcgcacctggtgcatgacccgcaagcccggtgcctga

SEQ ID NO: 8224 - DNA, 2274 bp, Artificial Sequence
  Synthetic Polynucloetide
atggccttaccagtgaccgccttgctcctgccgctggccttgctgctccacgccgccaggccggaagtgcagctggttgaatctggcggaggactggttcagcctggcggatctctgagactgtcttgtgccgccagcggcttcagcttcagcgacttttggatgagctgggtccgacaggcccctggcaaaggacttgaatgggtcgccacaatcagccaggccggcagcgagaaggactacgtggactctgtgaagggcagattcaccatcagccgggacaacgccaagaagtccctgtacctccagatgaacagcctgagagccgaggacaccgccgtgtactattgtgcctctggcgtgtacagcttcgactacagaggccagggcaccctggtcacagtctcttctggtaccggcggaggcggatctggcggcggaggtagcggtggcggaggatctgaattcagctacgtgctgacacagcctccatccgtgtctgtggctccaggacagaccgccagaatcacatgcggcggcaagaacatcggcagcaagagcgtgcactggtatcagcagccacctggacaggctccagtggtggtggtgtacgacgacagcgatagacctagcggcatccccgagagattcagcggcagcaattccggcaataccgccacactgaccatcagcagagtggaagctggcgacgaggccgtgtactactgccaagtgtgggacagcagcagcgatcacgtggtgtttggcggcggaacaaagctgacagtgcttctcgaggacctgaagaacgtgttcccacctgaggtggccgtgttcgagcctagcgaggccgagatcagccacacccagaaagccaccctcgtgtgcctggctaccggcttctaccccgaccatgtggaactgtcttggtgggtcaacggcaaagaggtgcacagcggcgtgtgtaccgacccccagccactgaaagaacagcccgccctgaacgacagccggtactgcctgagcagcagactgagagtgtccgccaccttctggcagaacccccggaaccacttcagatgccaggtgcagttctacggcctgagcgagaacgacgagtggacccaggacagagccaagcccgtgacccagatcgtgtctgccgaagcctggggcagagccgattgcggctttaccagcgagagctaccagcagggcgtgctgagcgccaccatcctgtacgagatcctgctgggcaaggccaccctgtacgccgtgctggtgtctgccctggtgctgatggctatggtcaagcggaaggacagccggggaagggccaagcgatctggatctggagcaacaaacttctcactactcaaacaagcaggtgacgtggaggagaatcccgggcctactagtatggactggatttggcgcatccttttccttgtcggcgctgctaccggcgcgcattccttcgaacaactccagctgcaagagtctggccctggcctggtcaagcctagcgaaacactgagcctgacctgtaccgtgtctggcggctctatcagctccagcagctatttctggggctggatcagacaacctcctggcaaaggactggaatggatcggctccatctactacagcggcatcacctactacaaccccagcctgaagtccagagtgaccatctccgtggacaccagcaagaaccagttctccctgaagctgagcagcgtgacagccgccgataccgccgtgtattattgtgccagacatgacggcgctgtggccggcctgtttgattattggggacagggcaccctggtcaccgtgtcatctgctacgcgtatccagaaccctgatcctgccgtgtaccagctgcgggatagcaagagcagcgacaagagcgtgtgtctgttcaccgacttcgacagccagaccaacgtgtcccagagcaaggactccgacgtgtacatcaccgataagtgcgtgctggacatgcggagcatggacttcaagagcaactccgccgtggcctggtccaacaagtccgatttcgcctgcgccaacgccttcaacaacagcattatccccgaggacacattcttcccaagccccgagagcagctgcgacgtgaagctggtggaaaagagcttcgagacagacaccaacctgaacttccagaacctgagcgtgatcggcttcagaatcctgctgctgaaagtggccggctttaacctgctgatgaccctgcggctgtggtccagc

SEQ ID NO: 8225 - DNA, 2286 bp, Artificial Sequence
  Synthetic Polynucloetide
atggccttaccagtgaccgccttgctcctgccgctggccttgctgctccacgccgccaggccggaagtgcagctggttgaatctggcggaggactggttcagcctggcggatctctgagactgtcttgtgccgccagcggcttcagcttcagcgacttttggatgagctgggtccgacaggcccctggcaaaggacttgaatgggtcgccacaatcagccaggccggcagcgagaaggactacgtggactctgtgaagggcagattcaccatcagccgggacaacgccaagaagtccctgtacctccagatgaacagcctgagagccgaggacaccgccgtgtactattgtgcctctggcgtgtacagcttcgactacagaggccagggcaccctggtcacagtctcttctggtaccggcggaggcggatctggcggcggaggtagcggtggcggaggatctgaattcagctacgtgctgacacagcctccatccgtgtctgtggctccaggacagaccgccagaatcacatgcggcggcaagaacatcggcagcaagagcgtgcactggtatcagcagccacctggacaggctccagtggtggtggtgtacgacgacagcgatagacctagcggcatccccgagagattcagcggcagcaattccggcaataccgccacactgaccatcagcagagtggaagctggcgacgaggccgtgtactactgccaagtgtgggacagcagcagcgatcacgtggtgtttggcggcggaacaaagctgacagtgcttctcgagatccagaaccctgatcctgccgtgtaccagctgcgggatagcaagagcagcgacaagagcgtgtgtctgttcaccgacttcgacagccagaccaacgtgtcccagagcaaggactccgacgtgtacatcaccgataagtgcgtgctggacatgcggagcatggacttcaagagcaactccgccgtggcctggtccaacaagtccgatttcgcctgcgccaacgccttcaacaacagcattatccccgaggacacattcttcccaagccccgagagcagctgcgacgtgaagctggtggaaaagagcttcgagacagacaccaacctgaacttccagaacctgagcgtgatcggcttcagaatcctgctgctgaaagtggccggctttaacctgctgatgaccctgcggctgtggtccagccgcgccaagagaagcggatctggcgtgaagcagaccctgaatttcgacctgctgaagctggctggcgacgtggaatccaacccaggccctactagtatggactggatttggcgcatccttttccttgtcggcgctgctaccggcgcgcattccttcgaacaactccagctgcaagagtctggccctggcctggtcaagcctagcgaaacactgagcctgacctgtaccgtgtctggcggctctatcagctccagcagctatttctggggctggatcagacaacctcctggcaaaggactggaatggatcggctccatctactacagcggcatcacctactacaaccccagcctgaagtccagagtgaccatctccgtggacaccagcaagaaccagttctccctgaagctgagcagcgtgacagccgccgataccgccgtgtattattgtgccagacatgacggcgctgtggccggcctgtttgattattggggacagggcaccctggtcaccgtgtcatctgctacgcgtgaggacctgaagaacgtgttcccacctgaggtggccgtgttcgagcctagcgaggccgagatcagccacacccagaaagccaccctcgtgtgcctggctaccggcttctaccccgaccatgtggaactgtcttggtgggtcaacggcaaagaggtgcacagcggcgtgtgtaccgacccccagccactgaaagaacagcccgccctgaacgacagccggtactgcctgagcagcagactgagagtgtccgccaccttctggcagaacccccggaaccacttcagatgccaggtgcagttctacggcctgagcgagaacgacgagtggacccaggacagagccaagcccgtgacccagatcgtgtctgccgaagcctggggcagagccgattgcggctttaccagcgagagctaccagcagggcgtgctgagcgccaccatcctgtacgagatcctgctgggcaaggccaccctgtacgccgtgctggtgtctgccctggtgctgatggctatggtcaagcggaaggacagccgggga

SEQ ID NO: 8226 - DNA, 2862 bp, Artificial Sequence
  Synthetic Polynucloetide
atggccttaccagtgaccgccttgctcctgccgctggccttgctgctccacgccgccaggccggaagtgcagctggttgaatctggcggaggactggttcagcctggcggatctctgagactgtcttgtgccgccagcggcttcagcttcagcgacttttggatgagctgggtccgacaggcccctggcaaaggacttgaatgggtcgccacaatcagccaggccggcagcgagaaggactacgtggactctgtgaagggcagattcaccatcagccgggacaacgccaagaagtccctgtacctccagatgaacagcctgagagccgaggacaccgccgtgtactattgtgcctctggcgtgtacagcttcgactacagaggccagggcaccctggtcacagtctcttctggtaccggcggaggcggatctggcggcggaggtagcggtggcggaggatctgaattcagctacgtgctgacacagcctccatccgtgtctgtggctccaggacagaccgccagaatcacatgcggcggcaagaacatcggcagcaagagcgtgcactggtatcagcagccacctggacaggctccagtggtggtggtgtacgacgacagcgatagacctagcggcatccccgagagattcagcggcagcaattccggcaataccgccacactgaccatcagcagagtggaagctggcgacgaggccgtgtactactgccaagtgtgggacagcagcagcgatcacgtggtgtttggcggcggaacaaagctgacagtgcttctcgaggacctgaagaacgtgttcccacctgaggtggccgtgttcgagcctagcgaggccgagatcagccacacccagaaagccaccctcgtgtgcctggctaccggcttctaccccgaccatgtggaactgtcttggtgggtcaacggcaaagaggtgcacagcggcgtgtctaccgacccccagccactgaaagaacagcccgccctgaacgacagccggtactgcctgagcagcagactgagagtgtccgccaccttctggcagaacccccggaaccacttcagatgccaggtgcagttctacggcctgagcgagaacgacgagtggacccaggacagagccaagcccgtgacccagatcgtgtctgccgaagcctggggcagagccgattgcggatcccagagcttcggcctgctggaccccaagctgtgctacctgctggatggcatcctgttcatctacggcgtgatcctgaccgccctgttcctgagagtgaagttcagcagaagcgccgacgcccctgcctaccagcagggacagaaccaactgtacaacgagctgaacctgggcagacgggaagagtacgacgtgctggacaagcggagaggcagggaccctgagatgggcggaaagccccagcggagaaagaacccccaggaaggactgtataacgaactccagaaagacaagatggccgaagcctacagcgagatcggcatgaagggcgagcggagaagaggcaagggccacgatggcctgtaccagggcctgagcaccgccaccaaggacacctatgacgccctgcacatgcaggccctgcctccaagaagggccaagcgatctggatctggagcaacaaacttctcactactcaaacaagcaggtgacgtggaggagaatcccgggcctactagtatggactggatttggcgcatccttttccttgtcggcgctgctaccggcgcgcattccttcgaacaactccagctgcaagagtctggccctggcctggtcaagcctagcgaaacactgagcctgacctgtaccgtgtctggcggctctatcagctccagcagctatttctggggctggatcagacaacctcctggcaaaggactggaatggatcggctccatctactacagcggcatcacctactacaaccccagcctgaagtccagagtgaccatctccgtggacaccagcaagaaccagttctccctgaagctgagcagcgtgacagccgccgataccgccgtgtattattgtgccagacatgacggcgctgtggccggcctgtttgattattggggacagggcaccctggtcaccgtgtcatctgctacgcgtatccagaaccctgatcctgccgtgtaccagctgcgggatagcaagagcagcgacaagagcgtgtgtctgttcaccgacttcgacagccagaccaacgtgtcccagagcaaggactccgacgtgtacatcaccgataagaccgtgctggacatgcggagcatggacttcaagagcaactccgccgtggcctggtccaacaagtccgatttcgcctgcgccaacgccttcaacaacagcattatccccgaggacacattcttcccaagccccgagagcagctgcggtacccagagttttgggttgttggaccctaaattgtgctatctgttggacggaatcctgttcatttacggagtgatcctgaccgcattgttcctgcgggttaagttttccagatccgcagacgcacccgcttaccaacaagggcagaaccaactctacaatgaacttaatttggggcggagggaagagtacgacgttctggacaaaaggaggggacgagatcccgagatgggcggaaagcctcagcgaaggaagaatccgcaagaggggctttataacgaactccagaaagataaaatggcagaagcctatagtgagattgggatgaagggagaaaggaggaggggtaaaggtcacgatgggttgtaccaaggattgagcacagccactaaagatacctatgatgcgctccacatgcaggccctgccgccaaga

SEQ ID NO: 8227 - DNA, 2352 bp, Artificial Sequence
  Synthetic Polynucloetide
atggccttaccagtgaccgccttgctcctgccgctggccttgctgctccacgccgccaggccggaagtgcagctggttgaatctggcggaggactggttcagcctggcggatctctgagactgtcttgtgccgccagcggcttcagcttcagcgacttttggatgagctgggtccgacaggcccctggcaaaggacttgaatgggtcgccacaatcagccaggccggcagcgagaaggactacgtggactctgtgaagggcagattcaccatcagccgggacaacgccaagaagtccctgtacctccagatgaacagcctgagagccgaggacaccgccgtgtactattgtgcctctggcgtgtacagcttcgactacagaggccagggcaccctggtcacagtctcttctggtaccggcggaggcggatctggcggcggaggtagcggtggcggaggatctgaattcagctacgtgctgacacagcctccatccgtgtctgtggctccaggacagaccgccagaatcacatgcggcggcaagaacatcggcagcaagagcgtgcactggtatcagcagccacctggacaggctccagtggtggtggtgtacgacgacagcgatagacctagcggcatccccgagagattcagcggcagcaattccggcaataccgccacactgaccatcagcagagtggaagctggcgacgaggccgtgtactactgccaagtgtgggacagcagcagcgatcacgtggtgtttggcggcggaacaaagctgacagtgcttctcgagggacagcctaaggccaatcctaccgtgacactgttccctccaagcagcgaagaactccaggccaacaaggccacacttgtgtgcctgatctccgacttctaccctggggctgtgacagtggcttggaaggccgatggatctcctgtgaaagccggcgtggaaaccaccaagccatccaagcagagcaacaacaaatacgccgccagctcctacctgagcctgacacctgagcagtggaagtcccacagatcctacagctgccaagtgacccacgaaggcagcaccgtggaaaagacagtggcccctacagagtgcagccccatcaagaccgatgtgattacaatggaccccaaggacaactgctccaaggacgccaacgataccctgctgctccagctgaccaacaccagcgcctactacatgtacttgttgctgctgctgaagtccgtggtgtacttcgccatcatcacatgctgcctgctgcggagaaccgccttctgctgcaacggcgagaagtctagggccaagcgatctggatctggagcaacaaacttctcactactcaaacaagcaggtgacgtggaggagaatcccgggcctactagtatggactggatttggcgcatccttttccttgtcggcgctgctaccggcgcgcattccttcgaacaactccagctgcaagagtctggccctggcctggtcaagcctagcgaaacactgagcctgacctgtaccgtgtctggcggctctatcagctccagcagctatttctggggctggatcagacaacctcctggcaaaggactggaatggatcggctccatctactacagcggcatcacctactacaaccccagcctgaagtccagagtgaccatctccgtggacaccagcaagaaccagttctccctgaagctgagcagcgtgacagccgccgataccgccgtgtattattgtgccagacatgacggcgctgtggccggcctgtttgattattggggacagggcaccctggtcaccgtgtcatctgctacgcgtgcctctacaaagggaccctccgtgtttcctctggctcccagcagcaagtctacaagcggaggaacagccgctctgggctgcctggtcaaggattactttcccgagcctgtgaccgtgtcctggaatagcggagcactgacaagcggcgtgcacacctttccagccgtgctgcaaagcagcggcctgtactctctgagcagcgtggtcacagtgcctagctctagcctgggcacccagacctacatctgcaatgtgaaccacaagcctagcaacaccaaggtggacaagagagtggaacccaagagctgtgaagtgaaaaccgactccaccgaccacgtgaagcccaaagagacagagaacaccaagcagcccagcaagagctgccacaagcccaaggccatcgtgcacaccgagaaagtgaacatgatgagcctgaccgtgctgggcctgcggatgctgttcgccaaaaccgtggccgtgaacttcctgctgaccgccaagctgttcttcctc

SEQ ID NO: 8228 - DNA, 2295 bp, Artificial Sequence
  Synthetic Polynucloetide
atggccttaccagtgaccgccttgctcctgccgctggccttgctgctccacgccgccaggccggaagtgcagctggttgaatctggcggaggactggttcagcctggcggatctctgagactgtcttgtgccgccagcggcttcagcttcagcgacttttggatgagctgggtccgacaggcccctggcaaaggacttgaatgggtcgccacaatcagccaggccggcagcgagaaggactacgtggactctgtgaagggcagattcaccatcagccgggacaacgccaagaagtccctgtacctccagatgaacagcctgagagccgaggacaccgccgtgtactattgtgcctctggcgtgtacagcttcgactacagaggccagggcaccctggtcacagtctcttctggtaccggcggaggcggatctggcggcggaggtagcggtggcggaggatctgaattcagctacgtgctgacacagcctccatccgtgtctgtggctccaggacagaccgccagaatcacatgcggcggcaagaacatcggcagcaagagcgtgcactggtatcagcagccacctggacaggctccagtggtggtggtgtacgacgacagcgatagacctagcggcatccccgagagattcagcggcagcaattccggcaataccgccacactgaccatcagcagagtggaagctggcgacgaggccgtgtactactgccaagtgtgggacagcagcagcgatcacgtggtgtttggcggcggaacaaagctgacagtgcttctcgagggacagcctaaggccaatcctaccgtgacactgttccctccaagcagcgaagaactccaggccaacaaggccacacttgtgtgcctgatctccgacttctaccctggggctgtgacagtggcttggaaggccgatggatctcctgtgaaagccggcgtggaaaccaccaagccatccaagcagagcaacaacaaatacgccgccagctcctacctgagcctgacacctgagcagtggaagtcccacagatcctacagctgccaagtgacccacgaaggcagcaccgtggaaaagacagtggcccctacagagtgcagcggcagagccgattgcggctttaccagcgagagctaccagcagggcgtgctgagcgccaccatcctgtacgagatcctgctgggcaaggccaccctgtacgccgtgctggtgtctgccctggtgctgatggctatggtcaagcggaaggacagccggggacgcgccaagagaagcggatctggcgtgaagcagaccctgaatttcgacctgctgaagctggctggcgacgtggaatccaacccaggccctactagtatggactggatttggcgcatccttttccttgtcggcgctgctaccggcgcgcattccttcgaacaactccagctgcaagagtctggccctggcctggtcaagcctagcgaaacactgagcctgacctgtaccgtgtctggcggctctatcagctccagcagctatttctggggctggatcagacaacctcctggcaaaggactggaatggatcggctccatctactacagcggcatcacctactacaaccccagcctgaagtccagagtgaccatctccgtggacaccagcaagaaccagttctccctgaagctgagcagcgtgacagccgccgataccgccgtgtattattgtgccagacatgacggcgctgtggccggcctgtttgattattggggacagggcaccctggtcaccgtgtcatctgctacgcgtgcctctacaaagggaccctccgtgtttcctctggctcccagcagcaagtctacaagcggaggaacagccgctctgggctgcctggtcaaggattactttcccgagcctgtgaccgtgtcctggaatagcggagcactgacaagcggcgtgcacacctttccagccgtgctgcaaagcagcggcctgtactctctgagcagcgtggtcacagtgcctagctctagcctgggcacccagacctacatctgcaatgtgaaccacaagcctagcaacaccaaggtggacaagagagtggaacccaagagctgtatccccgaggacacattcttcccaagccccgagagcagctgcgacgtgaagctggtggaaaagagcttcgagacagacaccaacctgaacttccagaacctgagcgtgatcggcttcagaatcctgctgctgaaagtggccggctttaacctgctgatgaccctgcggctgtggtccagc

SEQ ID NO: 8229 - DNA, 2697 bp, Artificial Sequence
  Synthetic Polynucloetide
atggccttaccagtgaccgccttgctcctgccgctggccttgctgctccacgccgccaggccggaagtgcagctggttgaatctggcggaggactggttcagcctggcggatctctgagactgtcttgtgccgccagcggcttcagcttcagcgacttttggatgagctgggtccgacaggcccctggcaaaggacttgaatgggtcgccacaatcagccaggccggcagcgagaaggactacgtggactctgtgaagggcagattcaccatcagccgggacaacgccaagaagtccctgtacctccagatgaacagcctgagagccgaggacaccgccgtgtactattgtgcctctggcgtgtacagcttcgactacagaggccagggcaccctggtcacagtctcttctggtaccggcggaggcggatctggcggcggaggtagcggtggcggaggatctgaattcagctacgtgctgacacagcctccatccgtgtctgtggctccaggacagaccgccagaatcacatgcggcggcaagaacatcggcagcaagagcgtgcactggtatcagcagccacctggacaggctccagtggtggtggtgtacgacgacagcgatagacctagcggcatccccgagagattcagcggcagcaattccggcaataccgccacactgaccatcagcagagtggaagctggcgacgaggccgtgtactactgccaagtgtgggacagcagcagcgatcacgtggtgtttggcggcggaacaaagctgacagtgcttctcgagatccagaaccctgatcctgccgtgtaccagctgcgggatagcaagagcagcgacaagagcgtgtgtctgttcaccgacttcgacagccagaccaacgtgtcccagagcaaggactccgacgtgtacatcaccgataagtgcgtgctggacatgcggagcatggacttcaagagcaactccgccgtggcctggtccaacaagtccgatttcgcctgcgccaacgccttcaacaacagcattatccccgaggacacattcttcccaagccccgagagcagctgcgacgtgaagctggtggaaaagagcttcgagacagacaccaacctgaacttccagaacctgagcgtgatcggcttcagaatcctgctgctgaaagtggccggctttaacctgctgatgaccctgcggctgtggtccagccgcgccaagagaagcggatctggcgtgaagcagaccctgaatttcgacctgctgaagctggctggcgacgtggaatccaacccaggccctactagtatggactggatttggcgcatccttttccttgtcggcgctgctaccggcgcgcattccgggccccagctccagctgcaagagtctggacctggcctggtcaagcctagcgagacactgagcctgacctgtaccgtgtccggcgatagcatcagcagcggcgattactactggggctggatcagacagcctcctggcaaaggactggaatggatcggccacatctactacagcggcgtgacctactacaaccccagcctgaagtccagagtgaccatcagcgtggacaccagccggaaccagttctccctgaagctgtctagcgtgacagccgccgataccgccgtgtactactgcaccagagaggacagcagcaactggcggagtagaggccagggaacactggtcacagttagctctggatccggcggaggcggaagtggaggcggaggatctggcggcggaggctctttcgaacaactccagctgcaagagtctggccctggcctggtcaagcctagcgaaacactgagcctgacctgtaccgtgtctggcggctctatcagctccagcagctatttctggggctggatcagacaacctcctggcaaaggactggaatggatcggctccatctactacagcggcatcacctactacaaccccagcctgaagtccagagtgaccatctccgtggacaccagcaagaaccagttctccctgaagctgagcagcgtgacagccgccgataccgccgtgtattattgtgccagacatgacggcgctgtggccggcctgtttgattattggggacagggcaccctggtcaccgtgtcatctgctacgcgtgaggacctgaagaacgtgttcccacctgaggtggccgtgttcgagcctagcgaggccgagatcagccacacccagaaagccaccctcgtgtgcctggctaccggcttctaccccgaccatgtggaactgtcttggtgggtcaacggcaaagaggtgcacagcggcgtgtgtaccgacccccagccactgaaagaacagcccgccctgaacgacagccggtactgcctgagcagcagactgagagtgtccgccaccttctggcagaacccccggaaccacttcagatgccaggtgcagttctacggcctgagcgagaacgacgagtggacccaggacagagccaagcccgtgacccagatcgtgtctgccgaagcctggggcagagccgattgcggctttaccagcgagagctaccagcagggcgtgctgagcgccaccatcctgtacgagatcctgctgggcaaggccaccctgtacgccgtgctggtgtctgccctggtgctgatggctatggtcaagcggaaggacagccgggga

SEQ ID NO: 8230 - DNA, 3273 bp, Artificial Sequence
  Synthetic Polynucloetide
atggccttaccagtgaccgccttgctcctgccgctggccttgctgctccacgccgccaggccggaagtgcagctggttgaatctggcggaggactggttcagcctggcggatctctgagactgtcttgtgccgccagcggcttcagcttcagcgacttttggatgagctgggtccgacaggcccctggcaaaggacttgaatgggtcgccacaatcagccaggccggcagcgagaaggactacgtggactctgtgaagggcagattcaccatcagccgggacaacgccaagaagtccctgtacctccagatgaacagcctgagagccgaggacaccgccgtgtactattgtgcctctggcgtgtacagcttcgactacagaggccagggcaccctggtcacagtctcttctggtaccggcggaggcggatctggcggcggaggtagcggtggcggaggatctgaattcagctacgtgctgacacagcctccatccgtgtctgtggctccaggacagaccgccagaatcacatgcggcggcaagaacatcggcagcaagagcgtgcactggtatcagcagccacctggacaggctccagtggtggtggtgtacgacgacagcgatagacctagcggcatccccgagagattcagcggcagcaattccggcaataccgccacactgaccatcagcagagtggaagctggcgacgaggccgtgtactactgccaagtgtgggacagcagcagcgatcacgtggtgtttggcggcggaacaaagctgacagtgcttctcgaggacctgaagaacgtgttcccacctgaggtggccgtgttcgagcctagcgaggccgagatcagccacacccagaaagccaccctcgtgtgcctggctaccggcttctaccccgaccatgtggaactgtcttggtgggtcaacggcaaagaggtgcacagcggcgtgtctaccgacccccagccactgaaagaacagcccgccctgaacgacagccggtactgcctgagcagcagactgagagtgtccgccaccttctggcagaacccccggaaccacttcagatgccaggtgcagttctacggcctgagcgagaacgacgagtggacccaggacagagccaagcccgtgacccagatcgtgtctgccgaagcctggggcagagccgattgcggatcccagagcttcggcctgctggaccccaagctgtgctacctgctggatggcatcctgttcatctacggcgtgatcctgaccgccctgttcctgagagtgaagttcagcagaagcgccgacgcccctgcctaccagcagggacagaaccaactgtacaacgagctgaacctgggcagacgggaagagtacgacgtgctggacaagcggagaggcagggaccctgagatgggcggaaagccccagcggagaaagaacccccaggaaggactgtataacgaactccagaaagacaagatggccgaagcctacagcgagatcggcatgaagggcgagcggagaagaggcaagggccacgatggcctgtaccagggcctgagcaccgccaccaaggacacctatgacgccctgcacatgcaggccctgcctccaagaagggccaagcgatctggatctggagcaacaaacttctcactactcaaacaagcaggtgacgtggaggagaatcccgggcctactagtatggactggatttggcgcatccttttccttgtcggcgctgctaccggcgcgcattccgggccccagctccagctgcaagagtctggacctggcctggtcaagcctagcgagacactgagcctgacctgtaccgtgtccggcgatagcatcagcagcggcgattactactggggctggatcagacagcctcctggcaaaggactggaatggatcggccacatctactacagcggcgtgacctactacaaccccagcctgaagtccagagtgaccatcagcgtggacaccagccggaaccagttctccctgaagctgtctagcgtgacagccgccgataccgccgtgtactactgcaccagagaggacagcagcaactggcggagtagaggccagggaacactggtcacagttagctctggatccggcggaggcggaagtggaggcggaggatctggcggcggaggctctttcgaacaactccagctgcaagagtctggccctggcctggtcaagcctagcgaaacactgagcctgacctgtaccgtgtctggcggctctatcagctccagcagctatttctggggctggatcagacaacctcctggcaaaggactggaatggatcggctccatctactacagcggcatcacctactacaaccccagcctgaagtccagagtgaccatctccgtggacaccagcaagaaccagttctccctgaagctgagcagcgtgacagccgccgataccgccgtgtattattgtgccagacatgacggcgctgtggccggcctgtttgattattggggacagggcaccctggtcaccgtgtcatctgctacgcgtatccagaaccctgatcctgccgtgtaccagctgcgggatagcaagagcagcgacaagagcgtgtgtctgttcaccgacttcgacagccagaccaacgtgtcccagagcaaggactccgacgtgtacatcaccgataagaccgtgctggacatgcggagcatggacttcaagagcaactccgccgtggcctggtccaacaagtccgatttcgcctgcgccaacgccttcaacaacagcattatccccgaggacacattcttcccaagccccgagagcagctgcggtacccagagttttgggttgttggaccctaaattgtgctatctgttggacggaatcctgttcatttacggagtgatcctgaccgcattgttcctgcgggttaagttttccagatccgcagacgcacccgcttaccaacaagggcagaaccaactctacaatgaacttaatttggggcggagggaagagtacgacgttctggacaaaaggaggggacgagatcccgagatgggcggaaagcctcagcgaaggaagaatccgcaagaggggctttataacgaactccagaaagataaaatggcagaagcctatagtgagattgggatgaagggagaaaggaggaggggtaaaggtcacgatgggttgtaccaaggattgagcacagccactaaagatacctatgatgcgctccacatgcaggccctgccgccaaga

SEQ ID NO: 8231 - DNA, 2763 bp, Artificial Sequence
  Synthetic Polynucloetide
atggccttaccagtgaccgccttgctcctgccgctggccttgctgctccacgccgccaggccggaagtgcagctggttgaatctggcggaggactggttcagcctggcggatctctgagactgtcttgtgccgccagcggcttcagcttcagcgacttttggatgagctgggtccgacaggcccctggcaaaggacttgaatgggtcgccacaatcagccaggccggcagcgagaaggactacgtggactctgtgaagggcagattcaccatcagccgggacaacgccaagaagtccctgtacctccagatgaacagcctgagagccgaggacaccgccgtgtactattgtgcctctggcgtgtacagcttcgactacagaggccagggcaccctggtcacagtctcttctggtaccggcggaggcggatctggcggcggaggtagcggtggcggaggatctgaattcagctacgtgctgacacagcctccatccgtgtctgtggctccaggacagaccgccagaatcacatgcggcggcaagaacatcggcagcaagagcgtgcactggtatcagcagccacctggacaggctccagtggtggtggtgtacgacgacagcgatagacctagcggcatccccgagagattcagcggcagcaattccggcaataccgccacactgaccatcagcagagtggaagctggcgacgaggccgtgtactactgccaagtgtgggacagcagcagcgatcacgtggtgtttggcggcggaacaaagctgacagtgcttctcgagggacagcctaaggccaatcctaccgtgacactgttccctccaagcagcgaagaactccaggccaacaaggccacacttgtgtgcctgatctccgacttctaccctggggctgtgacagtggcttggaaggccgatggatctcctgtgaaagccggcgtggaaaccaccaagccatccaagcagagcaacaacaaatacgccgccagctcctacctgagcctgacacctgagcagtggaagtcccacagatcctacagctgccaagtgacccacgaaggcagcaccgtggaaaagacagtggcccctacagagtgcagccccatcaagaccgatgtgattacaatggaccccaaggacaactgctccaaggacgccaacgataccctgctgctccagctgaccaacaccagcgcctactacatgtacttgttgctgctgctgaagtccgtggtgtacttcgccatcatcacatgctgcctgctgcggagaaccgccttctgctgcaacggcgagaagtctagggccaagcgatctggatctggagcaacaaacttctcactactcaaacaagcaggtgacgtggaggagaatcccgggcctactagtatggactggatttggcgcatccttttccttgtcggcgctgctaccggcgcgcattccgggccccagctccagctgcaagagtctggacctggcctggtcaagcctagcgagacactgagcctgacctgtaccgtgtccggcgatagcatcagcagcggcgattactactggggctggatcagacagcctcctggcaaaggactggaatggatcggccacatctactacagcggcgtgacctactacaaccccagcctgaagtccagagtgaccatcagcgtggacaccagccggaaccagttctccctgaagctgtctagcgtgacagccgccgataccgccgtgtactactgcaccagagaggacagcagcaactggcggagtagaggccagggaacactggtcacagttagctctggatccggcggaggcggaagtggaggcggaggatctggcggcggaggctctttcgaacaactccagctgcaagagtctggccctggcctggtcaagcctagcgaaacactgagcctgacctgtaccgtgtctggcggctctatcagctccagcagctatttctggggctggatcagacaacctcctggcaaaggactggaatggatcggctccatctactacagcggcatcacctactacaaccccagcctgaagtccagagtgaccatctccgtggacaccagcaagaaccagttctccctgaagctgagcagcgtgacagccgccgataccgccgtgtattattgtgccagacatgacggcgctgtggccggcctgtttgattattggggacagggcaccctggtcaccgtgtcatctgctacgcgtgcctctacaaagggaccctccgtgtttcctctggctcccagcagcaagtctacaagcggaggaacagccgctctgggctgcctggtcaaggattactttcccgagcctgtgaccgtgtcctggaatagcggagcactgacaagcggcgtgcacacctttccagccgtgctgcaaagcagcggcctgtactctctgagcagcgtggtcacagtgcctagctctagcctgggcacccagacctacatctgcaatgtgaaccacaagcctagcaacaccaaggtggacaagagagtggaacccaagagctgtgaagtgaaaaccgactccaccgaccacgtgaagcccaaagagacagagaacaccaagcagcccagcaagagctgccacaagcccaaggccatcgtgcacaccgagaaagtgaacatgatgagcctgaccgtgctgggcctgcggatgctgttcgccaaaaccgtggccgtgaacttcctgctgaccgccaagctgttcttcctc

SEQ ID NO: 8232 - DNA, 2706 bp, Artificial Sequence
  Synthetic Polynucloetide
atggccttaccagtgaccgccttgctcctgccgctggccttgctgctccacgccgccaggccggaagtgcagctggttgaatctggcggaggactggttcagcctggcggatctctgagactgtcttgtgccgccagcggcttcagcttcagcgacttttggatgagctgggtccgacaggcccctggcaaaggacttgaatgggtcgccacaatcagccaggccggcagcgagaaggactacgtggactctgtgaagggcagattcaccatcagccgggacaacgccaagaagtccctgtacctccagatgaacagcctgagagccgaggacaccgccgtgtactattgtgcctctggcgtgtacagcttcgactacagaggccagggcaccctggtcacagtctcttctggtaccggcggaggcggatctggcggcggaggtagcggtggcggaggatctgaattcagctacgtgctgacacagcctccatccgtgtctgtggctccaggacagaccgccagaatcacatgcggcggcaagaacatcggcagcaagagcgtgcactggtatcagcagccacctggacaggctccagtggtggtggtgtacgacgacagcgatagacctagcggcatccccgagagattcagcggcagcaattccggcaataccgccacactgaccatcagcagagtggaagctggcgacgaggccgtgtactactgccaagtgtgggacagcagcagcgatcacgtggtgtttggcggcggaacaaagctgacagtgcttctcgagggacagcctaaggccaatcctaccgtgacactgttccctccaagcagcgaagaactccaggccaacaaggccacacttgtgtgcctgatctccgacttctaccctggggctgtgacagtggcttggaaggccgatggatctcctgtgaaagccggcgtggaaaccaccaagccatccaagcagagcaacaacaaatacgccgccagctcctacctgagcctgacacctgagcagtggaagtcccacagatcctacagctgccaagtgacccacgaaggcagcaccgtggaaaagacagtggcccctacagagtgcagcggcagagccgattgcggctttaccagcgagagctaccagcagggcgtgctgagcgccaccatcctgtacgagatcctgctgggcaaggccaccctgtacgccgtgctggtgtctgccctggtgctgatggctatggtcaagcggaaggacagccggggacgcgccaagagaagcggatctggcgtgaagcagaccctgaatttcgacctgctgaagctggctggcgacgtggaatccaacccaggccctactagtatggactggatttggcgcatccttttccttgtcggcgctgctaccggcgcgcattccgggccccagctccagctgcaagagtctggacctggcctggtcaagcctagcgagacactgagcctgacctgtaccgtgtccggcgatagcatcagcagcggcgattactactggggctggatcagacagcctcctggcaaaggactggaatggatcggccacatctactacagcggcgtgacctactacaaccccagcctgaagtccagagtgaccatcagcgtggacaccagccggaaccagttctccctgaagctgtctagcgtgacagccgccgataccgccgtgtactactgcaccagagaggacagcagcaactggcggagtagaggccagggaacactggtcacagttagctctggatccggcggaggcggaagtggaggcggaggatctggcggcggaggctctttcgaacaactccagctgcaagagtctggccctggcctggtcaagcctagcgaaacactgagcctgacctgtaccgtgtctggcggctctatcagctccagcagctatttctggggctggatcagacaacctcctggcaaaggactggaatggatcggctccatctactacagcggcatcacctactacaaccccagcctgaagtccagagtgaccatctccgtggacaccagcaagaaccagttctccctgaagctgagcagcgtgacagccgccgataccgccgtgtattattgtgccagacatgacggcgctgtggccggcctgtttgattattggggacagggcaccctggtcaccgtgtcatctgctacgcgtgcctctacaaagggaccctccgtgtttcctctggctcccagcagcaagtctacaagcggaggaacagccgctctgggctgcctggtcaaggattactttcccgagcctgtgaccgtgtcctggaatagcggagcactgacaagcggcgtgcacacctttccagccgtgctgcaaagcagcggcctgtactctctgagcagcgtggtcacagtgcctagctctagcctgggcacccagacctacatctgcaatgtgaaccacaagcctagcaacaccaaggtggacaagagagtggaacccaagagctgtatccccgaggacacattcttcccaagccccgagagcagctgcgacgtgaagctggtggaaaagagcttcgagacagacaccaacctgaacttccagaacctgagcgtgatcggcttcagaatcctgctgctgaaagtggccggctttaacctgctgatgaccctgcggctgtggtccagc

SEQ ID NO: 8233 - DNA, 2277 bp, Artificial Sequence
  Synthetic Polynucloetide
atggccttaccagtgaccgccttgctcctgccgctggccttgctgctccacgccgccaggccggaagtgcaggttttggagtctggcggaggactggttcagcctggcggatctctgagactgtcttgtgccgccagcggcttcaccttcagcaactttgccatgagctgggtccgacaggcccctggcaaaggacttgaatgggtgtccacaatcagcggcagcgccggcacaacagattacgccgattctgtgaagggcagattcaccatcagccgggacaacagcaagaaaaccctgtacctccagatgaacagcctgcgcgtggaagataccgccgtgtactactgtgccgatggcagaggccccttcttcgattatcgcggccagggcacactggtcaccgtttcttctggtaccggcggaggcggatctggcggcggaggtagcggtggcggaggatctgaattcagctacgtgctgacacagcctccatccgtgtctgtggctccaggacagaccgccagaatcacatgcggcggcaagaacatcggcagcaagagcgtgcactggtatcagcagccacctggacaggctccagtggtggtggtgtacgacgacagcgatagacctagcggcatccccgagagattcagcggcagcaattccggcaataccgccacactgaccatcagcagagtggaagctggcgacgaggccgtgtactactgccaagtgtgggacagcagcagcgatcacgtggtgtttggcggcggaacaaagctgacagtgcttctcgaggacctgaagaacgtgttcccacctgaggtggccgtgttcgagcctagcgaggccgagatcagccacacccagaaagccaccctcgtgtgcctggctaccggcttctaccccgaccatgtggaactgtcttggtgggtcaacggcaaagaggtgcacagcggcgtgtgtaccgacccccagccactgaaagaacagcccgccctgaacgacagccggtactgcctgagcagcagactgagagtgtccgccaccttctggcagaacccccggaaccacttcagatgccaggtgcagttctacggcctgagcgagaacgacgagtggacccaggacagagccaagcccgtgacccagatcgtgtctgccgaagcctggggcagagccgattgcggctttaccagcgagagctaccagcagggcgtgctgagcgccaccatcctgtacgagatcctgctgggcaaggccaccctgtacgccgtgctggtgtctgccctggtgctgatggctatggtcaagcggaaggacagccggggaagggccaagcgatctggatctggagcaacaaacttctcactactcaaacaagcaggtgacgtggaggagaatcccgggcctactagtatggactggatttggcgcatccttttccttgtcggcgctgctaccggcgcgcattccttcgaacaactccagctgcaagagtctggccctggcctggtcaagcctagcgaaacactgagcctgacctgtaccgtgtctggcggctctatcagctccagcagctatttctggggctggatcagacaacctcctggcaaaggactggaatggatcggctccatctactacagcggcatcacctactacaaccccagcctgaagtccagagtgaccatctccgtggacaccagcaagaaccagttctccctgaagctgagcagcgtgacagccgccgataccgccgtgtattattgtgccagacatgacggcgctgtggccggcctgtttgattattggggacagggcaccctggtcaccgtgtcatctgctacgcgtatccagaaccctgatcctgccgtgtaccagctgcgggatagcaagagcagcgacaagagcgtgtgtctgttcaccgacttcgacagccagaccaacgtgtcccagagcaaggactccgacgtgtacatcaccgataagtgcgtgctggacatgcggagcatggacttcaagagcaactccgccgtggcctggtccaacaagtccgatttcgcctgcgccaacgccttcaacaacagcattatccccgaggacacattcttcccaagccccgagagcagctgcgacgtgaagctggtggaaaagagcttcgagacagacaccaacctgaacttccagaacctgagcgtgatcggcttcagaatcctgctgctgaaagtggccggctttaacctgctgatgaccctgcggctgtggtccagc

SEQ ID NO: 8234 - DNA, 2280 bp, Artificial Sequence
  Synthetic Polynucloetide
atggccttaccagtgaccgccttgctcctgccgctggccttgctgctccacgccgccaggccgagctacgtgctgacacagcctccatccgtgtctgtggctccaggacagaccgccagaatcacatgcggcggcaagaacatcggcagcaagagcgtgcactggtatcagcagccacctggacaggctccagtggtggtggtgtacgacgacagcgatagacctagcggcatccccgagagattcagcggcagcaattccggcaataccgccacactgaccatcagcagagtggaagctggcgacgaggccgtgtactactgccaagtgtgggacagcagcagcgatcacgtggtgtttggcggcggaacaaagctgacagtgcttctcgaggacctgaagaacgtgttcccacctgaggtggccgtgttcgagcctagcgaggccgagatcagccacacccagaaagccaccctcgtgtgcctggctaccggcttctaccccgaccatgtggaactgtcttggtgggtcaacggcaaagaggtgcacagcggcgtgtgtaccgacccccagccactgaaagaacagcccgccctgaacgacagccggtactgcctgagcagcagactgagagtgtccgccaccttctggcagaacccccggaaccacttcagatgccaggtgcagttctacggcctgagcgagaacgacgagtggacccaggacagagccaagcccgtgacccagatcgtgtctgccgaagcctggggcagagccgattgcggctttaccagcgagagctaccagcagggcgtgctgagcgccaccatcctgtacgagatcctgctgggcaaggccaccctgtacgccgtgctggtgtctgccctggtgctgatggctatggtcaagcggaaggacagccggggaagggccaagcgatctggatctggagcaacaaacttctcactactcaaacaagcaggtgacgtggaggagaatcccgggcctactagtatggactggatttggcgcatccttttccttgtcggcgctgctaccggcgcccattccgggcccgaagtgcagctggttgaatctggcggaggactggttcaggctggcggatctctgagactgtcttgtgccgccagcggcagaacctttagcatgggctggtttagacaggcccctggcaaagagagagagttcgtcgccgccatcacatactctggcggcagcccttactacgccgactctgtgaagggcagattcaccatcagccgggacaacgccaagaacaccgtgtacctccagatgaacagcctgaagcctgaggacaccgccgtgtactactgcgccgccaatccaacatacggcagcgactggaacgccgagaattggggccagggaacccaagtgacagtgtctagcggatccggcggcggaggatctggcggaggcggatctgggggcggaggctctttcgaacaactccagctgcaagagtctggccctggcctggtcaagcctagcgaaacactgagcctgacctgtaccgtgtctggcggctctatcagctccagcagctatttctggggctggatcagacaacctcctggcaaaggactggaatggatcggctccatctactacagcggcatcacctactacaaccccagcctgaagtccagagtgaccatctccgtggacaccagcaagaaccagttctccctgaagctgagcagcgtgacagccgccgataccgccgtgtattattgtgccagacatgacggcgctgtggccggcctgtttgattattggggacagggcaccctggtcaccgtgtcatctgctacgcgtatccagaaccctgatcctgccgtgtaccagctgcgggatagcaagagcagcgacaagagcgtgtgtctgttcaccgacttcgacagccagaccaacgtgtcccagagcaaggactccgacgtgtacatcaccgataagtgcgtgctggacatgcggagcatggacttcaagagcaactccgccgtggcctggtccaacaagtccgatttcgcctgcgccaacgccttcaacaacagcattatccccgaggacacattcttcccaagccccgagagcagctgcgacgtgaagctggtggaaaagagcttcgagacagacaccaacctgaacttccagaacctgagcgtgatcggcttcagaatcctgctgctgaaagtggccggctttaacctgctgatgaccctgcggctgtggtccagc

SEQ ID NO: 8235 - DNA, 2661 bp, Artificial Sequence
  Synthetic Polynucloetide
atggccttaccagtgaccgccttgctcctgccgctggccttgctgctccacgccgccaggccgagctacgtgctgacacagcctccatccgtgtctgtggctccaggacagaccgccagaatcacatgcggcggcaagaacatcggcagcaagagcgtgcactggtatcagcagccacctggacaggctccagtggtggtggtgtacgacgacagcgatagacctagcggcatccccgagagattcagcggcagcaattccggcaataccgccacactgaccatcagcagagtggaagctggcgacgaggccgtgtactactgccaagtgtgggacagcagcagcgatcacgtggtgtttggcggcggaacaaagctgacagtgcttctcgaggacctgaagaacgtgttcccacctgaggtggccgtgttcgagcctagcgaggccgagatcagccacacccagaaagccaccctcgtgtgcctggctaccggcttctaccccgaccatgtggaactgtcttggtgggtcaacggcaaagaggtgcacagcggcgtgtgtaccgacccccagccactgaaagaacagcccgccctgaacgacagccggtactgcctgagcagcagactgagagtgtccgccaccttctggcagaacccccggaaccacttcagatgccaggtgcagttctacggcctgagcgagaacgacgagtggacccaggacagagccaagcccgtgacccagatcgtgtctgccgaagcctggggcagagccgattgcggctttaccagcgagagctaccagcagggcgtgctgagcgccaccatcctgtacgagatcctgctgggcaaggccaccctgtacgccgtgctggtgtctgccctggtgctgatggctatggtcaagcggaaggacagccggggaagggccaagcgatctggatctggagcaacaaacttctcactactcaaacaagcaggtgacgtggaggagaatcccgggcctactagtatggactggatttggcgcatccttttccttgtcggcgctgctaccggcgcccattcccaactgcaactgcaagagtctggccctggcctggtcaagccttctgaaaccctgagcctgacctgtaccgtgtccggcggctctatcagcagcggcgattactactggggctggatcagacagcctccaggcaagggactcgaatggatcggcagcatcagctacagcggctccacctactacaacccaagcctgaagtccagagtgaccatcagcgtggacaccagcagaaaccagttctccctgaagctgagcagcgtgacagccgccgatacagccgtgtattattgcaccagagaggacagcagcaactggcggagtagaggacagggcacactggtcacagtgtcctcttctggaggcggtggaagcggtggaggaggatctgaagtgcagctggttgaatctggcggaggactggttcaggctggcggatctctgagactgtcttgtgccgccagcggcagaacctttagcatgggctggtttagacaggcccctggcaaagagagagagttcgtcgccgccatcacatactctggcggcagcccttactacgccgactctgtgaagggcagattcaccatcagccgggacaacgccaagaacaccgtgtacctccagatgaacagcctgaagcctgaggacaccgccgtgtactactgcgccgccaatccaacatacggcagcgactggaacgccgagaattggggccagggaacccaagtgacagtgtctagcggatccggcggcggaggatctggcggaggcggatctgggggcggaggctctttcgaacaactccagctgcaagagtctggccctggcctggtcaagcctagcgaaacactgagcctgacctgtaccgtgtctggcggctctatcagctccagcagctatttctggggctggatcagacaacctcctggcaaaggactggaatggatcggctccatctactacagcggcatcacctactacaaccccagcctgaagtccagagtgaccatctccgtggacaccagcaagaaccagttctccctgaagctgagcagcgtgacagccgccgataccgccgtgtattattgtgccagacatgacggcgctgtggccggcctgtttgattattggggacagggcaccctggtcaccgtgtcatctgctacgcgtatccagaaccctgatcctgccgtgtaccagctgcgggatagcaagagcagcgacaagagcgtgtgtctgttcaccgacttcgacagccagaccaacgtgtcccagagcaaggactccgacgtgtacatcaccgataagtgcgtgctggacatgcggagcatggacttcaagagcaactccgccgtggcctggtccaacaagtccgatttcgcctgcgccaacgccttcaacaacagcattatccccgaggacacattcttcccaagccccgagagcagctgcgacgtgaagctggtggaaaagagcttcgagacagacaccaacctgaacttccagaacctgagcgtgatcggcttcagaatcctgctgctgaaagtggccggctttaacctgctgatgaccctgcggctgtggtccagc

SEQ ID NO: 8236 - DNA, 2688 bp, Artificial Sequence
  Synthetic Polynucloetide
atggccttaccagtgaccgccttgctcctgccgctggccttgctgctccacgccgccaggccggaagtgcaggttttggagtctggcggaggactggttcagcctggcggatctctgagactgtcttgtgccgccagcggcttcaccttcagcaactttgccatgagctgggtccgacaggcccctggcaaaggacttgaatgggtgtccacaatcagcggcagcgccggcacaacagattacgccgattctgtgaagggcagattcaccatcagccgggacaacagcaagaaaaccctgtacctccagatgaacagcctgcgcgtggaagataccgccgtgtactactgtgccgatggcagaggccccttcttcgattatcgcggccagggcacactggtcaccgtttcttctggtaccggcggaggcggatctggcggcggaggtagcggtggcggaggatctgaattcagctacgtgctgacacagcctccatccgtgtctgtggctccaggacagaccgccagaatcacatgcggcggcaagaacatcggcagcaagagcgtgcactggtatcagcagccacctggacaggctccagtggtggtggtgtacgacgacagcgatagacctagcggcatccccgagagattcagcggcagcaattccggcaataccgccacactgaccatcagcagagtggaagctggcgacgaggccgtgtactactgccaagtgtgggacagcagcagcgatcacgtggtgtttggcggcggaacaaagctgacagtgcttctcgaggacctgaagaacgtgttcccacctgaggtggccgtgttcgagcctagcgaggccgagatcagccacacccagaaagccaccctcgtgtgcctggctaccggcttctaccccgaccatgtggaactgtcttggtgggtcaacggcaaagaggtgcacagcggcgtgtgtaccgacccccagccactgaaagaacagcccgccctgaacgacagccggtactgcctgagcagcagactgagagtgtccgccaccttctggcagaacccccggaaccacttcagatgccaggtgcagttctacggcctgagcgagaacgacgagtggacccaggacagagccaagcccgtgacccagatcgtgtctgccgaagcctggggcagagccgattgcggctttaccagcgagagctaccagcagggcgtgctgagcgccaccatcctgtacgagatcctgctgggcaaggccaccctgtacgccgtgctggtgtctgccctggtgctgatggctatggtcaagcggaaggacagccggggaagggccaagcgatctggatctggagcaacaaacttctcactactcaaacaagcaggtgacgtggaggagaatcccgggcctactagtatggactggatttggcgcatccttttccttgtcggcgctgctaccggcgcccattccgggcccgaagtgcagctggttgaatctggcggaggactggttcaggctggcggatctctgagactgtcttgtgccgccagcggcagaacctttagcatgggctggtttagacaggcccctggcaaagagagagagttcgtcgccgccatcacatacagcggcggcagcccttactacgcctcttctgtcagaggccggttcaccatcagccgggacaacgccaagaacaccgtgtacctccagatgaacagcctgaagccagaggacaccgccgtgtactactgtgccgccaatccaacctacggcagcgactggaatgccgagaattggggccagggcacccaagtgacagtgtctagtggatccggcggcggaggatctggcggaggcggatctgggggcggaggctctttcgaacaactccagctgcaagagtctggccctggcctggtcaagcctagcgaaacactgagcctgacctgtaccgtgtctggcggctctatcagctccagcagctatttctggggctggatcagacaacctcctggcaaaggactggaatggatcggctccatctactacagcggcatcacctactacaaccccagcctgaagtccagagtgaccatctccgtggacaccagcaagaaccagttctccctgaagctgagcagcgtgacagccgccgataccgccgtgtattattgtgccagacatgacggcgctgtggccggcctgtttgattattggggacagggcaccctggtcaccgtgtcatctgctacgcgtatccagaaccctgatcctgccgtgtaccagctgcgggatagcaagagcagcgacaagagcgtgtgtctgttcaccgacttcgacagccagaccaacgtgtcccagagcaaggactccgacgtgtacatcaccgataagtgcgtgctggacatgcggagcatggacttcaagagcaactccgccgtggcctggtccaacaagtccgatttcgcctgcgccaacgccttcaacaacagcattatccccgaggacacattcttcccaagccccgagagcagctgcgacgtgaagctggtggaaaagagcttcgagacagacaccaacctgaacttccagaacctgagcgtgatcggcttcagaatcctgctgctgaaagtggccggctttaacctgctgatgaccctgcggctgtggtccagc

SEQ ID NO: 8237 - DNA, 2184 bp, Artificial Sequence
  Synthetic Polynucloetide
atggccttaccagtgaccgccttgctcctgccgctggccttgctgctccacgccgccaggccgagctacgtgctgacacagcctccatccgtgtctgtggctccaggacagaccgccagaatcacatgcggcggcaacaacctcggcagcaagagcgtgcactggtatcagcagccacctggacaggctccagtggtggtggtgtacgacgacagcgatagacctagcggcatccccgagagattcagcggcagcaattccggcaataccgccacactgaccatcagcagagtggaagctggcgacgaggccgtgtactactgccaagtgtgggacagcagcagcgatcacgtggtgtttggcggcggaacaaagctgacagtgcttggcggaggcggaagtggaggcggaggatctggcggcggaggctctcaactccagctgcaagagtctggccctggcctggtcaagcctagcgaaacactgagcctgacctgtaccgtgtctggcggctctatcagctccagcagctatttctggggctggatcagacaacctcctggcaaaggactggaatggatcggctccatctactacagcggcatcacctactacaaccccagcctgaagtccagagtgaccatctccgtggacaccagcaagaaccagttctccctgaagctgagcagcgtgacagccgccgataccgccgtgtattattgtgccagacatgacggcgctgtggccggcctgtttgattattggggacagggcaccctggtcaccgtgtcatctgctacgcgtgagcagaaactgatctcggaagaggatctggcgaagcccaccacgacgccagcgccgcgaccaccaacaccggcgcccaccatcgcgtcgcagcccctgtccctgcgcccagaggcgtgccggccagcggcggggggcgcagtgcacacgagggggctggacttcgcctgtgacatctacatctgggcgcccttggccgggacttgtggggtccttctcctgtcactggttatcaccctttactgcaaacggggcagaaagaaactcctgtatatattcaaacaaccatttatgagaccagtacaaactactcaagaggaagatggctgtagctgccgatttccagaagaagaagaaggaggatgtgaactgagagtgaagttcagcaggagcgcagacgcccccgcgtaccagcagggccagaaccagctctataacgagctgaatctaggacgaagagaggagtacgatgttttggacaagagacgtggccgggaccctgagatggggggaaagccgagaaggaagaaccctcaggaaggcctgtacaatgaactgcagaaagataagatggcggaggcctacagtgagattgggatgaaaggcgagcgccggaggggcaaggggcacgatggcctttaccagggtctcagtacagccaccaaggacacctacgacgcccttcacatgcaggccctgccccctcgctctagtggctccggcgagggcagaggaagtctactaacctgcggagatgtggaagaaaatcctggcccacatatgaccgagtacaagcccacggtgcgcctcgccacccgcgacgacgtccccagggccgtacgcaccctcgccgccgcgttcgccgactaccccgccacgcgccacaccgtcgatccggaccgccacatcgagcgggtcaccgagctgcaagaactcttcctcacgcgcgtcgggctcgacatcggcaaggtgtgggtcgcggacgacggcgccgcggtggcggtctggaccacgccggagagcgtcgaagcgggggcggtgttcgccgagatcggcccgcgcatggccgagttgagcggttcccggctggccgcgcagcaacagatggaaggcctcctggcgccgcaccggcccaaggagcccgcgtggttcctggccaccgtcggcgtctcgcccgaccaccagggcaagggtctgggcagcgccgtcgtgctccccggagtggaggcggccgagcgcgccggggtgcccgccttcctggagacctccgcgccccgcaacctccccttctacgagcggctcggcttcaccgtcaccgccgacgtcgaggtgcccgaaggaccgcgcacctggtgcatgacccgcaagcccggtgcctga

SEQ ID NO: 8238 - DNA, 2166 bp, Artificial Sequence
  Synthetic Polynucloetide
atggccttaccagtgaccgccttgctcctgccgctggccttgctgctccacgccgccaggccgagctacgtgctgacacagcctccatccgtgtctgtggctccaggacagaccgccagaatcacatgcggcggcaacaacctcggcagcaagagcgtgcactggtatcagcagccacctggacaggctccagtggtggtggtgtacgacgacagcgatagacctagcggcatccccgagagattcagcggcagcaattccggcaataccgccacactgaccatcagcagagtggaagctggcgacgaggccgtgtactactgccaagtgtgggacagcagcagcgatcacgtggtgtttggcggcggaacaaagctgacagtgcttggcggaggcggaagtggaggcggaggatctggcggcggaggctctcaactccagctgcaagagtctggccctggcctggtcaagcctagcgaaacactgagcctgacctgtaccgtgtctggcggctctatcagctccagcagctatttctggggctggatcagacaacctcctggcaaaggactggaatggatcggctccatctactacagcggcatcacctactacaaccccagcctgaagtccagagtgaccatctccgtggacaccagcaagaaccagttctccctgaagctgagcagcgtgacagccgccgataccgccgtgtattattgtgccagacatgacggcgctgtggccggcctgtttgattattggggacagggcaccctggtcaccgtgtcatctgctacgcgtgagcagaaactgatctcggaagaggatctgaaaattgaagttatgtatcctcctccttacctagacaatgagaagagcaatggaaccattatccatgtgaaagggaaacacctttgtccaagtcccctatttcccggaccttctaagcccttttgggtgctggtggtggttgggggagtcctggcttgctatagcttgctagtaacagtggcctttattattttctgggtgaggagtaagaggagcaggctcctgcacagtgactacatgaacatgactccacgccgccccggacccacccgcaagcattaccagccctatgccccaccacgcgacttcgcagcctatcgctccagagtgaagttcagcaggagcgcagacgcccccgcgtaccagcagggccagaaccagctctataacgagctcaatctaggacgaagagaggagtacgatgttttggacaagagacgtggccgggaccctgagatggggggaaagccgagaaggaagaaccctcaggaaggcctgtacaatgaactgcagaaagataagatggcggaggcctacagtgagattgggatgaaaggcgagcgccggaggggcaaggggcacgatggcctttaccagggtctcagtacagccaccaaggacacctacgacgcccttcacatgcaggccctgccccctcgctctagtggctccggcgagggcagaggaagtctactaacctgcggagatgtggaagaaaatcctggcccacatatgaccgagtacaagcccacggtgcgcctcgccacccgcgacgacgtccccagggccgtacgcaccctcgccgccgcgttcgccgactaccccgccacgcgccacaccgtcgatccggaccgccacatcgagcgggtcaccgagctgcaagaactcttcctcacgcgcgtcgggctcgacatcggcaaggtgtgggtcgcggacgacggcgccgcggtggcggtctggaccacgccggagagcgtcgaagcgggggcggtgttcgccgagatcggcccgcgcatggccgagttgagcggttcccggctggccgcgcagcaacagatggaaggcctcctggcgccgcaccggcccaaggagcccgcgtggttcctggccaccgtcggcgtctcgcccgaccaccagggcaagggtctgggcagcgccgtcgtgctccccggagtggaggcggccgagcgcgccggggtgcccgccttcctggagacctccgcgccccgcaacctccccttctacgagcggctcggcttcaccgtcaccgccgacgtcgaggtgcccgaaggaccgcgcacctggtgcatgacccgcaagcccggtgcctga

SEQ ID NO: 8239 - DNA, 1494 bp, Artificial Sequence
  Synthetic Polynucloetide
atggccttaccagtgaccgccttgctcctgccgctggccttgctgctccacgccgccaggccgagctacgtgctgacacagcctccatccgtgtctgtggctccaggacagaccgccagaatcacatgcggcggcaacaacctcggcagcaagagcgtgcactggtatcagcagccacctggacaggctccagtggtggtggtgtacgacgacagcgatagacctagcggcatccccgagagattcagcggcagcaattccggcaataccgccacactgaccatcagcagagtggaagctggcgacgaggccgtgtactactgccaagtgtgggacagcagcagcgatcacgtggtgtttggcggcggaacaaagctgacagtgcttggcggaggcggaagtggaggcggaggatctggcggcggaggctctcaactccagctgcaagagtctggccctggcctggtcaagcctagcgaaacactgagcctgacctgtaccgtgtctggcggctctatcagctccagcagctatttctggggctggatcagacaacctcctggcaaaggactggaatggatcggctccatctactacagcggcatcacctactacaaccccagcctgaagtccagagtgaccatctccgtggacaccagcaagaaccagttctccctgaagctgagcagcgtgacagccgccgataccgccgtgtattattgtgccagacatgacggcgctgtggccggcctgtttgattattggggacagggcaccctggtcaccgtgtcatctgctacgcgtgagcagaaactgatctcggaagaggatctgaaaattgaagttatgtatcctcctccttacctagacaatgagaagagcaatggaaccattatccatgtgaaagggaaacacctttgtccaagtcccctatttcccggaccttctaagcccttttgggtgctggtggtggttgggggagtcctggcttgctatagcttgctagtaacagtggcctttattattttctgggtgaggagtaagaggagcaggctcctgcacagtgactacatgaacatgactccacgccgccccggacccacccgcaagcattaccagccctatgccccaccacgcgacttcgcagcctatcgctccagagtgaagttcagcaggagcgcagacgcccccgcgtaccagcagggccagaaccagctctataacgagctcaatctaggacgaagagaggagtacgatgttttggacaagagacgtggccgggaccctgagatggggggaaagccgagaaggaagaaccctcaggaaggcctgtacaatgaactgcagaaagataagatggcggaggcctacagtgagattgggatgaaaggcgagcgccggaggggcaaggggcacgatggcctttaccagggtctcagtacagccaccaaggacacctacgacgcccttcacatgcaggccctgccccctcgc

SEQ ID NO: 8240 - DNA, 1515 bp, Artificial Sequence
  Synthetic Polynucloetide
atggccttaccagtgaccgccttgctcctgccgctggccttgctgctccacgccgccaggccgagctacgtgctgacacagcctccatccgtgtctgtggctccaggacagaccgccagaatcacatgcggcggcaacaacctcggcagcaagagcgtgcactggtatcagcagccacctggacaggctccagtggtggtggtgtacgacgacagcgatagacctagcggcatccccgagagattcagcggcagcaattccggcaataccgccacactgaccatcagcagagtggaagctggcgacgaggccgtgtactactgccaagtgtgggacagcagcagcgatcacgtggtgtttggcggcggaacaaagctgacagtgcttggcggaggcggaagtggaggcggaggatctggcggcggaggctctcaactccagctgcaagagtctggccctggcctggtcaagcctagcgaaacactgagcctgacctgtaccgtgtctggcggctctatcagctccagcagctatttctggggctggatcagacaacctcctggcaaaggactggaatggatcggctccatctactacagcggcatcacctactacaaccccagcctgaagtccagagtgaccatctccgtggacaccagcaagaaccagttctccctgaagctgagcagcgtgacagccgccgataccgccgtgtattattgtgccagacatgacggcgctgtggccggcctgtttgattattggggacagggcaccctggtcaccgtgtcatctgctacgcgtgagcagaaactgatctcggaagaggatctggcgaagcccaccacgacgccagcgccgcgaccaccaacaccggcgcccaccatcgcgtcgcagcccctgtccctgcgcccagaggcgtgccggccagcggcggggggcgcagtgcacacgagggggctggacttcgcctgtgacatctacatctgggcgcccttggccgggacttgtggggtccttctcctgtcactggttatcaccctttactgcaaacggggcagaaagaaactcctgtatatattcaaacaaccatttatgagaccagtacaaactactcaagaggaagatggctgtagctgccgatttccagaagaagaagaaggaggatgtgaactgagagtgaagttcagcaggagcgcagacgcccccgcgtaccagcagggccagaaccagctctataacgagctgaatctaggacgaagagaggagtacgatgttttggacaagagacgtggccgggaccctgagatggggggaaagccgagaaggaagaaccctcaggaaggcctgtacaatgaactgcagaaagataagatggcggaggcctacagtgagattgggatgaaaggcgagcgccggaggggcaaggggcacgatggcctttaccagggtctcagtacagccaccaaggacacctacgacgcccttcacatgcaggccctgccccctcgctga

SEQ ID NO: 8241 - DNA, 1515 bp, Artificial Sequence
  Synthetic Polynucloetide
atggccttaccagtgaccgccttgctcctgccgctggccttgctgctccacgccgccaggccgcaactccagctgcaagagtctggccctggcctggtcaagcctagcgaaacactgagcctgacctgtaccgtgtctggcggctctatcagctccagcagctatttctggggctggatcagacaacctcctggcaaaggactggaatggatcggctccatctactacagcggcatcacctactacaaccccagcctgaagtccagagtgaccatctccgtggacaccagcaagaaccagttctccctgaagctgagcagcgtgacagccgccgataccgccgtgtattattgtgccagacatgacggcgctgtggccggcctgtttgattattggggacagggcaccctggtcaccgtgtcatctgctggcggaggcggaagtggaggcggaggatctggcggcggaggctctagctacgtgctgacacagcctccatccgtgtctgtggctccaggacagaccgccagaatcacatgcggcggcaacaacctcggcagcaagagcgtgcactggtatcagcagccacctggacaggctccagtggtggtggtgtacgacgacagcgatagacctagcggcatccccgagagattcagcggcagcaattccggcaataccgccacactgaccatcagcagagtggaagctggcgacgaggccgtgtactactgccaagtgtgggacagcagcagcgatcacgtggtgtttggcggcggaacaaagctgacagtgcttacgcgtgagcagaaactgatctcggaagaggatctggcgaagcccaccacgacgccagcgccgcgaccaccaacaccggcgcccaccatcgcgtcgcagcccctgtccctgcgcccagaggcgtgccggccagcggcggggggcgcagtgcacacgagggggctggacttcgcctgtgacatctacatctgggcgcccttggccgggacttgtggggtccttctcctgtcactggttatcaccctttactgcaaacggggcagaaagaaactcctgtatatattcaaacaaccatttatgagaccagtacaaactactcaagaggaagatggctgtagctgccgatttccagaagaagaagaaggaggatgtgaactgagagtgaagttcagcaggagcgcagacgcccccgcgtaccagcagggccagaaccagctctataacgagctgaatctaggacgaagagaggagtacgatgttttggacaagagacgtggccgggaccctgagatggggggaaagccgagaaggaagaaccctcaggaaggcctgtacaatgaactgcagaaagataagatggcggaggcctacagtgagattgggatgaaaggcgagcgccggaggggcaaggggcacgatggcctttaccagggtctcagtacagccaccaaggacacctacgacgcccttcacatgcaggccctgccccctcgctga

SEQ ID NO: 8242 - DNA, 2754 bp, Artificial Sequence
  Synthetic Polynucloetide
atggccttaccagtgaccgccttgctcctgccgctggccttgctgctccacgccgccaggccgagctacgtgctgacacagcctccatccgtgtctgtggctccaggacagaccgccagaatcacatgcggcggcaacaacctcggcagcaagagcgtgcactggtatcagcagccacctggacaggctccagtggtggtggtgtacgacgacagcgatagacctagcggcatccccgagagattcagcggcagcaattccggcaataccgccacactgaccatcagcagagtggaagctggcgacgaggccgtgtactactgccaagtgtgggacagcagcagcgatcacgtggtgtttggcggcggaacaaagctgacagtgcttggcggaggcggaagtggaggcggaggatctggcggcggaggctctcaactccagctgcaagagtctggccctggcctggtcaagcctagcgaaacactgagcctgacctgtaccgtgtctggcggctctatcagctccagcagctatttctggggctggatcagacaacctcctggcaaaggactggaatggatcggctccatctactacagcggcatcacctactacaaccccagcctgaagtccagagtgaccatctccgtggacaccagcaagaaccagttctccctgaagctgagcagcgtgacagccgccgataccgccgtgtattattgtgccagacatgacggcgctgtggccggcctgtttgattattggggacagggcaccctggtcaccgtgtcatctgctacgcgtgagcagaaactgatctcggaagaggatctggcgaagcccaccacgacgccagcgccgcgaccaccaacaccggcgcccaccatcgcgtcgcagcccctgtccctgcgcccagaggcgtgccggccagcggcggggggcgcagtgcacacgagggggctggacttcgcctgtgacatctacatctgggcgcccttggccgggacttgtggggtccttctcctgtcactggttatcaccctttactgcgggcgcgccagagtgaagttcagcaggagcgcagacgcccccgcgtaccagcagggccagaaccagctctataacgagctgaatctaggacgaagagaggagtacgatgttttggacaagagacgtggccgggaccctgagatggggggaaagccgagaaggaagaaccctcaggaaggcctgtacaatgaactgcagaaagataagatggcggaggcctacagtgagattgggatgaaaggcgagcgccggaggggcaaggggcacgatggcctttaccagggtctcagtacagccaccaaggacacctacgacgcccttcacatgcaggccctgccccctcgctctagaggatctggagcaacaaacttctcactactcaaacaagcaggtgacgtggaggagaatcccgggcctgggatccacatggccacttacgaggttctctgtgaggtggcgcggaaactgggcacggatgacagggaagtggtattgttcctcctaaacgtgttcatacctcaacccacactggcccaattaattggagctcttagagctttaaaggaggagggcaggttaacgtttcccctgttagcggaatgtctgtttcgtgcaggtcgcagagacctcttgcgcgacctgcttcacttagacccgcgttttttagagcgccacctagcgggcacaatgagttatttcagcccttatcagctcactgttctccacgtagacggggagctgtgtgcgagggatattaggtctttgatatttttaagcaaggacactatagggtctcgcagcacaccacagacattcttacactgggtgtactgtatggaaaacttagacctactgggtcccactgacgtggatgccctaatgtcaatgcttagatctttgtcaagagtagacctacagcgccaagtgcaaaccctaatgggccttcacctttccggcccatcacactcccaacactatcgccatacaccactcgagaccgatttctacgactacaaggacgacgatgacaagactagtggctccggcgagggcagaggaagtctactaacctgcggagatgtggaagaaaatcctggcccacatatgaccgagtacaagcccacggtgcgcctcgccacccgcgacgacgtccccagggccgtacgcaccctcgccgccgcgttcgccgactaccccgccacgcgccacaccgtcgatccggaccgccacatcgagcgggtcaccgagctgcaagaactcttcctcacgcgcgtcgggctcgacatcggcaaggtgtgggtcgcggacgacggcgccgcggtggcggtctggaccacgccggagagcgtcgaagcgggggcggtgttcgccgagatcggcccgcgcatggccgagttgagcggttcccggctggccgcgcagcaacagatggaaggcctcctggcgccgcaccggcccaaggagcccgcgtggttcctggccaccgtcggcgtctcgcccgaccaccagggcaagggtctgggcagcgccgtcgtgctccccggagtggaggcggccgagcgcgccggggtgcccgccttcctggagacctccgcgccccgcaacctccccttctacgagcggctcggcttcaccgtcaccgccgacgtcgaggtgcccgaaggaccgcgcacctggtgcatgacccgcaagcccggtgcctga

SEQ ID NO: 8243 - DNA, 2574 bp, Artificial Sequence
  Synthetic Polynucloetide
atggccttaccagtgaccgccttgctcctgccgctggccttgctgctccacgccgccaggccgagctacgtgctgacacagcctccatccgtgtctgtggctccaggacagaccgccagaatcacatgcggcggcaacaacctcggcagcaagagcgtgcactggtatcagcagccacctggacaggctccagtggtggtggtgtacgacgacagcgatagacctagcggcatccccgagagattcagcggcagcaattccggcaataccgccacactgaccatcagcagagtggaagctggcgacgaggccgtgtactactgccaagtgtgggacagcagcagcgatcacgtggtgtttggcggcggaacaaagctgacagtgcttctcgagatccagaaccctgatcctgccgtgtaccagctgcgggatagcaagagcagcgacaagagcgtgtgtctgttcaccgacttcgacagccagaccaacgtgtcccagagcaaggactccgacgtgtacatcaccgataagtgcgtgctggacatgcggagcatggacttcaagagcaactccgccgtggcctggtccaacaagtccgatttcgcctgcgccaacgccttcaacaacagcattatccccgaggacacattcttcccaagcagcgacgtgccctgcgacgtgaagctggtggaaaagagcttcgagacagacaccaacctgaacttccagaacctgagcgtgatcggcttcagaatcctgctgctgaaagtggccggctttaacctgctgatgaccctgcggctgtggtccagccgcgccaagagaagcggatctggcgtgaagcagaccctgaatttcgacctgctgaagctggctggcgacgtggaatccaacccaggccctactagtatggactggatttggcgcatccttttccttgtcggcgctgctaccggcgcgcattccttcgaacaactccagctgcaagagtctggccctggcctggtcaagcctagcgaaacactgagcctgacctgtaccgtgtctggcggctctatcagctccagcagctatttctggggctggatcagacaacctcctggcaaaggactggaatggatcggctccatctactacagcggcatcacctactacaaccccagcctgaagtccagagtgaccatctccgtggacaccagcaagaaccagttctccctgaagctgagcagcgtgacagccgccgataccgccgtgtattattgtgccagacatgacggcgctgtggccggcctgtttgattattggggacagggcaccctggtcaccgtgtcatctgctacgcgtgaggacctgaagaacgtgttcccacctgaggtggccgtgttcgagcctagcaaggccgagatcgcccacacccagaaagccaccctcgtgtgcctggctaccggcttctaccccgaccatgtggaactgtcttggtgggtcaacggcaaagaggtgcacagcggcgtgtgtaccgacccccagccactgaaagaacagcccgccctgaacgacagccggtactgcctgagcagcagactgagagtgtccgccaccttctggcagaacccccggaaccacttcagatgccaggtgcagttctacggcctgagcgagaacgacgagtggacccaggacagagccaagcccgtgacccagatcgtgtctgccgaagcctggggcagagccgattgcggcatcaccagcgccagctaccaccagggcgtgctgagcgccaccatcctgtacgagatcctgctgggcaaggccaccctgtacgccgtgctggtgtctgccctggtgctgatggctatggtcaagcggaaggacagccggggaagggccaagcgatctggatctggagcaacaaacttctcactactcaaacaagcaggtgacgtggaggagaatcccgggccttctagaggccatatgaccgagtacaagcccacggtgcgcctcgccacccgcgacgacgtccccagggccgtacgcaccctcgccgccgcgttcgccgactaccccgccacgcgccacaccgtcgatccggaccgccacatcgagcgggtcaccgagctgcaagaactcttcctcacgcgcgtcgggctcgacatcggcaaggtgtgggtcgcggacgacggcgccgcggtggcggtctggaccacgccggagagcgtcgaagcgggggcggtgttcgccgagatcggcccgcgcatggccgagttgagcggttcccggctggccgcgcagcaacagatggaaggcctcctggcgccgcaccggcccaaggagcccgcgtggttcctggccaccgtcggcgtctcgcccgaccaccagggcaagggtctgggcagcgccgtcgtgctccccggagtggaggcggccgagcgcgccggggtgcccgccttcctggagacctccgcgccccgcaacctccccttctacgagcggctcggcttcaccgtcaccgccgacgtcgaggtgcccgaaggaccgcgcacctggtgcatgacccgcaagcccggtgcctga

SEQ ID NO: 8244 - DNA, 2571 bp, Artificial Sequence
  Synthetic Polynucloetide
atggccttaccagtgaccgccttgctcctgccgctggccttgctgctccacgccgccaggccgagctacgtgctgacacagcctccatccgtgtctgtggctccaggacagaccgccagaatcacatgcggcggcaacaacctcggcagcaagagcgtgcactggtatcagcagccacctggacaggctccagtggtggtggtgtacgacgacagcgatagacctagcggcatccccgagagattcagcggcagcaattccggcaataccgccacactgaccatcagcagagtggaagctggcgacgaggccgtgtactactgccaagtgtgggacagcagcagcgatcacgtggtgtttggcggcggaacaaagctgacagtgcttctcgaggacctgaagaacgtgttcccacctgaggtggccgtgttcgagcctagcaaggccgagatcgcccacacccagaaagccaccctcgtgtgcctggctaccggcttctaccccgaccatgtggaactgtcttggtgggtcaacggcaaagaggtgcacagcggcgtgtgtaccgacccccagccactgaaagaacagcccgccctgaacgacagccggtactgcctgagcagcagactgagagtgtccgccaccttctggcagaacccccggaaccacttcagatgccaggtgcagttctacggcctgagcgagaacgacgagtggacccaggacagagccaagcccgtgacccagatcgtgtctgccgaagcctggggcagagccgattgcggcatcaccagcgccagctaccaccagggcgtgctgagcgccaccatcctgtacgagatcctgctgggcaaggccaccctgtacgccgtgctggtgtctgccctggtgctgatggctatggtcaagcggaaggacagccggggaagggccaagcgatctggatctggagcaacaaacttctcactactcaaacaagcaggtgacgtggaggagaatcccgggcctactagtatggactggatttggcgcatccttttccttgtcggcgctgctaccggcgcgcattccttcgaacaactccagctgcaagagtctggccctggcctggtcaagcctagcgaaacactgagcctgacctgtaccgtgtctggcggctctatcagctccagcagctatttctggggctggatcagacaacctcctggcaaaggactggaatggatcggctccatctactacagcggcatcacctactacaaccccagcctgaagtccagagtgaccatctccgtggacaccagcaagaaccagttctccctgaagctgagcagcgtgacagccgccgataccgccgtgtattattgtgccagacatgacggcgctgtggccggcctgtttgattattggggacagggcaccctggtcaccgtgtcatctgctacgcgtatccagaaccctgatcctgccgtgtaccagctgcgggatagcaagagcagcgacaagagcgtgtgtctgttcaccgacttcgacagccagaccaacgtgtcccagagcaaggactccgacgtgtacatcaccgataagtgcgtgctggacatgcggagcatggacttcaagagcaactccgccgtggcctggtccaacaagtccgatttcgcctgcgccaacgccttcaacaacagcattatccccgaggacacattcttcccaagcagcgacgtgccctgcgacgtgaagctggtggaaaagagcttcgagacagacaccaacctgaacttccagaacctgagcgtgatcggcttcagaatcctgctgctgaaagtggccggctttaacctgctgatgaccctgcggctgtggtccagccgcgccaagagaagcggatctggcgtgaagcagaccctgaatttcgacctgctgaagctggctggcgacgtggaatccaacccaggcccttctagaggccatatgaccgagtacaagcccacggtgcgcctcgccacccgcgacgacgtccccagggccgtacgcaccctcgccgccgcgttcgccgactaccccgccacgcgccacaccgtcgatccggaccgccacatcgagcgggtcaccgagctgcaagaactcttcctcacgcgcgtcgggctcgacatcggcaaggtgtgggtcgcggacgacggcgccgcggtggcggtctggaccacgccggagagcgtcgaagcgggggcggtgttcgccgagatcggcccgcgcatggccgagttgagcggttcccggctggccgcgcagcaacagatggaaggcctcctggcgccgcaccggcccaaggagcccgcgtggttcctggccaccgtcggcgtctcgcccgaccaccagggcaagggtctgggcagcgccgtcgtgctccccggagtggaggcggccgagcgcgccggggtgcccgccttcctggagacctccgcgccccgcaacctccccttctacgagcggctcggcttcaccgtcaccgccgacgtcgaggtgcccgaaggaccgcgcacctggtgcatgacccgcaagcccggtgcctga

SEQ ID NO: 8245 - DNA, 1869 bp, Artificial Sequence
  Synthetic Polynucloetide
atggccttaccagtgaccgccttgctcctgccgctggccttgctgctccacgccgccaggccgagctacgtgctgacacagcctccatccgtgtctgtggctccaggacagaccgccagaatcacatgcggcggcaacaacctcggcagcaagagcgtgcactggtatcagcagccacctggacaggctccagtggtggtggtgtacgacgacagcgatagacctagcggcatccccgagagattcagcggcagcaattccggcaataccgccacactgaccatcagcagagtggaagctggcgacgaggccgtgtactactgccaagtgtgggacagcagcagcgatcacgtggtgtttggcggcggaacaaagctgacagtgcttctcgaggacctgaagaacgtgttcccacctgaggtggccgtgttcgagcctagcgaggccgagatcagccacacccagaaagccaccctcgtgtgcctggctaccggcttctaccccgaccatgtggaactgtcttggtgggtcaacggcaaagaggtgcacagcggcgtgtgtaccgacccccagccactgaaagaacagcccgccctgaacgacagccggtactgcctgagcagcagactgagagtgtccgccaccttctggcagaacccccggaaccacttcagatgccaggtgcagttctacggcctgagcgagaacgacgagtggacccaggacagagccaagcccgtgacccagatcgtgtctgccgaagcctggggcagagccgattgcggctttaccagcgagagctaccagcagggcgtgctgagcgccaccatcctgtacgagatcctgctgggcaaggccaccctgtacgccgtgctggtgtctgccctggtgctgatggctatggtcaagcggaaggacagccggggaagggccaagcgatctggatctggagcaacaaacttctcactactcaaacaagcaggtgacgtggaggagaatcccgggcctactagtatggactggatttggcgcatccttttccttgtcggcgctgctaccggcgcgcattccttcgaacaactccagctgcaagagtctggccctggcctggtcaagcctagcgaaacactgagcctgacctgtaccgtgtctggcggctctatcagctccagcagctatttctggggctggatcagacaacctcctggcaaaggactggaatggatcggctccatctactacagcggcatcacctactacaaccccagcctgaagtccagagtgaccatctccgtggacaccagcaagaaccagttctccctgaagctgagcagcgtgacagccgccgataccgccgtgtattattgtgccagacatgacggcgctgtggccggcctgtttgattattggggacagggcaccctggtcaccgtgtcatctgctacgcgtatccagaaccctgatcctgccgtgtaccagctgcgggatagcaagagcagcgacaagagcgtgtgtctgttcaccgacttcgacagccagaccaacgtgtcccagagcaaggactccgacgtgtacatcaccgataagtgcgtgctggacatgcggagcatggacttcaagagcaactccgccgtggcctggtccaacaagtccgatttcgcctgcgccaacgccttcaacaacagcattatccccgaggacacattcttcccaagccccgagagcagctgcgacgtgaagctggtggaaaagagcttcgagacagacaccaacctgaacttccagaacctgagcgtgatcggcttcagaatcctgctgctgaaagtggccggctttaacctgctgatgaccctgcggctgtggtccagc

SEQ ID NO: 8246 - DNA, 2544 bp, Artificial Sequence
  Synthetic Polynucloetide
atggccttaccagtgaccgccttgctcctgccgctggccttgctgctccacgccgccaggccgagctacgtgctgacacagcctccatccgtgtctgtggctccaggacagaccgccagaatcacatgcggcggcaacaacctcggcagcaagagcgtgcactggtatcagcagccacctggacaggctccagtggtggtggtgtacgacgacagcgatagacctagcggcatccccgagagattcagcggcagcaattccggcaataccgccacactgaccatcagcagagtggaagctggcgacgaggccgtgtactactgccaagtgtgggacagcagcagcgatcacgtggtgtttggcggcggaacaaagctgacagtgcttctcgaggacctgaagaacgtgttcccacctgaggtggccgtgttcgagcctagcgaggccgagatcagccacacccagaaagccaccctcgtgtgcctggctaccggcttctaccccgaccatgtggaactgtcttggtgggtcaacggcaaagaggtgcacagcggcgtgtgtaccgacccccagccactgaaagaacagcccgccctgaacgacagccggtactgcctgagcagcagactgagagtgtccgccaccttctggcagaacccccggaaccacttcagatgccaggtgcagttctacggcctgagcgagaacgacgagtggacccaggacagagccaagcccgtgacccagatcgtgtctgccgaagcctggggcagagccgattgcggctttaccagcgagagctaccagcagggcgtgctgagcgccaccatcctgtacgagatcctgctgggcaaggccaccctgtacgccgtgctggtgtctgccctggtgctgatggctatggtcaagcggaaggacagccggggaagggccaagcgatctggatctggagcaacaaacttctcactactcaaacaagcaggtgacgtggaggagaatcccgggcctactagtatggactggatttggcgcatccttttccttgtcggcgctgctaccggcgcgcattccttcgaacaactccagctgcaagagtctggccctggcctggtcaagcctagcgaaacactgagcctgacctgtaccgtgtctggcggctctatcagctccagcagctatttctggggctggatcagacaacctcctggcaaaggactggaatggatcggctccatctactacagcggcatcacctactacaaccccagcctgaagtccagagtgaccatctccgtggacaccagcaagaaccagttctccctgaagctgagcagcgtgacagccgccgataccgccgtgtattattgtgccagacatgacggcgctgtggccggcctgtttgattattggggacagggcaccctggtcaccgtgtcatctgctacgcgtatccagaaccctgatcctgccgtgtaccagctgcgggatagcaagagcagcgacaagagcgtgtgtctgttcaccgacttcgacagccagaccaacgtgtcccagagcaaggactccgacgtgtacatcaccgataagtgcgtgctggacatgcggagcatggacttcaagagcaactccgccgtggcctggtccaacaagtccgatttcgcctgcgccaacgccttcaacaacagcattatccccgaggacacattcttcccaagccccgagagcagctgcgacgtgaagctggtggaaaagagcttcgagacagacaccaacctgaacttccagaacctgagcgtgatcggcttcagaatcctgctgctgaaagtggccggctttaacctgctgatgaccctgcggctgtggtccagccgcgccaagagaagcggatctggcgtgaagcagaccctgaatttcgacctgctgaagctggctggcgacgtggaatccaacccaggcccttctagaggcgggatccacaccatggctacctacgaggtgctgtgcgaggtggcaagaaagctgggcaccgacgacagagaagtggtgctgttcctgctgaacgtgttcatccctcagcctacactggcccagctgatcggtgcactgagagccctgaaagaggaaggccggctgacctttcctctgctggccgaatgcctgttcagagccggaagaagggatctgctgcgggacctgctgcatctggaccccagatttctggaaagacacctggccggcaccatgagctacttcagcccttaccagctgaccgtgctgcacgttgacggcgaactgtgcgccagagatattcggagcctgatcttcctgagcaaggacaccatcggcagccggtctacccctcagacatttctgcactgggtgtactgcatggaaaacctggacctgctcggccccacagatgtggatgccctgatgtccatgctgagaagcctgagcagagtggacctccagagacaggtgcagacactgatgggactgcacctgagcggacctagccacagccagcactacagacacacccct

SEQ ID NO: 8247 - DNA, 1881 bp, Artificial Sequence
  Synthetic Polynucloetide
atggccttaccagtgaccgccttgctcctgccgctggccttgctgctccacgccgccaggccgagctacgtgctgacacagcctccatccgtgtctgtggctccaggacagaccgccagaatcacatgcggcggcaacaacctcggcagcaagagcgtgcactggtatcagcagccacctggacaggctccagtggtggtggtgtacgacgacagcgatagacctagcggcatccccgagagattcagcggcagcaattccggcaataccgccacactgaccatcagcagagtggaagctggcgacgaggccgtgtactactgccaagtgtgggacagcagcagcgatcacgtggtgtttggcggcggaacaaagctgacagtgcttctcgagatccagaaccctgatcctgccgtgtaccagctgcgggatagcaagagcagcgacaagagcgtgtgtctgttcaccgacttcgacagccagaccaacgtgtcccagagcaaggactccgacgtgtacatcaccgataagtgcgtgctggacatgcggagcatggacttcaagagcaactccgccgtggcctggtccaacaagtccgatttcgcctgcgccaacgccttcaacaacagcattatccccgaggacacattcttcccaagccccgagagcagctgcgacgtgaagctggtggaaaagagcttcgagacagacaccaacctgaacttccagaacctgagcgtgatcggcttcagaatcctgctgctgaaagtggccggctttaacctgctgatgaccctgcggctgtggtccagccgcgccaagagaagcggatctggcgtgaagcagaccctgaatttcgacctgctgaagctggctggcgacgtggaatccaacccaggccctactagtatggactggatttggcgcatccttttccttgtcggcgctgctaccggcgcgcattccttcgaacaactccagctgcaagagtctggccctggcctggtcaagcctagcgaaacactgagcctgacctgtaccgtgtctggcggctctatcagctccagcagctatttctggggctggatcagacaacctcctggcaaaggactggaatggatcggctccatctactacagcggcatcacctactacaaccccagcctgaagtccagagtgaccatctccgtggacaccagcaagaaccagttctccctgaagctgagcagcgtgacagccgccgataccgccgtgtattattgtgccagacatgacggcgctgtggccggcctgtttgattattggggacagggcaccctggtcaccgtgtcatctgctacgcgtgaggacctgaagaacgtgttcccacctgaggtggccgtgttcgagcctagcgaggccgagatcagccacacccagaaagccaccctcgtgtgcctggctaccggcttctaccccgaccatgtggaactgtcttggtgggtcaacggcaaagaggtgcacagcggcgtgtgtaccgacccccagccactgaaagaacagcccgccctgaacgacagccggtactgcctgagcagcagactgagagtgtccgccaccttctggcagaacccccggaaccacttcagatgccaggtgcagttctacggcctgagcgagaacgacgagtggacccaggacagagccaagcccgtgacccagatcgtgtctgccgaagcctggggcagagccgattgcggctttaccagcgagagctaccagcagggcgtgctgagcgccaccatcctgtacgagatcctgctgggcaaggccaccctgtacgccgtgctggtgtctgccctggtgctgatggctatggtcaagcggaaggacagccgggga

SEQ ID NO: 8248 - DNA, 2547 bp, Artificial Sequence
  Synthetic Polynucloetide
atggccttaccagtgaccgccttgctcctgccgctggccttgctgctccacgccgccaggccgagctacgtgctgacacagcctccatccgtgtctgtggctccaggacagaccgccagaatcacatgcggcggcaacaacctcggcagcaagagcgtgcactggtatcagcagccacctggacaggctccagtggtggtggtgtacgacgacagcgatagacctagcggcatccccgagagattcagcggcagcaattccggcaataccgccacactgaccatcagcagagtggaagctggcgacgaggccgtgtactactgccaagtgtgggacagcagcagcgatcacgtggtgtttggcggcggaacaaagctgacagtgcttctcgagatccagaaccctgatcctgccgtgtaccagctgcgggatagcaagagcagcgacaagagcgtgtgtctgttcaccgacttcgacagccagaccaacgtgtcccagagcaaggactccgacgtgtacatcaccgataagtgcgtgctggacatgcggagcatggacttcaagagcaactccgccgtggcctggtccaacaagtccgatttcgcctgcgccaacgccttcaacaacagcattatccccgaggacacattcttcccaagccccgagagcagctgcgacgtgaagctggtggaaaagagcttcgagacagacaccaacctgaacttccagaacctgagcgtgatcggcttcagaatcctgctgctgaaagtggccggctttaacctgctgatgaccctgcggctgtggtccagccgcgccaagagaagcggatctggcgtgaagcagaccctgaatttcgacctgctgaagctggctggcgacgtggaatccaacccaggccctactagtatggactggatttggcgcatccttttccttgtcggcgctgctaccggcgcgcattccttcgaacaactccagctgcaagagtctggccctggcctggtcaagcctagcgaaacactgagcctgacctgtaccgtgtctggcggctctatcagctccagcagctatttctggggctggatcagacaacctcctggcaaaggactggaatggatcggctccatctactacagcggcatcacctactacaaccccagcctgaagtccagagtgaccatctccgtggacaccagcaagaaccagttctccctgaagctgagcagcgtgacagccgccgataccgccgtgtattattgtgccagacatgacggcgctgtggccggcctgtttgattattggggacagggcaccctggtcaccgtgtcatctgctacgcgtgaggacctgaagaacgtgttcccacctgaggtggccgtgttcgagcctagcgaggccgagatcagccacacccagaaagccaccctcgtgtgcctggctaccggcttctaccccgaccatgtggaactgtcttggtgggtcaacggcaaagaggtgcacagcggcgtgtgtaccgacccccagccactgaaagaacagcccgccctgaacgacagccggtactgcctgagcagcagactgagagtgtccgccaccttctggcagaacccccggaaccacttcagatgccaggtgcagttctacggcctgagcgagaacgacgagtggacccaggacagagccaagcccgtgacccagatcgtgtctgccgaagcctggggcagagccgattgcggctttaccagcgagagctaccagcagggcgtgctgagcgccaccatcctgtacgagatcctgctgggcaaggccaccctgtacgccgtgctggtgtctgccctggtgctgatggctatggtcaagcggaaggacagccggggaagggccaagcgatctggatctggagcaacaaacttctcactactcaaacaagcaggtgacgtggaggagaatcccgggccttctagaggcgggatccacaccatggctacctacgaggtgctgtgcgaggtggcaagaaagctgggcaccgacgacagagaagtggtgctgttcctgctgaacgtgttcatccctcagcctacactggcccagctgatcggtgcactgagagccctgaaagaggaaggccggctgacctttcctctgctggccgaatgcctgttcagagccggaagaagggatctgctgcgggacctgctgcatctggaccccagatttctggaaagacacctggccggcaccatgagctacttcagcccttaccagctgaccgtgctgcacgttgacggcgaactgtgcgccagagatattcggagcctgatcttcctgagcaaggacaccatcggcagccggtctacccctcagacatttctgcactgggtgtactgcatggaaaacctggacctgctcggccccacagatgtggatgccctgatgtccatgctgagaagcctgagcagagtggacctccagagacaggtgcagacactgatgggactgcacctgagcggacctagccacagccagcactacagacacacccct

SEQ ID NO: 8249 - DNA, 2706 bp, Artificial Sequence
  Synthetic Polynucloetide
atggccttaccagtgaccgccttgctcctgccgctggccttgctgctccacgccgccaggccgctcgaggggaaaccaattcccaaccctcttctgggactggattcaaccggcagcggcgaggacctgaagaacgtgttcccacctgaggtggccgtgttcgagcctagcaaggccgagatcgcccacacccagaaagccaccctcgtgtgcctggctaccggcttctaccccgaccatgtggaactgtcttggtgggtcaacggcaaagaggtgcacagcggcgtgtgtaccgacccccagccactgaaagaacagcccgccctgaacgacagccggtactgcctgagcagcagactgagagtgtccgccaccttctggcagaacccccggaaccacttcagatgccaggtgcagttctacggcctgagcgagaacgacgagtggacccaggacagagccaagcccgtgacccagatcgtgtctgccgaagcctggggcagagccgattgcggcatcaccagcgccagctaccaccagggcgtgctgagcgccaccatcctgtacgagatcctgctgggcaaggccaccctgtacgccgtgctggtgtctgccctggtgctgatggctatggtcaagcggaaggacagccggggaagggccaagcgatctggatctggagcaacaaacttctcactactcaaacaagcaggtgacgtggaggagaatcccgggcctactagcatggccttaccagtgaccgccttgctcctgccgctggccttgctgctccacgccgccaggccgagctacgtgctgacacagcctccatccgtgtctgtggctccaggacagaccgccagaatcacatgcggcggcaacaacctcggcagcaagagcgtgcactggtatcagcagccacctggacaggctccagtggtggtggtgtacgacgacagcgatagacctagcggcatccccgagagattcagcggcagcaattccggcaataccgccacactgaccatcagcagagtggaagctggcgacgaggccgtgtactactgccaagtgtgggacagcagcagcgatcacgtggtgtttggcggcggaacaaagctgacagtgcttggcggaggcggaagtggaggcggaggatctggcggcggaggctctcaactccagctgcaagagtctggccctggcctggtcaagcctagcgaaacactgagcctgacctgtaccgtgtctggcggctctatcagctccagcagctatttctggggctggatcagacaacctcctggcaaaggactggaatggatcggctccatctactacagcggcatcacctactacaaccccagcctgaagtccagagtgaccatctccgtggacaccagcaagaaccagttctccctgaagctgagcagcgtgacagccgccgataccgccgtgtattattgtgccagacatgacggcgctgtggccggcctgtttgattattggggacagggcaccctggtcaccgtgtcatctgctacgcgtgagcagaaactgatctcggaagaggatgggagcggcatccagaaccctgatcctgccgtgtaccagctgcgggatagcaagagcagcgacaagagcgtgtgtctgttcaccgacttcgacagccagaccaacgtgtcccagagcaaggactccgacgtgtacatcaccgataagtgcgtgctggacatgcggagcatggacttcaagagcaactccgccgtggcctggtccaacaagtccgatttcgcctgcgccaacgccttcaacaacagcattatccccgaggacacattcttcccaagcagcgacgtgccctgcgacgtgaagctggtggaaaagagcttcgagacagacaccaacctgaacttccagaacctgagcgtgatcggcttcagaatcctgctgctgaaagtggccggctttaacctgctgatgaccctgcggctgtggtccagccgcgccaagagaagcggatctggcgtgaagcagaccctgaatttcgacctgctgaagctggctggcgacgtggaatccaacccaggcccttctagaggccatatgaccgagtacaagcccacggtgcgcctcgccacccgcgacgacgtccccagggccgtacgcaccctcgccgccgcgttcgccgactaccccgccacgcgccacaccgtcgatccggaccgccacatcgagcgggtcaccgagctgcaagaactcttcctcacgcgcgtcgggctcgacatcggcaaggtgtgggtcgcggacgacggcgccgcggtggcggtctggaccacgccggagagcgtcgaagcgggggcggtgttcgccgagatcggcccgcgcatggccgagttgagcggttcccggctggccgcgcagcaacagatggaaggcctcctggcgccgcaccggcccaaggagcccgcgtggttcctggccaccgtcggcgtctcgcccgaccaccagggcaagggtctgggcagcgccgtcgtgctccccggagtggaggcggccgagcgcgccggggtgcccgccttcctggagacctccgcgccccgcaacctccccttctacgagcggctcggcttcaccgtcaccgccgacgtcgaggtgcccgaaggaccgcgcacctggtgcatgacccgcaagcccggtgcctga

SEQ ID NO: 8250 - DNA, 2709 bp, Artificial Sequence
  Synthetic Polynucloetide
atggccttaccagtgaccgccttgctcctgccgctggccttgctgctccacgccgccaggccgctcgagcagaaactgatctcggaagaggatctgggctccggcgatcgccctgatcctgccgtgtaccagctgcgggatagcaagagcagcgacaagagcgtgtgtctgttcaccgacttcgacagccagaccaacgtgtcccagagcaaggactccgacgtgtacatcaccgataagtgcgtgctggacatgcggagcatggacttcaagagcaactccgccgtggcctggtccaacaagtccgatttcgcctgcgccaacgccttcaacaacagcattatccccgaggacacattcttcccaagccccgagagcagctgcgacgtgaagctggtggaaaagagcttcgagacagacaccaacctgaacttccagaacctgagcgtgatcggcttcagaatcctgctgctgaaagtggccggctttaacctgctgatgaccctgcggctgtggtccagctctagtcgcgccaagagaagcggatctggcgtgaagcagaccctgaatttcgacctgctgaagctggctggcgacgtggaatccaacccaggccccactagcatggccttaccagtgaccgccttgctcctgccgctggccttgctgctccacgccgccaggccgagctacgtgctgacacagcctccatccgtgtctgtggctccaggacagaccgccagaatcacatgcggcggcaacaacctcggcagcaagagcgtgcactggtatcagcagccacctggacaggctccagtggtggtggtgtacgacgacagcgatagacctagcggcatccccgagagattcagcggcagcaattccggcaataccgccacactgaccatcagcagagtggaagctggcgacgaggccgtgtactactgccaagtgtgggacagcagcagcgatcacgtggtgtttggcggcggaacaaagctgacagtgcttggcggaggcggaagtggaggcggaggatctggcggcggaggctctcaactccagctgcaagagtctggccctggcctggtcaagcctagcgaaacactgagcctgacctgtaccgtgtctggcggctctatcagctccagcagctatttctggggctggatcagacaacctcctggcaaaggactggaatggatcggctccatctactacagcggcatcacctactacaaccccagcctgaagtccagagtgaccatctccgtggacaccagcaagaaccagttctccctgaagctgagcagcgtgacagccgccgataccgccgtgtattattgtgccagacatgacggcgctgtggccggcctgtttgattattggggacagggcaccctggtcaccgtgtcatctgctacgcgtgggaaaccaattcccaaccctcttctgggactggattcaaccggcagcggcgaggacctgaagaacgtgttcccacctgaggtggccgtgttcgagcctagcgaggccgagatcagccacacccagaaagccaccctcgtgtgcctggctaccggcttctaccccgaccatgtggaactgtcttggtgggtcaacggcaaagaggtgcacagcggcgtgtgtaccgacccccagccactgaaagaacagcccgccctgaacgacagccggtactgcctgagcagcagactgagagtgtccgccaccttctggcagaacccccggaaccacttcagatgccaggtgcagttctacggcctgagcgagaacgacgagtggacccaggacagagccaagcccgtgacccagatcgtgtctgccgaagcctggggcagagccgattgcggctttaccagcgagagctaccagcagggcgtgctgagcgccaccatcctgtacgagatcctgctgggcaaggccaccctgtacgccgtgctggtgtctgccctggtgctgatggctatggtcaagcggaaggacagccggggaagggccaagcgatctggatctggagcaacaaacttctcactactcaaacaagcaggtgacgtggaggagaatcccgggccttctagaggccatatgaccgagtacaagcccacggtgcgcctcgccacccgcgacgacgtccccagggccgtacgcaccctcgccgccgcgttcgccgactaccccgccacgcgccacaccgtcgatccggaccgccacatcgagcgggtcaccgagctgcaagaactcttcctcacgcgcgtcgggctcgacatcggcaaggtgtgggtcgcggacgacggcgccgcggtggcggtctggaccacgccggagagcgtcgaagcgggggcggtgttcgccgagatcggcccgcgcatggccgagttgagcggttcccggctggccgcgcagcaacagatggaaggcctcctggcgccgcaccggcccaaggagcccgcgtggttcctggccaccgtcggcgtctcgcccgaccaccagggcaagggtctgggcagcgccgtcgtgctccccggagtggaggcggccgagcgcgccggggtgcccgccttcctggagacctccgcgccccgcaacctccccttctacgagcggctcggcttcaccgtcaccgccgacgtcgaggtgcccgaaggaccgcgcacctggtgcatgacccgcaagcccggtgcctga

SEQ ID NO: 8251 - DNA, 2571 bp, Artificial Sequence
  Synthetic Polynucloetide
atggccttaccagtgaccgccttgctcctgccgctggccttgctgctccacgccgccaggccgagctacgtgctgacacagcctccatccgtgtctgtggctccaggacagaccgccagaatcacatgcggcggcaacaacctcggcagcaagagcgtgcactggtatcagcagccacctggacaggctccagtggtggtggtgtacgacgacagcgatagacctagcggcatccccgagagattcagcggcagcaattccggcaataccgccacactgaccatcagcagagtggaagctggcgacgaggccgtgtactactgccaagtgtgggacagcagcagcgatcacgtggtgtttggcggcggaacaaagctgacagtgcttctcgaggacctgaagaacgtgttcccacctgaggtggccgtgttcgagcctagcgaggccgagatcagccacacccagaaagccaccctcgtgtgcctggctaccggcttctaccccgaccatgtggaactgtcttggtgggtcaacggcaaagaggtgcacagcggcgtgtctaccgacccccagccactgaaagaacagcccgccctgaacgacagccggtactgcctgagcagcagactgagagtgtccgccaccttctggcagaacccccggaaccacttcagatgccaggtgcagttctacggcctgagcgagaacgacgagtggacccaggacagagccaagcccgtgacccagatcgtgtctgccgaagcctggggcagagccgattgcggctttaccagcgagagctaccagcagggcgtgctgagcgccaccatcctgtacgagatcctgctgggcaaggccaccctgtacgccgtgctggtgtctgccctggtgctgatggctatggtcaagcggaaggacagccggggaagggccaagcgatctggatctggagcaacaaacttctcactactcaaacaagcaggtgacgtggaggagaatcccgggcctactagtatggactggatttggcgcatccttttccttgtcggcgctgctaccggcgcgcattccttcgaacaactccagctgcaagagtctggccctggcctggtcaagcctagcgaaacactgagcctgacctgtaccgtgtctggcggctctatcagctccagcagctatttctggggctggatcagacaacctcctggcaaaggactggaatggatcggctccatctactacagcggcatcacctactacaaccccagcctgaagtccagagtgaccatctccgtggacaccagcaagaaccagttctccctgaagctgagcagcgtgacagccgccgataccgccgtgtattattgtgccagacatgacggcgctgtggccggcctgtttgattattggggacagggcaccctggtcaccgtgtcatctgctacgcgtatccagaaccctgatcctgccgtgtaccagctgcgggatagcaagagcagcgacaagagcgtgtgtctgttcaccgacttcgacagccagaccaacgtgtcccagagcaaggactccgacgtgtacatcaccgataagaccgtgctggacatgcggagcatggacttcaagagcaactccgccgtggcctggtccaacaagtccgatttcgcctgcgccaacgccttcaacaacagcattatccccgaggacacattcttcccaagccccgagagcagctgcgacgtgaagctggtggaaaagagcttcgagacagacaccaacctgaacttccagaacctgagcgtgatcggcttcagaatcctgctgctgaaagtggccggctttaacctgctgatgaccctgcggctgtggtccagccgcgccaagagaagcggatctggcgtgaagcagaccctgaatttcgacctgctgaagctggctggcgacgtggaatccaacccaggcccttctagaggccatatgaccgagtacaagcccacggtgcgcctcgccacccgcgacgacgtccccagggccgtacgcaccctcgccgccgcgttcgccgactaccccgccacgcgccacaccgtcgatccggaccgccacatcgagcgggtcaccgagctgcaagaactcttcctcacgcgcgtcgggctcgacatcggcaaggtgtgggtcgcggacgacggcgccgcggtggcggtctggaccacgccggagagcgtcgaagcgggggcggtgttcgccgagatcggcccgcgcatggccgagttgagcggttcccggctggccgcgcagcaacagatggaaggcctcctggcgccgcaccggcccaaggagcccgcgtggttcctggccaccgtcggcgtctcgcccgaccaccagggcaagggtctgggcagcgccgtcgtgctccccggagtggaggcggccgagcgcgccggggtgcccgccttcctggagacctccgcgccccgcaacctccccttctacgagcggctcggcttcaccgtcaccgccgacgtcgaggtgcccgaaggaccgcgcacctggtgcatgacccgcaagcccggtgcctga

SEQ ID NO: 8252 - DNA, 2817 bp, Artificial Sequence
  Synthetic Polynucloetide
atggccttaccagtgaccgccttgctcctgccgctggccttgctgctccacgccgccaggccgagctacgtgctgacacagcctccatccgtgtctgtggctccaggacagaccgccagaatcacatgcggcggcaacaacctcggcagcaagagcgtgcactggtatcagcagccacctggacaggctccagtggtggtggtgtacgacgacagcgatagacctagcggcatccccgagagattcagcggcagcaattccggcaataccgccacactgaccatcagcagagtggaagctggcgacgaggccgtgtactactgccaagtgtgggacagcagcagcgatcacgtggtgtttggcggcggaacaaagctgacagtgcttctcgaggacctgaagaacgtgttcccacctgaggtggccgtgttcgagcctagcgaggccgagatcagccacacccagaaagccaccctcgtgtgcctggctaccggcttctaccccgaccatgtggaactgtcttggtgggtcaacggcaaagaggtgcacagcggcgtgtctaccgacccccagccactgaaagaacagcccgccctgaacgacagccggtactgcctgagcagcagactgagagtgtccgccaccttctggcagaacccccggaaccacttcagatgccaggtgcagttctacggcctgagcgagaacgacgagtggacccaggacagagccaagcccgtgacccagatcgtgtctgccgaagcctggggcagagccgattgcggctttaccagcgagagctaccagcagggcgtgctgagcgccaccatcctgtacgagatcctgctgggcaaggccaccctgtacgccgtgctggtgtctgccctggtgctgatggctatggtcaagcggaaggacagccggggaagggccaagcgatctggatctggagcaacaaacttctcactactcaaacaagcaggtgacgtggaggagaatcccgggcctactagtatggactggatttggcgcatccttttccttgtcggcgctgctaccggcgcgcattccttcgaacaactccagctgcaagagtctggccctggcctggtcaagcctagcgaaacactgagcctgacctgtaccgtgtctggcggctctatcagctccagcagctatttctggggctggatcagacaacctcctggcaaaggactggaatggatcggctccatctactacagcggcatcacctactacaaccccagcctgaagtccagagtgaccatctccgtggacaccagcaagaaccagttctccctgaagctgagcagcgtgacagccgccgataccgccgtgtattattgtgccagacatgacggcgctgtggccggcctgtttgattattggggacagggcaccctggtcaccgtgtcatctgctacgcgtgagcagaaactgatctcggaagaggatgggagcggcaccccattcccttctctggcccctcccatcatgctgctggtggacggcaagcagcagatggtggtcgtgtgcctggtgctggatgtggccccacctggactggacagccccatctggtttagcgccggcaatggctctgccctggacgcctttacctacggcccaagccctgccaccgatggcacctggacaaatctggcccacctgagcctgcccagcgaggaactggcttcttgggagcctctcgtgtgccacacaggacctggcgctgagggacacagcagatccacccagcctatgcacctgtctggcgaggccagcaccgccagaacctgtcctcaggaacctctgagaggcacccctggcggagcactgtggctgggagtgctgagactgctgctgttcaagctgctgctgtttgacctgctgctgacctgctcctgtctgtgcgatcctgccggccctctgccttctcctgccaccaccacaagactgagagccctgggcagccacagactgcaccctgccacagagacaggcggcagagaggccacaagcagccctagaccccagcccagagacagaagatggggcgataccccccctggcagaaagcctggatctccagtccgcgccaagagaagcggatctggcgtgaagcagaccctgaatttcgacctgctgaagctggctggcgacgtggaatccaacccaggcccttctagaggccatatgaccgagtacaagcccacggtgcgcctcgccacccgcgacgacgtccccagggccgtacgcaccctcgccgccgcgttcgccgactaccccgccacgcgccacaccgtcgatccggaccgccacatcgagcgggtcaccgagctgcaagaactcttcctcacgcgcgtcgggctcgacatcggcaaggtgtgggtcgcggacgacggcgccgcggtggcggtctggaccacgccggagagcgtcgaagcgggggcggtgttcgccgagatcggcccgcgcatggccgagttgagcggttcccggctggccgcgcagcaacagatggaaggcctcctggcgccgcaccggcccaaggagcccgcgtggttcctggccaccgtcggcgtctcgcccgaccaccagggcaagggtctgggcagcgccgtcgtgctccccggagtggaggcggccgagcgcgccggggtgcccgccttcctggagacctccgcgccccgcaacctccccttctacgagcggctcggcttcaccgtcaccgccgacgtcgaggtgcccgaaggaccgcgcacctggtgcatgacccgcaagcccggtgcctga

SEQ ID NO: 8253 - DNA, 2871 bp, Artificial Sequence
  Synthetic Polynucloetide
atggccttaccagtgaccgccttgctcctgccgctggccttgctgctccacgccgccaggccgctcgaggacctgaagaacgtgttcccacctgaggtggccgtgttcgagcctagcgaggccgagatcagccacacccagaaagccaccctcgtgtgcctggctaccggcttctaccccgaccatgtggaactgtcttggtgggtcaacggcaaagaggtgcacagcggcgtgtctaccgacccccagccactgaaagaacagcccgccctgaacgacagccggtactgcctgagcagcagactgagagtgtccgccaccttctggcagaacccccggaaccacttcagatgccaggtgcagttctacggcctgagcgagaacgacgagtggacccaggacagagccaagcccgtgacccagatcgtgtctgccgaagcctggggcagagccgattgcggctttaccagcgagagctaccagcagggcgtgctgagcgccaccatcctgtacgagatcctgctgggcaaggccaccctgtacgccgtgctggtgtctgccctggtgctgatggctatggtcaagcggaaggacagccggggaagggccaagcgatctggatctggagcaacaaacttctcactactcaaacaagcaggtgacgtggaggagaatcccgggcctactagcatggccttaccagtgaccgccttgctcctgccgctggccttgctgctccacgccgccaggccgagctacgtgctgacacagcctccatccgtgtctgtggctccaggacagaccgccagaatcacatgcggcggcaacaacctcggcagcaagagcgtgcactggtatcagcagccacctggacaggctccagtggtggtggtgtacgacgacagcgatagacctagcggcatccccgagagattcagcggcagcaattccggcaataccgccacactgaccatcagcagagtggaagctggcgacgaggccgtgtactactgccaagtgtgggacagcagcagcgatcacgtggtgtttggcggcggaacaaagctgacagtgcttggcggaggcggaagtggaggcggaggatctggcggcggaggctctcaactccagctgcaagagtctggccctggcctggtcaagcctagcgaaacactgagcctgacctgtaccgtgtctggcggctctatcagctccagcagctatttctggggctggatcagacaacctcctggcaaaggactggaatggatcggctccatctactacagcggcatcacctactacaaccccagcctgaagtccagagtgaccatctccgtggacaccagcaagaaccagttctccctgaagctgagcagcgtgacagccgccgataccgccgtgtattattgtgccagacatgacggcgctgtggccggcctgtttgattattggggacagggcaccctggtcaccgtgtcatctgctacgcgtgagcagaaactgatctcggaagaggatctggggagcggcaccccattcccttctctggcccctcccatcatgctgctggtggacggcaagcagcagatggtggtcgtgtgcctggtgctggatgtggccccacctggactggacagccccatctggtttagcgccggcaatggctctgccctggacgcctttacctacggcccaagccctgccaccgatggcacctggacaaatctggcccacctgagcctgcccagcgaggaactggcttcttgggagcctctcgtgtgccacacaggacctggcgctgagggacacagcagatccacccagcctatgcacctgtctggcgaggccagcaccgccagaacctgtcctcaggaacctctgagaggcacccctggcggagcactgtggctgggagtgctgagactgctgctgttcaagctgctgctgtttgacctgctgctgacctgctcctgtctgtgcgatcctgccggccctctgccttctcctgccaccaccacaagactgagagccctgggcagccacagactgcaccctgccacagagacaggcggcagagaggccacaagcagccctagaccccagcccagagacagaagatggggcgataccccccctggcagaaagcctggatctccagtccgcgccaagagaagcggatctggcgtgaagcagaccctgaatttcgacctgctgaagctggctggcgacgtggaatccaacccaggcccttctagatctagaggccatatgaccgagtacaagcccacggtgcgcctcgccacccgcgacgacgtccccagggccgtacgcaccctcgccgccgcgttcgccgactaccccgccacgcgccacaccgtcgatccggaccgccacatcgagcgggtcaccgagctgcaagaactcttcctcacgcgcgtcgggctcgacatcggcaaggtgtgggtcgcggacgacggcgccgcggtggcggtctggaccacgccggagagcgtcgaagcgggggcggtgttcgccgagatcggcccgcgcatggccgagttgagcggttcccggctggccgcgcagcaacagatggaaggcctcctggcgccgcaccggcccaaggagcccgcgtggttcctggccaccgtcggcgtctcgcccgaccaccagggcaagggtctgggcagcgccgtcgtgctccccggagtggaggcggccgagcgcgccggggtgcccgccttcctggagacctccgcgccccgcaacctccccttctacgagcggctcggcttcaccgtcaccgccgacgtcgaggtgcccgaaggaccgcgcacctggtgcatgacccgcaagcccggtgcctga

SEQ ID NO: 8254 - DNA, 2682 bp, Artificial Sequence
  Synthetic Polynucloetide
atggccttaccagtgaccgccttgctcctgccgctggccttgctgctccacgccgccaggccgagctacgtgctgacacagcctccatccgtgtctgtggctccaggacagaccgccagaatcacatgcggcggcaacaacctcggcagcaagagcgtgcactggtatcagcagccacctggacaggctccagtggtggtggtgtacgacgacagcgatagacctagcggcatccccgagagattcagcggcagcaattccggcaataccgccacactgaccatcagcagagtggaagctggcgacgaggccgtgtactactgccaagtgtgggacagcagcagcgatcacgtggtgtttggcggcggaacaaagctgacagtgcttctcgaggggaaaccaattcccaaccctcttctgggactggattcaaccggcagcggcgacaagcagctggacgccgacgtgtcccccaagcctaccatcttcctgccctctatcgccgagacaaagctccagaaggccggcacctacctgtgcctgctggaaaagttcttcccagatgtgattaagatccactggcaggaaaagaagtccaacaccatcctgggcagccaggaaggcaacaccatgaagaccaacgacacctacatgaagttcagctggctgaccgtgcccgagaagtccctggacaaagaacacagatgcatcgtgcggcacgaaaacaacaagaacggcgtggaccaggaaatcatcttcccacccatcaagaccgatgtgattacaatggaccccaaggacaactgctccaaggacgccaacgataccctgctgctccagctgaccaacaccagcgcctactacatgtacttgttgctgctgctgaagtccgtggtgtacttcgccatcatcacatgctgcctgctgcggagaaccgccttctgctgcaacggcgagaagtctagggccaagcgatctggatctggagcaacaaacttctcactactcaaacaagcaggtgacgtggaggagaatcccgggcctactagtatggactggatttggcgcatccttttccttgtcggcgctgctaccggcgcgcattccttcgaacaactccagctgcaagagtctggccctggcctggtcaagcctagcgaaacactgagcctgacctgtaccgtgtctggcggctctatcagctccagcagctatttctggggctggatcagacaacctcctggcaaaggactggaatggatcggctccatctactacagcggcatcacctactacaaccccagcctgaagtccagagtgaccatctccgtggacaccagcaagaaccagttctccctgaagctgagcagcgtgacagccgccgataccgccgtgtattattgtgccagacatgacggcgctgtggccggcctgtttgattattggggacagggcaccctggtcaccgtgtcatctgctacgcgtgagcagaaactgatctcggaagaggatgggagcggcagccagcctcacaccaagcccagcgtgttcgtgatgaagaacggcaccaacgtggcctgcctcgtgaaagagttctaccccaaggacatcaggatcaacctggtgtccagcaagaagatcaccgagttcgaccccgccatcgtgatctcccccagcggcaagtacaacgccgtgaagctggggaagtacgaggacagcaacagcgtgacctgctccgtgcagcacgacaacaagaccgtgcacagcaccgactttgaagtgaaaaccgactccaccgaccacgtgaagcccaaagagacagagaacaccaagcagcccagcaagagctgccacaagcccaaggccatcgtgcacaccgagaaagtgaacatgatgagcctgaccgtgctgggcctgcggatgctgttcgccaaaaccgtggccgtgaacttcctgctgaccgccaagctgttcttcctccgcgccaagagaagcggatctggcgtgaagcagaccctgaatttcgacctgctgaagctggctggcgacgtggaatccaacccaggcccttctagaggccatatgaccgagtacaagcccacggtgcgcctcgccacccgcgacgacgtccccagggccgtacgcaccctcgccgccgcgttcgccgactaccccgccacgcgccacaccgtcgatccggaccgccacatcgagcgggtcaccgagctgcaagaactcttcctcacgcgcgtcgggctcgacatcggcaaggtgtgggtcgcggacgacggcgccgcggtggcggtctggaccacgccggagagcgtcgaagcgggggcggtgttcgccgagatcggcccgcgcatggccgagttgagcggttcccggctggccgcgcagcaacagatggaaggcctcctggcgccgcaccggcccaaggagcccgcgtggttcctggccaccgtcggcgtctcgcccgaccaccagggcaagggtctgggcagcgccgtcgtgctccccggagtggaggcggccgagcgcgccggggtgcccgccttcctggagacctccgcgccccgcaacctccccttctacgagcggctcggcttcaccgtcaccgccgacgtcgaggtgcccgaaggaccgcgcacctggtgcatgacccgcaagcccggtgcctga

SEQ ID NO: 8255 - DNA, 1893 bp, Artificial Sequence
  Synthetic Polynucloetide
atggccttaccagtgaccgccttgctcctgccgctggccttgctgctccacgccgccaggccgagctacgtgctgacacagcctccatccgtgtctgtggctccaggacagaccgccagaatcacatgcggcggcaacaacctcggcagcaagagcgtgcactggtatcagcagccacctggacaggctccagtggtggtggtgtacgacgacagcgatagacctagcggcatccccgagagattcagcggcagcaattccggcaataccgccacactgaccatcagcagagtggaagctggcgacgaggccgtgtactactgccaagtgtgggacagcagcagcgatcacgtggtgtttggcggcggaacaaagctgacagtgcttctcgagagccagcctcacaccaagcccagcgtgttcgtgatgaagaacggcaccaacgtggcctgcctcgtgaaagagttctaccccaaggacatcaggatcaacctggtgtccagcaagaagatcaccgagttcgaccccgccatcgtgatctcccccagcggcaagtacaacgccgtgaagctggggaagtacgaggacagcaacagcgtgacctgctccgtgcagcacgacaacaagaccgtgcacagcaccgactttgaagtgaaaaccgactccaccgaccacgtgaagcccaaagagacagagaacaccaagcagcccagcaagagctgccacaagcccaaggccatcgtgcacaccgagaaagtgaacatgatgagcctgaccgtgctgggcctgcggatgctgttcgccaaaaccgtggccgtgaacttcctgctgaccgccaagctgttcttcctcagggccaagcgatctggatctggagcaacaaacttctcactactcaaacaagcaggtgacgtggaggagaatcccgggcctactagtatggactggatttggcgcatccttttccttgtcggcgctgctaccggcgcgcattccttcgaacaactccagctgcaagagtctggccctggcctggtcaagcctagcgaaacactgagcctgacctgtaccgtgtctggcggctctatcagctccagcagctatttctggggctggatcagacaacctcctggcaaaggactggaatggatcggctccatctactacagcggcatcacctactacaaccccagcctgaagtccagagtgaccatctccgtggacaccagcaagaaccagttctccctgaagctgagcagcgtgacagccgccgataccgccgtgtattattgtgccagacatgacggcgctgtggccggcctgtttgattattggggacagggcaccctggtcaccgtgtcatctgctacgcgtgacaagcagctggacgccgacgtgtcccccaagcctaccatcttcctgccctctatcgccgagacaaagctccagaaggccggcacctacctgtgcctgctggaaaagttcttcccagatgtgattaagatccactggcaggaaaagaagtccaacaccatcctgggcagccaggaaggcaacaccatgaagaccaacgacacctacatgaagttcagctggctgaccgtgcccgagaagtccctggacaaagaacacagatgcatcgtgcggcacgaaaacaacaagaacggcgtggaccaggaaatcatcttcccacccatcaagaccgatgtgattacaatggaccccaaggacaactgctccaaggacgccaacgataccctgctgctccagctgaccaacaccagcgcctactacatgtacttgttgctgctgctgaagtccgtggtgtacttcgccatcatcacatgctgcctgctgcggagaaccgccttctgctgcaacggcgagaagtct

SEQ ID NO: 8256 - DNA, 2727 bp, Artificial Sequence
  Synthetic Polynucloetide
atggccttaccagtgaccgccttgctcctgccgctggccttgctgctccacgccgccaggccgctcgaggggaaaccaattcccaaccctcttctgggactggattcaaccggcagcggcgacaagcagctggacgccgacgtgtcccccaagcctaccatcttcctgccctctatcgccgagacaaagctccagaaggccggcacctacctgtgcctgctggaaaagttcttcccagatgtgattaagatccactggcaggaaaagaagtccaacaccatcctgggcagccaggaaggcaacaccatgaagaccaacgacacctacatgaagttcagctggctgaccgtgcccgagaagtccctggacaaagaacacagatgcatcgtgcggcacgaaaacaacaagaacggcgtggaccaggaaatcatcttcccacccatcaagaccgatgtgattacaatggaccccaaggacaactgctccaaggacgccaacgataccctgctgctccagctgaccaacaccagcgcctactacatgtacttgttgctgctgctgaagtccgtggtgtacttcgccatcatcacatgctgcctgctgcggagaaccgccttctgctgcaacggcgagaagtctagggccaagcgatctggatctggagcaacaaacttctcactactcaaacaagcaggtgacgtggaggagaatcccgggcctactagcatggccttaccagtgaccgccttgctcctgccgctggccttgctgctccacgccgccaggccgagctacgtgctgacacagcctccatccgtgtctgtggctccaggacagaccgccagaatcacatgcggcggcaacaacctcggcagcaagagcgtgcactggtatcagcagccacctggacaggctccagtggtggtggtgtacgacgacagcgatagacctagcggcatccccgagagattcagcggcagcaattccggcaataccgccacactgaccatcagcagagtggaagctggcgacgaggccgtgtactactgccaagtgtgggacagcagcagcgatcacgtggtgtttggcggcggaacaaagctgacagtgcttggcggaggcggaagtggaggcggaggatctggcggcggaggctctcaactccagctgcaagagtctggccctggcctggtcaagcctagcgaaacactgagcctgacctgtaccgtgtctggcggctctatcagctccagcagctatttctggggctggatcagacaacctcctggcaaaggactggaatggatcggctccatctactacagcggcatcacctactacaaccccagcctgaagtccagagtgaccatctccgtggacaccagcaagaaccagttctccctgaagctgagcagcgtgacagccgccgataccgccgtgtattattgtgccagacatgacggcgctgtggccggcctgtttgattattggggacagggcaccctggtcaccgtgtcatctgctacgcgtgagcagaaactgatctcggaagaggatgggagcggcagccagcctcacaccaagcccagcgtgttcgtgatgaagaacggcaccaacgtggcctgcctcgtgaaagagttctaccccaaggacatcaggatcaacctggtgtccagcaagaagatcaccgagttcgaccccgccatcgtgatctcccccagcggcaagtacaacgccgtgaagctggggaagtacgaggacagcaacagcgtgacctgctccgtgcagcacgacaacaagaccgtgcacagcaccgactttgaagtgaaaaccgactccaccgaccacgtgaagcccaaagagacagagaacaccaagcagcccagcaagagctgccacaagcccaaggccatcgtgcacaccgagaaagtgaacatgatgagcctgaccgtgctgggcctgcggatgctgttcgccaaaaccgtggccgtgaacttcctgctgaccgccaagctgttcttcctccgcgccaagagaagcggatctggcgtgaagcagaccctgaatttcgacctgctgaagctggctggcgacgtggaatccaacccaggcccttctagaggccatatgaccgagtacaagcccacggtgcgcctcgccacccgcgacgacgtccccagggccgtacgcaccctcgccgccgcgttcgccgactaccccgccacgcgccacaccgtcgatccggaccgccacatcgagcgggtcaccgagctgcaagaactcttcctcacgcgcgtcgggctcgacatcggcaaggtgtgggtcgcggacgacggcgccgcggtggcggtctggaccacgccggagagcgtcgaagcgggggcggtgttcgccgagatcggcccgcgcatggccgagttgagcggttcccggctggccgcgcagcaacagatggaaggcctcctggcgccgcaccggcccaaggagcccgcgtggttcctggccaccgtcggcgtctcgcccgaccaccagggcaagggtctgggcagcgccgtcgtgctccccggagtggaggcggccgagcgcgccggggtgcccgccttcctggagacctccgcgccccgcaacctccccttctacgagcggctcggcttcaccgtcaccgccgacgtcgaggtgcccgaaggaccgcgcacctggtgcatgacccgcaagcccggtgcctga

SEQ ID NO: 8257 - DNA, 3102 bp, Artificial Sequence
  Synthetic Polynucloetide
atggccttaccagtgaccgccttgctcctgccgctggccttgctgctccacgccgccaggccgagctacgtgctgacacagcctccatccgtgtctgtggctccaggacagaccgccagaatcacatgcggcggcaacaacctcggcagcaagagcgtgcactggtatcagcagccacctggacaggctccagtggtggtggtgtacgacgacagcgatagacctagcggcatccccgagagattcagcggcagcaattccggcaataccgccacactgaccatcagcagagtggaagctggcgacgaggccgtgtactactgccaagtgtgggacagcagcagcgatcacgtggtgtttggcggcggaacaaagctgacagtgcttggacagcctaaggccaatcctaccgtgacactgttccctccaagcagcgaagaactccaggccaacaaggccacacttgtgtgcctgatctccgacttctaccctggggctgtgacagtggcttggaaggccgatggatctcctgtgaaagccggcgtggaaaccaccaagccatccaagcagagcaacaacaaatacgccgccagctcctacctgagcctgacacctgagcagtggaagtcccacagatcctacagctgccaagtgacccacgaaggcagcaccgtggaaaagacagtggcccctacagagtgcagcggatcccagagcttcggcctgctggaccccaagctgtgctacctgctggatggcatcctgttcatctacggcgtgatcctgaccgccctgttcctgagagtgaagttcagcagaagcgccgacgcccctgcctaccagcagggacagaaccaactgtacaacgagctgaacctgggcagacgggaagagtacgacgtgctggacaagcggagaggcagggaccctgagatgggcggaaagccccagcggagaaagaacccccaggaaggactgtataacgaactccagaaagacaagatggccgaagcctacagcgagatcggcatgaagggcgagcggagaagaggcaagggccacgatggcctgtaccagggcctgagcaccgccaccaaggacacctatgacgccctgcacatgcaggccctgcctccaagaagggccaagcgatctggatctggagcaacaaacttctcactactcaaacaagcaggtgacgtggaggagaatcccgggcctactagtatggactggatttggcgcatccttttccttgtcggcgctgctaccggcgcgcattccttcgaacaactccagctgcaagagtctggccctggcctggtcaagcctagcgaaacactgagcctgacctgtaccgtgtctggcggctctatcagctccagcagctatttctggggctggatcagacaacctcctggcaaaggactggaatggatcggctccatctactacagcggcatcacctactacaaccccagcctgaagtccagagtgaccatctccgtggacaccagcaagaaccagttctccctgaagctgagcagcgtgacagccgccgataccgccgtgtattattgtgccagacatgacggcgctgtggccggcctgtttgattattggggacagggcaccctggtcaccgtgtcatctgctgcctctacaaagggaccctccgtgtttcctctggctcccagcagcaagtctacaagcggaggaacagccgctctgggctgcctggtcaaggattactttcccgagcctgtgaccgtgtcctggaatagcggagcactgacaagcggcgtgcacacctttccagccgtgctgcaaagcagcggcctgtactctctgagcagcgtggtcacagtgcctagctctagcctgggcacccagacctacatctgcaatgtgaaccacaagcctagcaacaccaaggtggacaagagagtggaacccaagagctgtggtacccagagttttgggttgttggaccctaaattgtgctatctgttggacggaatcctgttcatttacggagtgatcctgaccgcattgttcctgcgggttaagttttccagatccgcagacgcacccgcttaccaacaagggcagaaccaactctacaatgaacttaatttggggcggagggaagagtacgacgttctggacaaaaggaggggacgagatcccgagatgggcggaaagcctcagcgaaggaagaatccgcaagaggggctttataacgaactccagaaagataaaatggcagaagcctatagtgagattgggatgaagggagaaaggaggaggggtaaaggtcacgatgggttgtaccaaggattgagcacagccactaaagatacctatgatgcgctccacatgcaggccctgccgccaagacgcgccaagagaagcggatctggcgtgaagcagaccctgaatttcgacctgctgaagctggctggcgacgtggaatccaacccaggcccttctagaggccatatgaccgagtacaagcccacggtgcgcctcgccacccgcgacgacgtccccagggccgtacgcaccctcgccgccgcgttcgccgactaccccgccacgcgccacaccgtcgatccggaccgccacatcgagcgggtcaccgagctgcaagaactcttcctcacgcgcgtcgggctcgacatcggcaaggtgtgggtcgcggacgacggcgccgcggtggcggtctggaccacgccggagagcgtcgaagcgggggcggtgttcgccgagatcggcccgcgcatggccgagttgagcggttcccggctggccgcgcagcaacagatggaaggcctcctggcgccgcaccggcccaaggagcccgcgtggttcctggccaccgtcggcgtctcgcccgaccaccagggcaagggtctgggcagcgccgtcgtgctccccggagtggaggcggccgagcgcgccggggtgcccgccttcctggagacctccgcgccccgcaacctccccttctacgagcggctcggcttcaccgtcaccgccgacgtcgaggtgcccgaaggaccgcgcacctggtgcatgacccgcaagcccggtgcctga

SEQ ID NO: 8258 - DNA, 2457 bp, Artificial Sequence
  Synthetic Polynucloetide
atggccttaccagtgaccgccttgctcctgccgctggccttgctgctccacgccgccaggccgagctacgtgctgacacagcctccatccgtgtctgtggctccaggacagaccgccagaatcacatgcggcggcaacaacctcggcagcaagagcgtgcactggtatcagcagccacctggacaggctccagtggtggtggtgtacgacgacagcgatagacctagcggcatccccgagagattcagcggcagcaattccggcaataccgccacactgaccatcagcagagtggaagctggcgacgaggccgtgtactactgccaagtgtgggacagcagcagcgatcacgtggtgtttggcggcggaacaaagctgacagtgcttctcgaggacctgaagaacgtgttcccacctgaggtggccgtgttcgagcctagcgaggccgagatcagccacacccagaaagccaccctcgtgtgcctggctaccggcttctaccccgaccatgtggaactgtcttggtgggtcaacggcaaagaggtgcacagcggcgtgtctaccgacccccagccactgaaagaacagcccgccctgaacgacagccggtactgcctgagcagcagactgagagtgtccgccaccttctggcagaacccccggaaccacttcagatgccaggtgcagttctacggcctgagcgagaacgacgagtggacccaggacagagccaagcccgtgacccagatcgtgtctgccgaagcctggggcagagccgattgcggatcccagagcttcggcctgctggaccccaagctgtgctacctgctggatggcatcctgttcatctacggcgtgatcctgaccgccctgttcctgagagtgaagttcagcagaagcgccgacgcccctgcctaccagcagggacagaaccaactgtacaacgagctgaacctgggcagacgggaagagtacgacgtgctggacaagcggagaggcagggaccctgagatgggcggaaagccccagcggagaaagaacccccaggaaggactgtataacgaactccagaaagacaagatggccgaagcctacagcgagatcggcatgaagggcgagcggagaagaggcaagggccacgatggcctgtaccagggcctgagcaccgccaccaaggacacctatgacgccctgcacatgcaggccctgcctccaagaagggccaagcgatctggatctggagcaacaaacttctcactactcaaacaagcaggtgacgtggaggagaatcccgggcctactagtatggactggatttggcgcatccttttccttgtcggcgctgctaccggcgcgcattccttcgaacaactccagctgcaagagtctggccctggcctggtcaagcctagcgaaacactgagcctgacctgtaccgtgtctggcggctctatcagctccagcagctatttctggggctggatcagacaacctcctggcaaaggactggaatggatcggctccatctactacagcggcatcacctactacaaccccagcctgaagtccagagtgaccatctccgtggacaccagcaagaaccagttctccctgaagctgagcagcgtgacagccgccgataccgccgtgtattattgtgccagacatgacggcgctgtggccggcctgtttgattattggggacagggcaccctggtcaccgtgtcatctgctacgcgtatccagaaccctgatcctgccgtgtaccagctgcgggatagcaagagcagcgacaagagcgtgtgtctgttcaccgacttcgacagccagaccaacgtgtcccagagcaaggactccgacgtgtacatcaccgataagaccgtgctggacatgcggagcatggacttcaagagcaactccgccgtggcctggtccaacaagtccgatttcgcctgcgccaacgccttcaacaacagcattatccccgaggacacattcttcccaagccccgagagcagctgcggtacccagagttttgggttgttggaccctaaattgtgctatctgttggacggaatcctgttcatttacggagtgatcctgaccgcattgttcctgcgggttaagttttccagatccgcagacgcacccgcttaccaacaagggcagaaccaactctacaatgaacttaatttggggcggagggaagagtacgacgttctggacaaaaggaggggacgagatcccgagatgggcggaaagcctcagcgaaggaagaatccgcaagaggggctttataacgaactccagaaagataaaatggcagaagcctatagtgagattgggatgaagggagaaaggaggaggggtaaaggtcacgatgggttgtaccaaggattgagcacagccactaaagatacctatgatgcgctccacatgcaggccctgccgccaaga

SEQ ID NO: 8259 - DNA, 2457 bp, Artificial Sequence
  Synthetic Polynucloetide
atggccttaccagtgaccgccttgctcctgccgctggccttgctgctccacgccgccaggccgagctacgtgctgacacagcctccatccgtgtctgtggctccaggacagaccgccagaatcacatgcggcggcaacaacctcggcagcaagagcgtgcactggtatcagcagccacctggacaggctccagtggtggtggtgtacgacgacagcgatagacctagcggcatccccgagagattcagcggcagcaattccggcaataccgccacactgaccatcagcagagtggaagctggcgacgaggccgtgtactactgccaagtgtgggacagcagcagcgatcacgtggtgtttggcggcggaacaaagctgacagtgcttctcgaggacctgaagaacgtgttcccacctgaggtggccgtgttcgagcctagcaaggccgagatcgcccacacccagaaagccaccctcgtgtgcctggctaccggcttctaccccgaccatgtggaactgtcttggtgggtcaacggcaaagaggtgcacagcggcgtgtgtaccgacccccagccactgaaagaacagcccgccctgaacgacagccggtactgcctgagcagcagactgagagtgtccgccaccttctggcagaacccccggaaccacttcagatgccaggtgcagttctacggcctgagcgagaacgacgagtggacccaggacagagccaagcccgtgacccagatcgtgtctgccgaagcctggggcagagccgattgcggatcccagagcttcggcctgctggaccccaagctgtgctacctgctggatggcatcctgttcatctacggcgtgatcctgaccgccctgttcctgagagtgaagttcagcagaagcgccgacgcccctgcctaccagcagggacagaaccaactgtacaacgagctgaacctgggcagacgggaagagtacgacgtgctggacaagcggagaggcagggaccctgagatgggcggaaagccccagcggagaaagaacccccaggaaggactgtataacgaactccagaaagacaagatggccgaagcctacagcgagatcggcatgaagggcgagcggagaagaggcaagggccacgatggcctgtaccagggcctgagcaccgccaccaaggacacctatgacgccctgcacatgcaggccctgcctccaagaagggccaagcgatctggatctggagcaacaaacttctcactactcaaacaagcaggtgacgtggaggagaatcccgggcctactagtatggactggatttggcgcatccttttccttgtcggcgctgctaccggcgcgcattccttcgaacaactccagctgcaagagtctggccctggcctggtcaagcctagcgaaacactgagcctgacctgtaccgtgtctggcggctctatcagctccagcagctatttctggggctggatcagacaacctcctggcaaaggactggaatggatcggctccatctactacagcggcatcacctactacaaccccagcctgaagtccagagtgaccatctccgtggacaccagcaagaaccagttctccctgaagctgagcagcgtgacagccgccgataccgccgtgtattattgtgccagacatgacggcgctgtggccggcctgtttgattattggggacagggcaccctggtcaccgtgtcatctgctacgcgtatccagaaccctgatcctgccgtgtaccagctgcgggatagcaagagcagcgacaagagcgtgtgtctgttcaccgacttcgacagccagaccaacgtgtcccagagcaaggactccgacgtgtacatcaccgataagtgcgtgctggacatgcggagcatggacttcaagagcaactccgccgtggcctggtccaacaagtccgatttcgcctgcgccaacgccttcaacaacagcattatccccgaggacacattcttcccaagcagcgacgtgccctgcggtacccagagttttgggttgttggaccctaaattgtgctatctgttggacggaatcctgttcatttacggagtgatcctgaccgcattgttcctgcgggttaagttttccagatccgcagacgcacccgcttaccaacaagggcagaaccaactctacaatgaacttaatttggggcggagggaagagtacgacgttctggacaaaaggaggggacgagatcccgagatgggcggaaagcctcagcgaaggaagaatccgcaagaggggctttataacgaactccagaaagataaaatggcagaagcctatagtgagattgggatgaagggagaaaggaggaggggtaaaggtcacgatgggttgtaccaaggattgagcacagccactaaagatacctatgatgcgctccacatgcaggccctgccgccaaga

SEQ ID NO: 8260 - DNA, 2670 bp, Artificial Sequence
  Synthetic Polynucloetide
atggccttaccagtgaccgccttgctcctgccgctggccttgctgctccacgccgccaggccgagctacgtgctgacacagcctccatccgtgtctgtggctccaggacagaccgccagaatcacatgcggcggcaacaacctcggcagcaagagcgtgcactggtatcagcagccacctggacaggctccagtggtggtggtgtacgacgacagcgatagacctagcggcatccccgagagattcagcggcagcaattccggcaataccgccacactgaccatcagcagagtggaagctggcgacgaggccgtgtactactgccaagtgtgggacagcagcagcgatcacgtggtgtttggcggcggaacaaagctgacagtgcttctcgaggggaaaccaattcccaaccctcttctgggactggattcaaccggcagcggcgaggacctgaagaacgtgttcccacctgaggtggccgtgttcgagcctagcgaggccgagatcagccacacccagaaagccaccctcgtgtgcctggctaccggcttctaccccgaccatgtggaactgtcttggtgggtcaacggcaaagaggtgcacagcggcgtgtctaccgacccccagccactgaaagaacagcccgccctgaacgacagccggtactgcctgagcagcagactgagagtgtccgccaccttctggcagaacccccggaaccacttcagatgccaggtgcagttctacggcctgagcgagaacgacgagtggacccaggacagagccaagcccgtgacccagatcgtgtctgccgaagcctggggcagagccgattgcggatcccagagcttcggcctgctggaccccaagctgtgctacctgctggatggcatcctgttcatctacggcgtgatcctgaccgccctgttcctgagagtgaagttcagcagaagcgccgacgcccctgcctaccagcagggacagaaccaactgtacaacgagctgaacctgggcagacgggaagagtacgacgtgctggacaagcggagaggcagggaccctgagatgggcggaaagccccagcggagaaagaacccccaggaaggactgtataacgaactccagaaagacaagatggccgaagcctacagcgagatcggcatgaagggcgagcggagaagaggcaagggccacgatggcctgtaccagggcctgagcaccgccaccaaggacacctatgacgccctgcacatgcaggccctgcctccaagaagggccaagcgatctggatctggagcaacaaacttctcactactcaaacaagcaggtgacgtggaggagaatcccgggcctactagtatggactggatttggcgcatccttttccttgtcggcgctgctaccggcgcgcattccttcgaacaactccagctgcaagagtctggccctggcctggtcaagcctagcgaaacactgagcctgacctgtaccgtgtctggcggctctatcagctccagcagctatttctggggctggatcagacaacctcctggcaaaggactggaatggatcggctccatctactacagcggcatcacctactacaaccccagcctgaagtccagagtgaccatctccgtggacaccagcaagaaccagttctccctgaagctgagcagcgtgacagccgccgataccgccgtgtattattgtgccagacatgacggcgctgtggccggcctgtttgattattggggacagggcaccctggtcaccgtgtcatctgctacgcgtgagcagaaactgatctcggaagaggatgggagcggcatccagaaccctgatcctgccgtgtaccagctgcgggatagcaagagcagcgacaagagcgtgtgtctgttcaccgacttcgacagccagaccaacgtgtcccagagcaaggactccgacgtgtacatcaccgataagaccgtgctggacatgcggagcatggacttcaagagcaactccgccgtggcctggtccaacaagtccgatttcgcctgcgccaacgccttcaacaacagcattatccccgaggacacattcttcccaagccccgagagcagctgcggtacccagagttttgggttgttggaccctaaattgtgctatctgttggacggaatcctgttcatttacggagtgatcctgaccgcattgttcctgaggagcaagcggtcacggctgctccacagcgattacatgaatatgacaccacgaagaccgggtcctactcgcaaacactaccaaccctacgcacctccccgcgactttgcagcgtaccgatctcgggttaagttttccagatccgcagacgcacccgcttaccaacaagggcagaaccaactctacaatgaacttaatttggggcggagggaagagtacgacgttctggacaaaaggaggggacgagatcccgagatgggcggaaagcctcagcgaaggaagaatccgcaagaggggctttataacgaactccagaaagataaaatggcagaagcctatagtgagattgggatgaagggagaaaggaggaggggtaaaggtcacgatgggttgtaccaaggattgagcacagccactaaagatacctatgatgcgctccacatgcaggccctgccgccaaga

SEQ ID NO: 8261 - DNA, 2793 bp, Artificial Sequence
  Synthetic Polynucloetide
atggccttaccagtgaccgccttgctcctgccgctggccttgctgctccacgccgccaggccgagctacgtgctgacacagcctccatccgtgtctgtggctccaggacagaccgccagaatcacatgcggcggcaacaacctcggcagcaagagcgtgcactggtatcagcagccacctggacaggctccagtggtggtggtgtacgacgacagcgatagacctagcggcatccccgagagattcagcggcagcaattccggcaataccgccacactgaccatcagcagagtggaagctggcgacgaggccgtgtactactgccaagtgtgggacagcagcagcgatcacgtggtgtttggcggcggaacaaagctgacagtgcttctcgaggggaaaccaattcccaaccctcttctgggactggattcaaccggcagcggcgaggacctgaagaacgtgttcccacctgaggtggccgtgttcgagcctagcgaggccgagatcagccacacccagaaagccaccctcgtgtgcctggctaccggcttctaccccgaccatgtggaactgtcttggtgggtcaacggcaaagaggtgcacagcggcgtgtctaccgacccccagccactgaaagaacagcccgccctgaacgacagccggtactgcctgagcagcagactgagagtgtccgccaccttctggcagaacccccggaaccacttcagatgccaggtgcagttctacggcctgagcgagaacgacgagtggacccaggacagagccaagcccgtgacccagatcgtgtctgccgaagcctggggcagagccgattgcggatcccagagcttcggcctgctggaccccaagctgtgctacctgctggatggcatcctgttcatctacggcgtgatcctgaccgccctgttcctgaggagtaagaggagcaggctcctgcacagtgactacatgaacatgactccacgccgccccggacccacccgcaagcattaccagccctatgccccaccacgcgacttcgcagcctatcgctccagagtgaagttcagcagaagcgccgacgcccctgcctaccagcagggacagaaccaactgtacaacgagctgaacctgggcagacgggaagagtacgacgtgctggacaagcggagaggcagggaccctgagatgggcggaaagccccagcggagaaagaacccccaggaaggactgtataacgaactccagaaagacaagatggccgaagcctacagcgagatcggcatgaagggcgagcggagaagaggcaagggccacgatggcctgtaccagggcctgagcaccgccaccaaggacacctatgacgccctgcacatgcaggccctgcctccaagaagggccaagcgatctggatctggagcaacaaacttctcactactcaaacaagcaggtgacgtggaggagaatcccgggcctactagtatggactggatttggcgcatccttttccttgtcggcgctgctaccggcgcgcattccttcgaacaactccagctgcaagagtctggccctggcctggtcaagcctagcgaaacactgagcctgacctgtaccgtgtctggcggctctatcagctccagcagctatttctggggctggatcagacaacctcctggcaaaggactggaatggatcggctccatctactacagcggcatcacctactacaaccccagcctgaagtccagagtgaccatctccgtggacaccagcaagaaccagttctccctgaagctgagcagcgtgacagccgccgataccgccgtgtattattgtgccagacatgacggcgctgtggccggcctgtttgattattggggacagggcaccctggtcaccgtgtcatctgctacgcgtgagcagaaactgatctcggaagaggatgggagcggcatccagaaccctgatcctgccgtgtaccagctgcgggatagcaagagcagcgacaagagcgtgtgtctgttcaccgacttcgacagccagaccaacgtgtcccagagcaaggactccgacgtgtacatcaccgataagaccgtgctggacatgcggagcatggacttcaagagcaactccgccgtggcctggtccaacaagtccgatttcgcctgcgccaacgccttcaacaacagcattatccccgaggacacattcttcccaagccccgagagcagctgcggtacccagagttttgggttgttggaccctaaattgtgctatctgttggacggaatcctgttcatttacggagtgatcctgaccgcattgttcctgaggagcaagcggtcacggctgctccacagcgattacatgaatatgacaccacgaagaccgggtcctactcgcaaacactaccaaccctacgcacctccccgcgactttgcagcgtaccgatctcgggttaagttttccagatccgcagacgcacccgcttaccaacaagggcagaaccaactctacaatgaacttaatttggggcggagggaagagtacgacgttctggacaaaaggaggggacgagatcccgagatgggcggaaagcctcagcgaaggaagaatccgcaagaggggctttataacgaactccagaaagataaaatggcagaagcctatagtgagattgggatgaagggagaaaggaggaggggtaaaggtcacgatgggttgtaccaaggattgagcacagccactaaagatacctatgatgcgctccacatgcaggccctgccgccaaga

SEQ ID NO: 8262 - DNA, 2676 bp, Artificial Sequence
  Synthetic Polynucloetide
atggccttaccagtgaccgccttgctcctgccgctggccttgctgctccacgccgccaggccgagctacgtgctgacacagcctccatccgtgtctgtggctccaggacagaccgccagaatcacatgcggcggcaacaacctcggcagcaagagcgtgcactggtatcagcagccacctggacaggctccagtggtggtggtgtacgacgacagcgatagacctagcggcatccccgagagattcagcggcagcaattccggcaataccgccacactgaccatcagcagagtggaagctggcgacgaggccgtgtactactgccaagtgtgggacagcagcagcgatcacgtggtgtttggcggcggaacaaagctgacagtgcttctcgaggggaaaccaattcccaaccctcttctgggactggattcaaccggcagcggcgaggacctgaagaacgtgttcccacctgaggtggccgtgttcgagcctagcgaggccgagatcagccacacccagaaagccaccctcgtgtgcctggctaccggcttctaccccgaccatgtggaactgtcttggtgggtcaacggcaaagaggtgcacagcggcgtgtctaccgacccccagccactgaaagaacagcccgccctgaacgacagccggtactgcctgagcagcagactgagagtgtccgccaccttctggcagaacccccggaaccacttcagatgccaggtgcagttctacggcctgagcgagaacgacgagtggacccaggacagagccaagcccgtgacccagatcgtgtctgccgaagcctggggcagagccgattgcggatcccagagcttcggcctgctggaccccaagctgtgctacctgctggatggcatcctgttcatctacggcgtgatcctgaccgccctgttcctgagagtgaagttcagcagaagcgccgacgcccctgcctaccagcagggacagaaccaactgtacaacgagctgaacctgggcagacgggaagagtacgacgtgctggacaagcggagaggcagggaccctgagatgggcggaaagccccagcggagaaagaacccccaggaaggactgtataacgaactccagaaagacaagatggccgaagcctacagcgagatcggcatgaagggcgagcggagaagaggcaagggccacgatggcctgtaccagggcctgagcaccgccaccaaggacacctatgacgccctgcacatgcaggccctgcctccaagaagggccaagcgatctggatctggagcaacaaacttctcactactcaaacaagcaggtgacgtggaggagaatcccgggcctactagtatggactggatttggcgcatccttttccttgtcggcgctgctaccggcgcgcattccttcgaacaactccagctgcaagagtctggccctggcctggtcaagcctagcgaaacactgagcctgacctgtaccgtgtctggcggctctatcagctccagcagctatttctggggctggatcagacaacctcctggcaaaggactggaatggatcggctccatctactacagcggcatcacctactacaaccccagcctgaagtccagagtgaccatctccgtggacaccagcaagaaccagttctccctgaagctgagcagcgtgacagccgccgataccgccgtgtattattgtgccagacatgacggcgctgtggccggcctgtttgattattggggacagggcaccctggtcaccgtgtcatctgctacgcgtgagcagaaactgatctcggaagaggatctggggagcggcatccagaaccctgatcctgccgtgtaccagctgcgggatagcaagagcagcgacaagagcgtgtgtctgttcaccgacttcgacagccagaccaacgtgtcccagagcaaggactccgacgtgtacatcaccgataagaccgtgctggacatgcggagcatggacttcaagagcaactccgccgtggcctggtccaacaagtccgatttcgcctgcgccaacgccttcaacaacagcattatccccgaggacacattcttcccaagccccgagagcagctgcggtacccagagttttgggttgttggaccctaaattgtgctatctgttggacggaatcctgttcatttacggagtgatcctgaccgcattgttcctgaagagaggccggaagaagctgctgtacatcttcaagcagcctttcatgcggcccgtgcagaccacccaggaagaggacggctgctcctgccggttccccgaggaagaagaaggcggctgcgagctgcgggttaagttttccagatccgcagacgcacccgcttaccaacaagggcagaaccaactctacaatgaacttaatttggggcggagggaagagtacgacgttctggacaaaaggaggggacgagatcccgagatgggcggaaagcctcagcgaaggaagaatccgcaagaggggctttataacgaactccagaaagataaaatggcagaagcctatagtgagattgggatgaagggagaaaggaggaggggtaaaggtcacgatgggttgtaccaaggattgagcacagccactaaagatacctatgatgcgctccacatgcaggccctgccgccaaga

SEQ ID NO: 8263 - DNA, 2802 bp, Artificial Sequence
  Synthetic Polynucloetide
atggccttaccagtgaccgccttgctcctgccgctggccttgctgctccacgccgccaggccgagctacgtgctgacacagcctccatccgtgtctgtggctccaggacagaccgccagaatcacatgcggcggcaacaacctcggcagcaagagcgtgcactggtatcagcagccacctggacaggctccagtggtggtggtgtacgacgacagcgatagacctagcggcatccccgagagattcagcggcagcaattccggcaataccgccacactgaccatcagcagagtggaagctggcgacgaggccgtgtactactgccaagtgtgggacagcagcagcgatcacgtggtgtttggcggcggaacaaagctgacagtgcttctcgaggggaaaccaattcccaaccctcttctgggactggattcaaccggcagcggcgaggacctgaagaacgtgttcccacctgaggtggccgtgttcgagcctagcgaggccgagatcagccacacccagaaagccaccctcgtgtgcctggctaccggcttctaccccgaccatgtggaactgtcttggtgggtcaacggcaaagaggtgcacagcggcgtgtctaccgacccccagccactgaaagaacagcccgccctgaacgacagccggtactgcctgagcagcagactgagagtgtccgccaccttctggcagaacccccggaaccacttcagatgccaggtgcagttctacggcctgagcgagaacgacgagtggacccaggacagagccaagcccgtgacccagatcgtgtctgccgaagcctggggcagagccgattgcggatcccagagcttcggcctgctggaccccaagctgtgctacctgctggatggcatcctgttcatctacggcgtgatcctgaccgccctgttcctgaaacggggcagaaagaaactcctgtatatattcaaacaaccatttatgagaccagtacaaactactcaagaggaagatggctgtagctgccgatttccagaagaagaagaaggaggatgtgaactgagagtgaagttcagcagaagcgccgacgcccctgcctaccagcagggacagaaccaactgtacaacgagctgaacctgggcagacgggaagagtacgacgtgctggacaagcggagaggcagggaccctgagatgggcggaaagccccagcggagaaagaacccccaggaaggactgtataacgaactccagaaagacaagatggccgaagcctacagcgagatcggcatgaagggcgagcggagaagaggcaagggccacgatggcctgtaccagggcctgagcaccgccaccaaggacacctatgacgccctgcacatgcaggccctgcctccaagaagggccaagcgatctggatctggagcaacaaacttctcactactcaaacaagcaggtgacgtggaggagaatcccgggcctactagtatggactggatttggcgcatccttttccttgtcggcgctgctaccggcgcgcattccttcgaacaactccagctgcaagagtctggccctggcctggtcaagcctagcgaaacactgagcctgacctgtaccgtgtctggcggctctatcagctccagcagctatttctggggctggatcagacaacctcctggcaaaggactggaatggatcggctccatctactacagcggcatcacctactacaaccccagcctgaagtccagagtgaccatctccgtggacaccagcaagaaccagttctccctgaagctgagcagcgtgacagccgccgataccgccgtgtattattgtgccagacatgacggcgctgtggccggcctgtttgattattggggacagggcaccctggtcaccgtgtcatctgctacgcgtgagcagaaactgatctcggaagaggatctggggagcggcatccagaaccctgatcctgccgtgtaccagctgcgggatagcaagagcagcgacaagagcgtgtgtctgttcaccgacttcgacagccagaccaacgtgtcccagagcaaggactccgacgtgtacatcaccgataagaccgtgctggacatgcggagcatggacttcaagagcaactccgccgtggcctggtccaacaagtccgatttcgcctgcgccaacgccttcaacaacagcattatccccgaggacacattcttcccaagccccgagagcagctgcggtacccagagttttgggttgttggaccctaaattgtgctatctgttggacggaatcctgttcatttacggagtgatcctgaccgcattgttcctgaagagaggccggaagaagctgctgtacatcttcaagcagcctttcatgcggcccgtgcagaccacccaggaagaggacggctgctcctgccggttccccgaggaagaagaaggcggctgcgagctgcgggttaagttttccagatccgcagacgcacccgcttaccaacaagggcagaaccaactctacaatgaacttaatttggggcggagggaagagtacgacgttctggacaaaaggaggggacgagatcccgagatgggcggaaagcctcagcgaaggaagaatccgcaagaggggctttataacgaactccagaaagataaaatggcagaagcctatagtgagattgggatgaagggagaaaggaggaggggtaaaggtcacgatgggttgtaccaaggattgagcacagccactaaagatacctatgatgcgctccacatgcaggccctgccgccaaga

SEQ ID NO: 8264 - DNA, 2475 bp, Artificial Sequence
  Synthetic Polynucloetide
atggccttaccagtgaccgccttgctcctgccgctggccttgctgctccacgccgccaggccgagctacgtgctgacacagcctccatccgtgtctgtggctccaggacagaccgccagaatcacatgcggcggcaacaacctcggcagcaagagcgtgcactggtatcagcagccacctggacaggctccagtggtggtggtgtacgacgacagcgatagacctagcggcatccccgagagattcagcggcagcaattccggcaataccgccacactgaccatcagcagagtggaagctggcgacgaggccgtgtactactgccaagtgtgggacagcagcagcgatcacgtggtgtttggcggcggaacaaagctgacagtgcttctcgagcagagcttcggcctgctggaccccaagctgtgctacctgctggatggcatcctgttcatctacggcgtgatcctgaccgccctgttcctgagagtgaagttcagcagaagcgccgacgcccctgcctaccagcagggacagaaccaactgtacaacgagctgaacctgggcagacgggaagagtacgacgtgctggacaagcggagaggcagggaccctgagatgggcggaaagccccagcggagaaagaacccccaggaaggactgtataacgaactccagaaagacaagatggccgaagcctacagcgagatcggcatgaagggcgagcggagaagaggcaagggccacgatggcctgtaccagggcctgagcaccgccaccaaggacacctatgacgccctgcacatgcaggccctgcctccaagaagggccaagcgatctggatctggagcaacaaacttctcactactcaaacaagcaggtgacgtggaggagaatcccgggcctactagtatggactggatttggcgcatccttttccttgtcggcgctgctaccggcgcgcattccttcgaacaactccagctgcaagagtctggccctggcctggtcaagcctagcgaaacactgagcctgacctgtaccgtgtctggcggctctatcagctccagcagctatttctggggctggatcagacaacctcctggcaaaggactggaatggatcggctccatctactacagcggcatcacctactacaaccccagcctgaagtccagagtgaccatctccgtggacaccagcaagaaccagttctccctgaagctgagcagcgtgacagccgccgataccgccgtgtattattgtgccagacatgacggcgctgtggccggcctgtttgattattggggacagggcaccctggtcaccgtgtcatctgctacgcgtcagagttttgggttgttggaccctaaattgtgctatctgttggacggaatcctgttcatttacggagtgatcctgaccgcattgttcctgcgggttaagttttccagatccgcagacgcacccgcttaccaacaagggcagaaccaactctacaatgaacttaatttggggcggagggaagagtacgacgttctggacaaaaggaggggacgagatcccgagatgggcggaaagcctcagcgaaggaagaatccgcaagaggggctttataacgaactccagaaagataaaatggcagaagcctatagtgagattgggatgaagggagaaaggaggaggggtaaaggtcacgatgggttgtaccaaggattgagcacagccactaaagatacctatgatgcgctccacatgcaggccctgccgccaagacgcgccaagagaagcggatctggcgtgaagcagaccctgaatttcgacctgctgaagctggctggcgacgtggaatccaacccaggcccttctagaggccatatgaccgagtacaagcccacggtgcgcctcgccacccgcgacgacgtccccagggccgtacgcaccctcgccgccgcgttcgccgactaccccgccacgcgccacaccgtcgatccggaccgccacatcgagcgggtcaccgagctgcaagaactcttcctcacgcgcgtcgggctcgacatcggcaaggtgtgggtcgcggacgacggcgccgcggtggcggtctggaccacgccggagagcgtcgaagcgggggcggtgttcgccgagatcggcccgcgcatggccgagttgagcggttcccggctggccgcgcagcaacagatggaaggcctcctggcgccgcaccggcccaaggagcccgcgtggttcctggccaccgtcggcgtctcgcccgaccaccagggcaagggtctgggcagcgccgtcgtgctccccggagtggaggcggccgagcgcgccggggtgcccgccttcctggagacctccgcgccccgcaacctccccttctacgagcggctcggcttcaccgtcaccgccgacgtcgaggtgcccgaaggaccgcgcacctggtgcatgacccgcaagcccggtgcctga

SEQ ID NO: 8265 - DNA, 1947 bp, Artificial Sequence
  Synthetic Polynucloetide
atggccttaccagtgaccgccttgctcctgccgctggccttgctgctccacgccgccaggccgagctacgtgctgacacagcctccatccgtgtctgtggctccaggacagaccgccagaatcacatgcggcggcaacaacctcggcagcaagagcgtgcactggtatcagcagccacctggacaggctccagtggtggtggtgtacgacgacagcgatagacctagcggcatccccgagagattcagcggcagcaattccggcaataccgccacactgaccatcagcagagtggaagctggcgacgaggccgtgtactactgccaagtgtgggacagcagcagcgatcacgtggtgtttggcggcggaacaaagctgacagtgcttctcgagggacagcctaaggccaatcctaccgtgacactgttccctccaagcagcgaagaactccaggccaacaaggccacacttgtgtgcctgatctccgacttctaccctggggctgtgacagtggcttggaaggccgatggatctcctgtgaaagccggcgtggaaaccaccaagccatccaagcagagcaacaacaaatacgccgccagctcctacctgagcctgacacctgagcagtggaagtcccacagatcctacagctgccaagtgacccacgaaggcagcaccgtggaaaagacagtggcccctacagagtgcagccccatcaagaccgatgtgattacaatggaccccaaggacaactgctccaaggacgccaacgataccctgctgctccagctgaccaacaccagcgcctactacatgtacttgttgctgctgctgaagtccgtggtgtacttcgccatcatcacatgctgcctgctgcggagaaccgccttctgctgcaacggcgagaagtctagggccaagcgatctggatctggagcaacaaacttctcactactcaaacaagcaggtgacgtggaggagaatcccgggcctactagtatggactggatttggcgcatccttttccttgtcggcgctgctaccggcgcgcattccttcgaacaactccagctgcaagagtctggccctggcctggtcaagcctagcgaaacactgagcctgacctgtaccgtgtctggcggctctatcagctccagcagctatttctggggctggatcagacaacctcctggcaaaggactggaatggatcggctccatctactacagcggcatcacctactacaaccccagcctgaagtccagagtgaccatctccgtggacaccagcaagaaccagttctccctgaagctgagcagcgtgacagccgccgataccgccgtgtattattgtgccagacatgacggcgctgtggccggcctgtttgattattggggacagggcaccctggtcaccgtgtcatctgctacgcgtgcctctacaaagggaccctccgtgtttcctctggctcccagcagcaagtctacaagcggaggaacagccgctctgggctgcctggtcaaggattactttcccgagcctgtgaccgtgtcctggaatagcggagcactgacaagcggcgtgcacacctttccagccgtgctgcaaagcagcggcctgtactctctgagcagcgtggtcacagtgcctagctctagcctgggcacccagacctacatctgcaatgtgaaccacaagcctagcaacaccaaggtggacaagagagtggaacccaagagctgtgaagtgaaaaccgactccaccgaccacgtgaagcccaaagagacagagaacaccaagcagcccagcaagagctgccacaagcccaaggccatcgtgcacaccgagaaagtgaacatgatgagcctgaccgtgctgggcctgcggatgctgttcgccaaaaccgtggccgtgaacttcctgctgaccgccaagctgttcttcctc

SEQ ID NO: 8266 - DNA, 1881 bp, Artificial Sequence
  Synthetic Polynucloetide
atggccttaccagtgaccgccttgctcctgccgctggccttgctgctccacgccgccaggccgagctacgtgctgacacagcctccatccgtgtctgtggctccaggacagaccgccagaatcacatgcggcggcaacaacctcggcagcaagagcgtgcactggtatcagcagccacctggacaggctccagtggtggtggtgtacgacgacagcgatagacctagcggcatccccgagagattcagcggcagcaattccggcaataccgccacactgaccatcagcagagtggaagctggcgacgaggccgtgtactactgccaagtgtgggacagcagcagcgatcacgtggtgtttggcggcggaacaaagctgacagtgcttctcgagggacagcctaaggccaatcctaccgtgacactgttccctccaagcagcgaagaactccaggccaacaaggccacacttgtgtgcctgatctccgacttctaccctggggctgtgacagtggcttggaaggccgatggatctcctgtgaaagccggcgtggaaaccaccaagccatccaagcagagcaacaacaaatacgccgccagctcctacctgagcctgacacctgagcagtggaagtcccacagatcctacagctgccaagtgacccacgaaggcagcaccgtggaaaagacagtggcccctacagagtgcagcggcagagccgattgcggcatcaccagcgccagctaccaccagggcgtgctgagcgccaccatcctgtacgagatcctgctgggcaaggccaccctgtacgccgtgctggtgtctgccctggtgctgatggctatggtcaagcggaaggacagccggggaagggccaagcgatctggatctggagcaacaaacttctcactactcaaacaagcaggtgacgtggaggagaatcccgggcctactagtatggactggatttggcgcatccttttccttgtcggcgctgctaccggcgcgcattccttcgaacaactccagctgcaagagtctggccctggcctggtcaagcctagcgaaacactgagcctgacctgtaccgtgtctggcggctctatcagctccagcagctatttctggggctggatcagacaacctcctggcaaaggactggaatggatcggctccatctactacagcggcatcacctactacaaccccagcctgaagtccagagtgaccatctccgtggacaccagcaagaaccagttctccctgaagctgagcagcgtgacagccgccgataccgccgtgtattattgtgccagacatgacggcgctgtggccggcctgtttgattattggggacagggcaccctggtcaccgtgtcatctgctacgcgtgcctctacaaagggaccctccgtgtttcctctggctcccagcagcaagtctacaagcggaggaacagccgctctgggctgcctggtcaaggattactttcccgagcctgtgaccgtgtcctggaatagcggagcactgacaagcggcgtgcacacctttccagccgtgctgcaaagcagcggcctgtactctctgagcagcgtggtcacagtgcctagctctagcctgggcacccagacctacatctgcaatgtgaaccacaagcctagcaacaccaaggtggacaagagagtggaacccaagagctgtatccccgaggacacattcttcccaagcagcgacgtgccctgcgacgtgaagctggtggaaaagagcttcgagacagacaccaacctgaacttccagaacctgagcgtgatcggcttcagaatcctgctgctgaaagtggccggctttaacctgctgatgaccctgcggctgtggtccagc

SEQ ID NO: 8267 - DNA, 1881 bp, Artificial Sequence
  Synthetic Polynucloetide
atggccttaccagtgaccgccttgctcctgccgctggccttgctgctccacgccgccaggccgagctacgtgctgacacagcctccatccgtgtctgtggctccaggacagaccgccagaatcacatgcggcggcaacaacctcggcagcaagagcgtgcactggtatcagcagccacctggacaggctccagtggtggtggtgtacgacgacagcgatagacctagcggcatccccgagagattcagcggcagcaattccggcaataccgccacactgaccatcagcagagtggaagctggcgacgaggccgtgtactactgccaagtgtgggacagcagcagcgatcacgtggtgtttggcggcggaacaaagctgacagtgcttctcgagggacagcctaaggccaatcctaccgtgacactgttccctccaagcagcgaagaactccaggccaacaaggccacacttgtgtgcctgatctccgacttctaccctggggctgtgacagtggcttggaaggccgatggatctcctgtgaaagccggcgtggaaaccaccaagccatccaagcagagcaacaacaaatacgccgccagctcctacctgagcctgacacctgagcagtggaagtcccacagatcctacagctgccaagtgacccacgaaggcagcaccgtggaaaagacagtggcccctacagagtgcagcggcagagccgattgcggctttaccagcgagagctaccagcagggcgtgctgagcgccaccatcctgtacgagatcctgctgggcaaggccaccctgtacgccgtgctggtgtctgccctggtgctgatggctatggtcaagcggaaggacagccggggaagggccaagcgatctggatctggagcaacaaacttctcactactcaaacaagcaggtgacgtggaggagaatcccgggcctactagtatggactggatttggcgcatccttttccttgtcggcgctgctaccggcgcgcattccttcgaacaactccagctgcaagagtctggccctggcctggtcaagcctagcgaaacactgagcctgacctgtaccgtgtctggcggctctatcagctccagcagctatttctggggctggatcagacaacctcctggcaaaggactggaatggatcggctccatctactacagcggcatcacctactacaaccccagcctgaagtccagagtgaccatctccgtggacaccagcaagaaccagttctccctgaagctgagcagcgtgacagccgccgataccgccgtgtattattgtgccagacatgacggcgctgtggccggcctgtttgattattggggacagggcaccctggtcaccgtgtcatctgctacgcgtgcctctacaaagggaccctccgtgtttcctctggctcccagcagcaagtctacaagcggaggaacagccgctctgggctgcctggtcaaggattactttcccgagcctgtgaccgtgtcctggaatagcggagcactgacaagcggcgtgcacacctttccagccgtgctgcaaagcagcggcctgtactctctgagcagcgtggtcacagtgcctagctctagcctgggcacccagacctacatctgcaatgtgaaccacaagcctagcaacaccaaggtggacaagagagtggaacccaagagctgtatccccgaggacacattcttcccaagccccgagagcagctgcgacgtgaagctggtggaaaagagcttcgagacagacaccaacctgaacttccagaacctgagcgtgatcggcttcagaatcctgctgctgaaagtggccggctttaacctgctgatgaccctgcggctgtggtccagc

SEQ ID NO: 8268 - DNA, 1359 bp, Artificial Sequence
  Synthetic Polynucloetide
atggccttaccagtgaccgccttgctcctgccgctggccttgctgctccacgccgccaggccgagctacgtgctgacacagcctccatccgtgtctgtggctccaggacagaccgccagaatcacatgcggcggcaacaacctcggcagcaagagcgtgcactggtatcagcagccacctggacaggctccagtggtggtggtgtacgacgacagcgatagacctagcggcatccccgagagattcagcggcagcaattccggcaataccgccacactgaccatcagcagagtggaagctggcgacgaggccgtgtactactgccaagtgtgggacagcagcagcgatcacgtggtgtttggcggcggaacaaagctgacagtgcttggcggaggcggaagtggaggcggaggatctggcggcggaggctctcaactccagctgcaagagtctggccctggcctggtcaagcctagcgaaacactgagcctgacctgtaccgtgtctggcggctctatcagctccagcagctatttctggggctggatcagacaacctcctggcaaaggactggaatggatcggctccatctactacagcggcatcacctactacaaccccagcctgaagtccagagtgaccatctccgtggacaccagcaagaaccagttctccctgaagctgagcagcgtgacagccgccgataccgccgtgtattattgtgccagacatgacggcgctgtggccggcctgtttgattattggggacagggcaccctggtcaccgtgtcatctgctacgcgtgacggtaacgaggagatgggaggaatcactcaaaccccttacaaagtctcaatttcaggaacaactgttatccttacatgtccccagtatcctggcagcgagatcctttggcagcataacgacaagaatatagggggagatgaagacgataagaatatcggatctgacgaggatcacttgagcctgaaagagttctccgagcttgaacaaagcggatattatgtgtgctatccgcgcgggtcaaagccggaagacgctaacttttacctttatctccgagccagagtgtgcgaaaattgcatggaaatggacgttatgtccgttgctacaatagttatcgtagatatatgcatcacgggtggactgcttctgctggtttattattggtccaagaatagaaaggccaaagctaaacccgtgaccagaggcgctggcgcaggcggaaggcaaaggggacaaaacaaagaacggccaccaccagtgccaaatccagattatgagcctattcggaaaggacagagggacctgtactctggcctgaatcagagaagaatc

SEQ ID NO: 8269 - DNA, 1254 bp, Artificial Sequence
  Synthetic Polynucloetide
atggccttaccagtgaccgccttgctcctgccgctggccttgctgctccacgccgccaggccgagctacgtgctgacacagcctccatccgtgtctgtggctccaggacagaccgccagaatcacatgcggcggcaacaacctcggcagcaagagcgtgcactggtatcagcagccacctggacaggctccagtggtggtggtgtacgacgacagcgatagacctagcggcatccccgagagattcagcggcagcaattccggcaataccgccacactgaccatcagcagagtggaagctggcgacgaggccgtgtactactgccaagtgtgggacagcagcagcgatcacgtggtgtttggcggcggaacaaagctgacagtgcttggcggaggcggaagtggaggcggaggatctggcggcggaggctctcaactccagctgcaagagtctggccctggcctggtcaagcctagcgaaacactgagcctgacctgtaccgtgtctggcggctctatcagctccagcagctatttctggggctggatcagacaacctcctggcaaaggactggaatggatcggctccatctactacagcggcatcacctactacaaccccagcctgaagtccagagtgaccatctccgtggacaccagcaagaaccagttctccctgaagctgagcagcgtgacagccgccgataccgccgtgtattattgtgccagacatgacggcgctgtggccggcctgtttgattattggggacagggcaccctggtcaccgtgtcatctgctacgcgtttcaagatccccatcgaggaactggaagatcgggtgttcgtgaactgcaacacctctatcacctgggtggaaggcaccgtgggaacactgctgagcgacatcaccagactggacctcggcaagcggattctggaccctcggggcatctacagatgcaacggcaccgacatctacaaggacaaagaaagcaccgtgcaggtccactacagaatgtgccagtcctgcgtggaactggaccctgctacagtggccggcatcatcgtgaccgatgtgatcgctactctgctgctggctctgggagtgttctgcttcgccggacacgaaacaggcagactgtctggcgctgccgatacacaggccctgctgagaaacgaccaagtgtatcagcccctgcgcgacagagatgatgcccagtattctcacctcggcggcaactgggctagaaacaag

SEQ ID NO: 8270 - DNA, 1284 bp, Artificial Sequence
  Synthetic Polynucloetide
atggccttaccagtgaccgccttgctcctgccgctggccttgctgctccacgccgccaggccgagctacgtgctgacacagcctccatccgtgtctgtggctccaggacagaccgccagaatcacatgcggcggcaacaacctcggcagcaagagcgtgcactggtatcagcagccacctggacaggctccagtggtggtggtgtacgacgacagcgatagacctagcggcatccccgagagattcagcggcagcaattccggcaataccgccacactgaccatcagcagagtggaagctggcgacgaggccgtgtactactgccaagtgtgggacagcagcagcgatcacgtggtgtttggcggcggaacaaagctgacagtgcttggcggaggcggaagtggaggcggaggatctggcggcggaggctctcaactccagctgcaagagtctggccctggcctggtcaagcctagcgaaacactgagcctgacctgtaccgtgtctggcggctctatcagctccagcagctatttctggggctggatcagacaacctcctggcaaaggactggaatggatcggctccatctactacagcggcatcacctactacaaccccagcctgaagtccagagtgaccatctccgtggacaccagcaagaaccagttctccctgaagctgagcagcgtgacagccgccgataccgccgtgtattattgtgccagacatgacggcgctgtggccggcctgtttgattattggggacagggcaccctggtcaccgtgtcatctgctacgcgtcagagcatcaagggcaaccacctggtcaaggtgtacgactaccaagaggacggcagcgtgctgctgacatgtgatgccgaggccaagaacatcacctggtttaaggacggcaagatgatcggcttcctgaccgaggacaagaagaagtggaacctgggcagcaacgctaaggaccccagaggcatgtatcagtgcaagggcagccagaacaagagcaagcccctccaggtgtactaccggatgtgccagaactgcatcgagctgaacgccgctaccatcagcggctttctgttcgccgagatcgtgtccatcttcgtgctggccgtgggcgtgtactttatcgctggacaggatggcgtgcggcagagcagagcttccgataagcaaaccctgctgcctaacgaccagctgtaccagcctctgaaggacagagaggacgaccagtacagccacctccagggcaatcagctgagaagaaac

SEQ ID NO: 8271 - DNA, 1233 bp, Artificial Sequence
  Synthetic Polynucloetide
atggccttaccagtgaccgccttgctcctgccgctggccttgctgctccacgccgccaggccgagctacgtgctgacacagcctccatccgtgtctgtggctccaggacagaccgccagaatcacatgcggcggcaacaacctcggcagcaagagcgtgcactggtatcagcagccacctggacaggctccagtggtggtggtgtacgacgacagcgatagacctagcggcatccccgagagattcagcggcagcaattccggcaataccgccacactgaccatcagcagagtggaagctggcgacgaggccgtgtactactgccaagtgtgggacagcagcagcgatcacgtggtgtttggcggcggaacaaagctgacagtgcttggcggaggcggaagtggaggcggaggatctggcggcggaggctctcaactccagctgcaagagtctggccctggcctggtcaagcctagcgaaacactgagcctgacctgtaccgtgtctggcggctctatcagctccagcagctatttctggggctggatcagacaacctcctggcaaaggactggaatggatcggctccatctactacagcggcatcacctactacaaccccagcctgaagtccagagtgaccatctccgtggacaccagcaagaaccagttctccctgaagctgagcagcgtgacagccgccgataccgccgtgtattattgtgccagacatgacggcgctgtggccggcctgtttgattattggggacagggcaccctggtcaccgtgtcatctgctacgcgtcagagttttgggttgttggaccctaaattgtgctatctgttggacggaatcctgttcatttacggagtgatcctgaccgcattgttcctgcgggttaagttttccagatccgcagacgcacccgcttaccaacaagggcagaaccaactctacaatgaacttaatttggggcggagggaagagtacgacgttctggacaaaaggaggggacgagatcccgagatgggcggaaagcctcagcgaaggaagaatccgcaagaggggctttataacgaactccagaaagataaaatggcagaagcctatagtgagattgggatgaagggagaaaggaggaggggtaaaggtcacgatgggttgtaccaaggattgagcacagccactaaagatacctatgatgcgctccacatgcaggccctgccgccaaga

SEQ ID NO: 8272 - DNA, 1359 bp, Artificial Sequence
  Synthetic Polynucloetide
atggccttaccagtgaccgccttgctcctgccgctggccttgctgctccacgccgccaggccgcaactccagctgcaagagtctggccctggcctggtcaagcctagcgaaacactgagcctgacctgtaccgtgtctggcggctctatcagctccagcagctatttctggggctggatcagacaacctcctggcaaaggactggaatggatcggctccatctactacagcggcatcacctactacaaccccagcctgaagtccagagtgaccatctccgtggacaccagcaagaaccagttctccctgaagctgagcagcgtgacagccgccgataccgccgtgtattattgtgccagacatgacggcgctgtggccggcctgtttgattattggggacagggcaccctggtcaccgtgtcatctgctggcggaggcggaagtggaggcggaggatctggcggcggaggctctagctacgtgctgacacagcctccatccgtgtctgtggctccaggacagaccgccagaatcacatgcggcggcaacaacctcggcagcaagagcgtgcactggtatcagcagccacctggacaggctccagtggtggtggtgtacgacgacagcgatagacctagcggcatccccgagagattcagcggcagcaattccggcaataccgccacactgaccatcagcagagtggaagctggcgacgaggccgtgtactactgccaagtgtgggacagcagcagcgatcacgtggtgtttggcggcggaacaaagctgacagtgcttacgcgtgacggtaacgaggagatgggaggaatcactcaaaccccttacaaagtctcaatttcaggaacaactgttatccttacatgtccccagtatcctggcagcgagatcctttggcagcataacgacaagaatatagggggagatgaagacgataagaatatcggatctgacgaggatcacttgagcctgaaagagttctccgagcttgaacaaagcggatattatgtgtgctatccgcgcgggtcaaagccggaagacgctaacttttacctttatctccgagccagagtgtgcgaaaattgcatggaaatggacgttatgtccgttgctacaatagttatcgtagatatatgcatcacgggtggactgcttctgctggtttattattggtccaagaatagaaaggccaaagctaaacccgtgaccagaggcgctggcgcaggcggaaggcaaaggggacaaaacaaagaacggccaccaccagtgccaaatccagattatgagcctattcggaaaggacagagggacctgtactctggcctgaatcagagaagaatc

SEQ ID NO: 8273 - DNA, 1254 bp, Artificial Sequence
  Synthetic Polynucloetide
atggccttaccagtgaccgccttgctcctgccgctggccttgctgctccacgccgccaggccgcaactccagctgcaagagtctggccctggcctggtcaagcctagcgaaacactgagcctgacctgtaccgtgtctggcggctctatcagctccagcagctatttctggggctggatcagacaacctcctggcaaaggactggaatggatcggctccatctactacagcggcatcacctactacaaccccagcctgaagtccagagtgaccatctccgtggacaccagcaagaaccagttctccctgaagctgagcagcgtgacagccgccgataccgccgtgtattattgtgccagacatgacggcgctgtggccggcctgtttgattattggggacagggcaccctggtcaccgtgtcatctgctggcggaggcggaagtggaggcggaggatctggcggcggaggctctagctacgtgctgacacagcctccatccgtgtctgtggctccaggacagaccgccagaatcacatgcggcggcaacaacctcggcagcaagagcgtgcactggtatcagcagccacctggacaggctccagtggtggtggtgtacgacgacagcgatagacctagcggcatccccgagagattcagcggcagcaattccggcaataccgccacactgaccatcagcagagtggaagctggcgacgaggccgtgtactactgccaagtgtgggacagcagcagcgatcacgtggtgtttggcggcggaacaaagctgacagtgcttacgcgtttcaagatccccatcgaggaactggaagatcgggtgttcgtgaactgcaacacctctatcacctgggtggaaggcaccgtgggaacactgctgagcgacatcaccagactggacctcggcaagcggattctggaccctcggggcatctacagatgcaacggcaccgacatctacaaggacaaagaaagcaccgtgcaggtccactacagaatgtgccagtcctgcgtggaactggaccctgctacagtggccggcatcatcgtgaccgatgtgatcgctactctgctgctggctctgggagtgttctgcttcgccggacacgaaacaggcagactgtctggcgctgccgatacacaggccctgctgagaaacgaccaagtgtatcagcccctgcgcgacagagatgatgcccagtattctcacctcggcggcaactgggctagaaacaag

SEQ ID NO: 8274 - DNA, 1284 bp, Artificial Sequence
  Synthetic Polynucloetide
atggccttaccagtgaccgccttgctcctgccgctggccttgctgctccacgccgccaggccgcaactccagctgcaagagtctggccctggcctggtcaagcctagcgaaacactgagcctgacctgtaccgtgtctggcggctctatcagctccagcagctatttctggggctggatcagacaacctcctggcaaaggactggaatggatcggctccatctactacagcggcatcacctactacaaccccagcctgaagtccagagtgaccatctccgtggacaccagcaagaaccagttctccctgaagctgagcagcgtgacagccgccgataccgccgtgtattattgtgccagacatgacggcgctgtggccggcctgtttgattattggggacagggcaccctggtcaccgtgtcatctgctggcggaggcggaagtggaggcggaggatctggcggcggaggctctagctacgtgctgacacagcctccatccgtgtctgtggctccaggacagaccgccagaatcacatgcggcggcaacaacctcggcagcaagagcgtgcactggtatcagcagccacctggacaggctccagtggtggtggtgtacgacgacagcgatagacctagcggcatccccgagagattcagcggcagcaattccggcaataccgccacactgaccatcagcagagtggaagctggcgacgaggccgtgtactactgccaagtgtgggacagcagcagcgatcacgtggtgtttggcggcggaacaaagctgacagtgcttacgcgtcagagcatcaagggcaaccacctggtcaaggtgtacgactaccaagaggacggcagcgtgctgctgacatgtgatgccgaggccaagaacatcacctggtttaaggacggcaagatgatcggcttcctgaccgaggacaagaagaagtggaacctgggcagcaacgctaaggaccccagaggcatgtatcagtgcaagggcagccagaacaagagcaagcccctccaggtgtactaccggatgtgccagaactgcatcgagctgaacgccgctaccatcagcggctttctgttcgccgagatcgtgtccatcttcgtgctggccgtgggcgtgtactttatcgctggacaggatggcgtgcggcagagcagagcttccgataagcaaaccctgctgcctaacgaccagctgtaccagcctctgaaggacagagaggacgaccagtacagccacctccagggcaatcagctgagaagaaac

SEQ ID NO: 8275 - DNA, 1233 bp, Artificial Sequence
  Synthetic Polynucloetide
atggccttaccagtgaccgccttgctcctgccgctggccttgctgctccacgccgccaggccgcaactccagctgcaagagtctggccctggcctggtcaagcctagcgaaacactgagcctgacctgtaccgtgtctggcggctctatcagctccagcagctatttctggggctggatcagacaacctcctggcaaaggactggaatggatcggctccatctactacagcggcatcacctactacaaccccagcctgaagtccagagtgaccatctccgtggacaccagcaagaaccagttctccctgaagctgagcagcgtgacagccgccgataccgccgtgtattattgtgccagacatgacggcgctgtggccggcctgtttgattattggggacagggcaccctggtcaccgtgtcatctgctggcggaggcggaagtggaggcggaggatctggcggcggaggctctagctacgtgctgacacagcctccatccgtgtctgtggctccaggacagaccgccagaatcacatgcggcggcaacaacctcggcagcaagagcgtgcactggtatcagcagccacctggacaggctccagtggtggtggtgtacgacgacagcgatagacctagcggcatccccgagagattcagcggcagcaattccggcaataccgccacactgaccatcagcagagtggaagctggcgacgaggccgtgtactactgccaagtgtgggacagcagcagcgatcacgtggtgtttggcggcggaacaaagctgacagtgcttacgcgtcagagttttgggttgttggaccctaaattgtgctatctgttggacggaatcctgttcatttacggagtgatcctgaccgcattgttcctgcgggttaagttttccagatccgcagacgcacccgcttaccaacaagggcagaaccaactctacaatgaacttaatttggggcggagggaagagtacgacgttctggacaaaaggaggggacgagatcccgagatgggcggaaagcctcagcgaaggaagaatccgcaagaggggctttataacgaactccagaaagataaaatggcagaagcctatagtgagattgggatgaagggagaaaggaggaggggtaaaggtcacgatgggttgtaccaaggattgagcacagccactaaagatacctatgatgcgctccacatgcaggccctgccgccaaga

SEQ ID NO: 8276 - DNA, 1935 bp, Artificial Sequence
  Synthetic Polynucloetide
atggccttaccagtgaccgccttgctcctgccgctggccttgctgctccacgccgccaggccgagctacgtgctgacacagcctccatccgtgtctgtggctccaggacagaccgccagaatcacatgcggcggcaacaacctcggcagcaagagcgtgcactggtatcagcagccacctggacaggctccagtggtggtggtgtacgacgacagcgatagacctagcggcatccccgagagattcagcggcagcaattccggcaataccgccacactgaccatcagcagagtggaagctggcgacgaggccgtgtactactgccaagtgtgggacagcagcagcgatcacgtggtgtttggcggcggaacaaagctgacagtgcttggcggaggcggaagtggaggcggaggatctggcggcggaggctctcaactccagctgcaagagtctggccctggcctggtcaagcctagcgaaacactgagcctgacctgtaccgtgtctggcggctctatcagctccagcagctatttctggggctggatcagacaacctcctggcaaaggactggaatggatcggctccatctactacagcggcatcacctactacaaccccagcctgaagtccagagtgaccatctccgtggacaccagcaagaaccagttctccctgaagctgagcagcgtgacagccgccgataccgccgtgtattattgtgccagacatgacggcgctgtggccggcctgtttgattattggggacagggcaccctggtcaccgtgtcatctgctacgcgtgggagcggcatccagaaccctgatcctgccgtgtaccagctgcgggatagcaagagcagcgacaagagcgtgtgtctgttcaccgacttcgacagccagaccaacgtgtcccagagcaaggactccgacgtgtacatcaccgataagaccgtgctggacatgcggagcatggacttcaagagcaactccgccgtggcctggtccaacaagtccgatttcgcctgcgccaacgccttcaacaacagcattatccccgaggacacattcttcccaagccccgagagcagctgcgacgtgaagctggtggaaaagagcttcgagacagacaccaacctgaacttccagaacctgagcgtgatcggcttcagaatcctgctgctgaaagtggccggctttaacctgctgatgaccctgcggctgtggtccagccgcgccaagagaagcggatctggcgtgaagcagaccctgaatttcgacctgctgaagctggctggcgacgtggaatccaacccaggcccttctagaggccatatgaccgagtacaagcccacggtgcgcctcgccacccgcgacgacgtccccagggccgtacgcaccctcgccgccgcgttcgccgactaccccgccacgcgccacaccgtcgatccggaccgccacatcgagcgggtcaccgagctgcaagaactcttcctcacgcgcgtcgggctcgacatcggcaaggtgtgggtcgcggacgacggcgccgcggtggcggtctggaccacgccggagagcgtcgaagcgggggcggtgttcgccgagatcggcccgcgcatggccgagttgagcggttcccggctggccgcgcagcaacagatggaaggcctcctggcgccgcaccggcccaaggagcccgcgtggttcctggccaccgtcggcgtctcgcccgaccaccagggcaagggtctgggcagcgccgtcgtgctccccggagtggaggcggccgagcgcgccggggtgcccgccttcctggagacctccgcgccccgcaacctccccttctacgagcggctcggcttcaccgtcaccgccgacgtcgaggtgcccgaaggaccgcgcacctggtgcatgacccgcaagcccggtgcctga

SEQ ID NO: 8277 - DNA, 2031 bp, Artificial Sequence
  Synthetic Polynucloetide
atggccttaccagtgaccgccttgctcctgccgctggccttgctgctccacgccgccaggccgagctacgtgctgacacagcctccatccgtgtctgtggctccaggacagaccgccagaatcacatgcggcggcaacaacctcggcagcaagagcgtgcactggtatcagcagccacctggacaggctccagtggtggtggtgtacgacgacagcgatagacctagcggcatccccgagagattcagcggcagcaattccggcaataccgccacactgaccatcagcagagtggaagctggcgacgaggccgtgtactactgccaagtgtgggacagcagcagcgatcacgtggtgtttggcggcggaacaaagctgacagtgcttggcggaggcggaagtggaggcggaggatctggcggcggaggctctcaactccagctgcaagagtctggccctggcctggtcaagcctagcgaaacactgagcctgacctgtaccgtgtctggcggctctatcagctccagcagctatttctggggctggatcagacaacctcctggcaaaggactggaatggatcggctccatctactacagcggcatcacctactacaaccccagcctgaagtccagagtgaccatctccgtggacaccagcaagaaccagttctccctgaagctgagcagcgtgacagccgccgataccgccgtgtattattgtgccagacatgacggcgctgtggccggcctgtttgattattggggacagggcaccctggtcaccgtgtcatctgctctcgaggacctgaagaacgtgttcccacctgaggtggccgtgttcgagcctagcgaggccgagatcagccacacccagaaagccaccctcgtgtgcctggctaccggcttctaccccgaccatgtggaactgtcttggtgggtcaacggcaaagaggtgcacagcggcgtgtctaccgacccccagccactgaaagaacagcccgccctgaacgacagccggtactgcctgagcagcagactgagagtgtccgccaccttctggcagaacccccggaaccacttcagatgccaggtgcagttctacggcctgagcgagaacgacgagtggacccaggacagagccaagcccgtgacccagatcgtgtctgccgaagcctggggcagagccgattgcggctttaccagcgagagctaccagcagggcgtgctgagcgccaccatcctgtacgagatcctgctgggcaaggccaccctgtacgccgtgctggtgtctgccctggtgctgatggctatggtcaagcggaaggacagccggggaagggccaagcgatctggatctggagcaacaaacttctcactactcaaacaagcaggtgacgtggaggagaatcccgggcctactagaggccatatgaccgagtacaagcccacggtgcgcctcgccacccgcgacgacgtccccagggccgtacgcaccctcgccgccgcgttcgccgactaccccgccacgcgccacaccgtcgatccggaccgccacatcgagcgggtcaccgagctgcaagaactcttcctcacgcgcgtcgggctcgacatcggcaaggtgtgggtcgcggacgacggcgccgcggtggcggtctggaccacgccggagagcgtcgaagcgggggcggtgttcgccgagatcggcccgcgcatggccgagttgagcggttcccggctggccgcgcagcaacagatggaaggcctcctggcgccgcaccggcccaaggagcccgcgtggttcctggccaccgtcggcgtctcgcccgaccaccagggcaagggtctgggcagcgccgtcgtgctccccggagtggaggcggccgagcgcgccggggtgcccgccttcctggagacctccgcgccccgcaacctccccttctacgagcggctcggcttcaccgtcaccgccgacgtcgaggtgcccgaaggaccgcgcacctggtgcatgacccgcaagcccggtgcctga

SEQ ID NO: 8278 - DNA, 2181 bp, Artificial Sequence
  Synthetic Polynucloetide
atggccttaccagtgaccgccttgctcctgccgctggccttgctgctccacgccgccaggccgagctacgtgctgacacagcctccatccgtgtctgtggctccaggacagaccgccagaatcacatgcggcggcaacaacctcggcagcaagagcgtgcactggtatcagcagccacctggacaggctccagtggtggtggtgtacgacgacagcgatagacctagcggcatccccgagagattcagcggcagcaattccggcaataccgccacactgaccatcagcagagtggaagctggcgacgaggccgtgtactactgccaagtgtgggacagcagcagcgatcacgtggtgtttggcggcggaacaaagctgacagtgcttggcggaggcggaagtggaggcggaggatctggcggcggaggctctcaactccagctgcaagagtctggccctggcctggtcaagcctagcgaaacactgagcctgacctgtaccgtgtctggcggctctatcagctccagcagctatttctggggctggatcagacaacctcctggcaaaggactggaatggatcggctccatctactacagcggcatcacctactacaaccccagcctgaagtccagagtgaccatctccgtggacaccagcaagaaccagttctccctgaagctgagcagcgtgacagccgccgataccgccgtgtattattgtgccagacatgacggcgctgtggccggcctgtttgattattggggacagggcaccctggtcaccgtgtcatctgctacgcgtgagcagaaactgatctcggaagaggatctggggagcggcaccccattcccttctctggcccctcccatcatgctgctggtggacggcaagcagcagatggtggtcgtgtgcctggtgctggatgtggccccacctggactggacagccccatctggtttagcgccggcaatggctctgccctggacgcctttacctacggcccaagccctgccaccgatggcacctggacaaatctggcccacctgagcctgcccagcgaggaactggcttcttgggagcctctcgtgtgccacacaggacctggcgctgagggacacagcagatccacccagcctatgcacctgtctggcgaggccagcaccgccagaacctgtcctcaggaacctctgagaggcacccctggcggagcactgtggctgggagtgctgagactgctgctgttcaagctgctgctgtttgacctgctgctgacctgctcctgtctgtgcgatcctgccggccctctgccttctcctgccaccaccacaagactgagagccctgggcagccacagactgcaccctgccacagagacaggcggcagagaggccacaagcagccctagaccccagcccagagacagaagatggggcgataccccccctggcagaaagcctggatctccagtccgcgccaagagaagcggatctggcgtgaagcagaccctgaatttcgacctgctgaagctggctggcgacgtggaatccaacccaggcccttctagatctagaggccatatgaccgagtacaagcccacggtgcgcctcgccacccgcgacgacgtccccagggccgtacgcaccctcgccgccgcgttcgccgactaccccgccacgcgccacaccgtcgatccggaccgccacatcgagcgggtcaccgagctgcaagaactcttcctcacgcgcgtcgggctcgacatcggcaaggtgtgggtcgcggacgacggcgccgcggtggcggtctggaccacgccggagagcgtcgaagcgggggcggtgttcgccgagatcggcccgcgcatggccgagttgagcggttcccggctggccgcgcagcaacagatggaaggcctcctggcgccgcaccggcccaaggagcccgcgtggttcctggccaccgtcggcgtctcgcccgaccaccagggcaagggtctgggcagcgccgtcgtgctccccggagtggaggcggccgagcgcgccggggtgcccgccttcctggagacctccgcgccccgcaacctccccttctacgagcggctcggcttcaccgtcaccgccgacgtcgaggtgcccgaaggaccgcgcacctggtgcatgacccgcaagcccggtgcctga

SEQ ID NO: 8279 - DNA, 1620 bp, Artificial Sequence; identical to SEQ ID NO: 8003
  Synthetic Polynucloetide

SEQ ID NO: 8280 - DNA, 927 bp, Artificial Sequence; identical to SEQ ID NO: 8004
  Synthetic Polynucloetide

SEQ ID NO: 8281 - DNA, 1356 bp, Artificial Sequence; identical to SEQ ID NO: 7453
  Synthetic Polynucloetide

SEQ ID NO: 8282 - DNA, 855 bp, Artificial Sequence; identical to SEQ ID NO: 7454
  Synthetic Polynucloetide

SEQ ID NO: 8283 - DNA, 1674 bp, Artificial Sequence; identical to SEQ ID NO: 8007
  Synthetic Polynucloetide

SEQ ID NO: 8284 - DNA, 984 bp, Artificial Sequence; identical to SEQ ID NO: 8008
  Synthetic Polynucloetide

SEQ ID NO: 8285 - DNA, 1392 bp, Artificial Sequence; identical to SEQ ID NO: 7457
  Synthetic Polynucloetide

SEQ ID NO: 8286 - DNA, 894 bp, Artificial Sequence; identical to SEQ ID NO: 7458
  Synthetic Polynucloetide

SEQ ID NO: 8287 - DNA, 1935 bp, Artificial Sequence
  Synthetic Polynucloetide
atggccttaccagtgaccgccttgctcctgccgctggccttgctgctccacgccgccaggccgagctacgtgctgacacagcctccatccgtgtctgtggctccaggacagaccgccagaatcacatgcggcggcaacaacctcggcagcaagagcgtgcactggtatcagcagccacctggacaggctccagtggtggtggtgtacgacgacagcgatagacctagcggcatccccgagagattcagcggcagcaattccggcaataccgccacactgaccatcagcagagtggaagctggcgacgaggccgtgtactactgccaagtgtgggacagcagcagcgatcacgtggtgtttggcggcggaacaaagctgacagtgcttggcggaggcggaagtggaggcggaggatctggcggcggaggctctcaactccagctgcaagagtctggccctggcctggtcaagcctagcgaaacactgagcctgacctgtaccgtgtctggcggctctatcagctccagcagctatttctggggctggatcagacaacctcctggcaaaggactggaatggatcggctccatctactacagcggcatcacctactacaaccccagcctgaagtccagagtgaccatctccgtggacaccagcaagaaccagttctccctgaagctgagcagcgtgacagccgccgataccgccgtgtattattgtgccagacatgacggcgctgtggccggcctgtttgattattggggacagggcaccctggtcaccgtgtcatctgctacgcgtgggagcggcatccagaaccctgatcctgccgtgtaccagctgcgggatagcaagagcagcgacaagagcgtgtgtctgttcaccgacttcgacagccagaccaacgtgtcccagagcaaggactccgacgtgtacatcaccgataagaccgtgctggacatgcggagcatggacttcaagagcaactccgccgtggcctggtccaacaagtccgatttcgcctgcgccaacgccttcaacaacagcattatccccgaggacacattcttcccaagcagcgacgtgccctgcgacgtgaagctggtggaaaagagcttcgagacagacaccaacctgaacttccagaacctgagcgtgatcggcttcagaatcctgctgctgaaagtggccggctttaacctgctgatgaccctgcggctgtggtccagccgcgccaagagaagcggatctggcgtgaagcagaccctgaatttcgacctgctgaagctggctggcgacgtggaatccaacccaggcccttctagaggccatatgaccgagtacaagcccacggtgcgcctcgccacccgcgacgacgtccccagggccgtacgcaccctcgccgccgcgttcgccgactaccccgccacgcgccacaccgtcgatccggaccgccacatcgagcgggtcaccgagctgcaagaactcttcctcacgcgcgtcgggctcgacatcggcaaggtgtgggtcgcggacgacggcgccgcggtggcggtctggaccacgccggagagcgtcgaagcgggggcggtgttcgccgagatcggcccgcgcatggccgagttgagcggttcccggctggccgcgcagcaacagatggaaggcctcctggcgccgcaccggcccaaggagcccgcgtggttcctggccaccgtcggcgtctcgcccgaccaccagggcaagggtctgggcagcgccgtcgtgctccccggagtggaggcggccgagcgcgccggggtgcccgccttcctggagacctccgcgccccgcaacctccccttctacgagcggctcggcttcaccgtcaccgccgacgtcgaggtgcccgaaggaccgcgcacctggtgcatgacccgcaagcccggtgcctga

SEQ ID NO: 8288 - DNA, 2031 bp, Artificial Sequence
  Synthetic Polynucloetide
atggccttaccagtgaccgccttgctcctgccgctggccttgctgctccacgccgccaggccgagctacgtgctgacacagcctccatccgtgtctgtggctccaggacagaccgccagaatcacatgcggcggcaacaacctcggcagcaagagcgtgcactggtatcagcagccacctggacaggctccagtggtggtggtgtacgacgacagcgatagacctagcggcatccccgagagattcagcggcagcaattccggcaataccgccacactgaccatcagcagagtggaagctggcgacgaggccgtgtactactgccaagtgtgggacagcagcagcgatcacgtggtgtttggcggcggaacaaagctgacagtgcttggcggaggcggaagtggaggcggaggatctggcggcggaggctctcaactccagctgcaagagtctggccctggcctggtcaagcctagcgaaacactgagcctgacctgtaccgtgtctggcggctctatcagctccagcagctatttctggggctggatcagacaacctcctggcaaaggactggaatggatcggctccatctactacagcggcatcacctactacaaccccagcctgaagtccagagtgaccatctccgtggacaccagcaagaaccagttctccctgaagctgagcagcgtgacagccgccgataccgccgtgtattattgtgccagacatgacggcgctgtggccggcctgtttgattattggggacagggcaccctggtcaccgtgtcatctgctctcgaggacctgaagaacgtgttcccacctgaggtggccgtgttcgagcctagcaaggccgagatcgcccacacccagaaagccaccctcgtgtgcctggctaccggcttctaccccgaccatgtggaactgtcttggtgggtcaacggcaaagaggtgcacagcggcgtgtctaccgacccccagccactgaaagaacagcccgccctgaacgacagccggtactgcctgagcagcagactgagagtgtccgccaccttctggcagaacccccggaaccacttcagatgccaggtgcagttctacggcctgagcgagaacgacgagtggacccaggacagagccaagcccgtgacccagatcgtgtctgccgaagcctggggcagagccgattgcggcatcaccagcgccagctaccaccagggcgtgctgagcgccaccatcctgtacgagatcctgctgggcaaggccaccctgtacgccgtgctggtgtctgccctggtgctgatggctatggtcaagcggaaggacagccggggaagggccaagcgatctggatctggagcaacaaacttctcactactcaaacaagcaggtgacgtggaggagaatcccgggcctactagaggccatatgaccgagtacaagcccacggtgcgcctcgccacccgcgacgacgtccccagggccgtacgcaccctcgccgccgcgttcgccgactaccccgccacgcgccacaccgtcgatccggaccgccacatcgagcgggtcaccgagctgcaagaactcttcctcacgcgcgtcgggctcgacatcggcaaggtgtgggtcgcggacgacggcgccgcggtggcggtctggaccacgccggagagcgtcgaagcgggggcggtgttcgccgagatcggcccgcgcatggccgagttgagcggttcccggctggccgcgcagcaacagatggaaggcctcctggcgccgcaccggcccaaggagcccgcgtggttcctggccaccgtcggcgtctcgcccgaccaccagggcaagggtctgggcagcgccgtcgtgctccccggagtggaggcggccgagcgcgccggggtgcccgccttcctggagacctccgcgccccgcaacctccccttctacgagcggctcggcttcaccgtcaccgccgacgtcgaggtgcccgaaggaccgcgcacctggtgcatgacccgcaagcccggtgcctga

SEQ ID NO: 8289 - DNA, 2100 bp, Artificial Sequence
  Synthetic Polynucloetide
atggccttaccagtgaccgccttgctcctgccgctggccttgctgctccacgccgccaggccgagctacgtgctgacacagcctccatccgtgtctgtggctccaggacagaccgccagaatcacatgcggcggcaacaacctcggcagcaagagcgtgcactggtatcagcagccacctggacaggctccagtggtggtggtgtacgacgacagcgatagacctagcggcatccccgagagattcagcggcagcaattccggcaataccgccacactgaccatcagcagagtggaagctggcgacgaggccgtgtactactgccaagtgtgggacagcagcagcgatcacgtggtgtttggcggcggaacaaagctgacagtgcttggcggaggcggaagtggaggcggaggatctggcggcggaggctctcaactccagctgcaagagtctggccctggcctggtcaagcctagcgaaacactgagcctgacctgtaccgtgtctggcggctctatcagctccagcagctatttctggggctggatcagacaacctcctggcaaaggactggaatggatcggctccatctactacagcggcatcacctactacaaccccagcctgaagtccagagtgaccatctccgtggacaccagcaagaaccagttctccctgaagctgagcagcgtgacagccgccgataccgccgtgtattattgtgccagacatgacggcgctgtggccggcctgtttgattattggggacagggcaccctggtcaccgtgtcatctgctacgcgtgggtctggaggcggaggcagcggcggaggcgggagcggcgacggtaacgaggagatgggaggaatcactcaaaccccttacaaagtctcaatttcaggaacaactgttatccttacatgtccccagtatcctggcagcgagatcctttggcagcataacgacaagaatatagggggagatgaagacgataagaatatcggatctgacgaggatcacttgagcctgaaagagttctccgagcttgaacaaagcggatattatgtgtgctatccgcgcgggtcaaagccggaagacgctaacttttacctttatctccgagccagagtgtgcgaaaattgcatggaaatggacgttatgtccgttgctacaatagttatcgtagatatatgcatcacgggtggactgcttctgctggtttattattggtccaagaatagaaaggccaaagctaaacccgtgaccagaggcgctggcgcaggcggaaggcaaaggggacaaaacaaagaacggccaccaccagtgccaaatccagattatgagcctattcggaaaggacagagggacctgtactctggcctgaatcagagaagaatccgcgccaagagaagcggatctggcgtgaagcagaccctgaatttcgacctgctgaagctggctggcgacgtggaatccaacccaggcccttctagaggccatatgaccgagtacaagcccacggtgcgcctcgccacccgcgacgacgtccccagggccgtacgcaccctcgccgccgcgttcgccgactaccccgccacgcgccacaccgtcgatccggaccgccacatcgagcgggtcaccgagctgcaagaactcttcctcacgcgcgtcgggctcgacatcggcaaggtgtgggtcgcggacgacggcgccgcggtggcggtctggaccacgccggagagcgtcgaagcgggggcggtgttcgccgagatcggcccgcgcatggccgagttgagcggttcccggctggccgcgcagcaacagatggaaggcctcctggcgccgcaccggcccaaggagcccgcgtggttcctggccaccgtcggcgtctcgcccgaccaccagggcaagggtctgggcagcgccgtcgtgctccccggagtggaggcggccgagcgcgccggggtgcccgccttcctggagacctccgcgccccgcaacctccccttctacgagcggctcggcttcaccgtcaccgccgacgtcgaggtgcccgaaggaccgcgcacctggtgcatgacccgcaagcccggtgcctga

SEQ ID NO: 8290 - DNA, 1995 bp, Artificial Sequence
  Synthetic Polynucloetide
atggccttaccagtgaccgccttgctcctgccgctggccttgctgctccacgccgccaggccgagctacgtgctgacacagcctccatccgtgtctgtggctccaggacagaccgccagaatcacatgcggcggcaacaacctcggcagcaagagcgtgcactggtatcagcagccacctggacaggctccagtggtggtggtgtacgacgacagcgatagacctagcggcatccccgagagattcagcggcagcaattccggcaataccgccacactgaccatcagcagagtggaagctggcgacgaggccgtgtactactgccaagtgtgggacagcagcagcgatcacgtggtgtttggcggcggaacaaagctgacagtgcttggcggaggcggaagtggaggcggaggatctggcggcggaggctctcaactccagctgcaagagtctggccctggcctggtcaagcctagcgaaacactgagcctgacctgtaccgtgtctggcggctctatcagctccagcagctatttctggggctggatcagacaacctcctggcaaaggactggaatggatcggctccatctactacagcggcatcacctactacaaccccagcctgaagtccagagtgaccatctccgtggacaccagcaagaaccagttctccctgaagctgagcagcgtgacagccgccgataccgccgtgtattattgtgccagacatgacggcgctgtggccggcctgtttgattattggggacagggcaccctggtcaccgtgtcatctgctacgcgtgggtctggaggcggaggcagcggcggaggcgggagcggcttcaagatccccatcgaggaactggaagatcgggtgttcgtgaactgcaacacctctatcacctgggtggaaggcaccgtgggaacactgctgagcgacatcaccagactggacctcggcaagcggattctggaccctcggggcatctacagatgcaacggcaccgacatctacaaggacaaagaaagcaccgtgcaggtccactacagaatgtgccagtcctgcgtggaactggaccctgctacagtggccggcatcatcgtgaccgatgtgatcgctactctgctgctggctctgggagtgttctgcttcgccggacacgaaacaggcagactgtctggcgctgccgatacacaggccctgctgagaaacgaccaagtgtatcagcccctgcgcgacagagatgatgcccagtattctcacctcggcggcaactgggctagaaacaagcgcgccaagagaagcggatctggcgtgaagcagaccctgaatttcgacctgctgaagctggctggcgacgtggaatccaacccaggcccttctagaggccatatgaccgagtacaagcccacggtgcgcctcgccacccgcgacgacgtccccagggccgtacgcaccctcgccgccgcgttcgccgactaccccgccacgcgccacaccgtcgatccggaccgccacatcgagcgggtcaccgagctgcaagaactcttcctcacgcgcgtcgggctcgacatcggcaaggtgtgggtcgcggacgacggcgccgcggtggcggtctggaccacgccggagagcgtcgaagcgggggcggtgttcgccgagatcggcccgcgcatggccgagttgagcggttcccggctggccgcgcagcaacagatggaaggcctcctggcgccgcaccggcccaaggagcccgcgtggttcctggccaccgtcggcgtctcgcccgaccaccagggcaagggtctgggcagcgccgtcgtgctccccggagtggaggcggccgagcgcgccggggtgcccgccttcctggagacctccgcgccccgcaacctccccttctacgagcggctcggcttcaccgtcaccgccgacgtcgaggtgcccgaaggaccgcgcacctggtgcatgacccgcaagcccggtgcctga

SEQ ID NO: 8291 - DNA, 2025 bp, Artificial Sequence
  Synthetic Polynucloetide
atggccttaccagtgaccgccttgctcctgccgctggccttgctgctccacgccgccaggccgagctacgtgctgacacagcctccatccgtgtctgtggctccaggacagaccgccagaatcacatgcggcggcaacaacctcggcagcaagagcgtgcactggtatcagcagccacctggacaggctccagtggtggtggtgtacgacgacagcgatagacctagcggcatccccgagagattcagcggcagcaattccggcaataccgccacactgaccatcagcagagtggaagctggcgacgaggccgtgtactactgccaagtgtgggacagcagcagcgatcacgtggtgtttggcggcggaacaaagctgacagtgcttggcggaggcggaagtggaggcggaggatctggcggcggaggctctcaactccagctgcaagagtctggccctggcctggtcaagcctagcgaaacactgagcctgacctgtaccgtgtctggcggctctatcagctccagcagctatttctggggctggatcagacaacctcctggcaaaggactggaatggatcggctccatctactacagcggcatcacctactacaaccccagcctgaagtccagagtgaccatctccgtggacaccagcaagaaccagttctccctgaagctgagcagcgtgacagccgccgataccgccgtgtattattgtgccagacatgacggcgctgtggccggcctgtttgattattggggacagggcaccctggtcaccgtgtcatctgctacgcgtgggtctggaggcggaggcagcggcggaggcgggagcggccagagcatcaagggcaaccacctggtcaaggtgtacgactaccaagaggacggcagcgtgctgctgacatgtgatgccgaggccaagaacatcacctggtttaaggacggcaagatgatcggcttcctgaccgaggacaagaagaagtggaacctgggcagcaacgctaaggaccccagaggcatgtatcagtgcaagggcagccagaacaagagcaagcccctccaggtgtactaccggatgtgccagaactgcatcgagctgaacgccgctaccatcagcggctttctgttcgccgagatcgtgtccatcttcgtgctggccgtgggcgtgtactttatcgctggacaggatggcgtgcggcagagcagagcttccgataagcaaaccctgctgcctaacgaccagctgtaccagcctctgaaggacagagaggacgaccagtacagccacctccagggcaatcagctgagaagaaaccgcgccaagagaagcggatctggcgtgaagcagaccctgaatttcgacctgctgaagctggctggcgacgtggaatccaacccaggcccttctagaggccatatgaccgagtacaagcccacggtgcgcctcgccacccgcgacgacgtccccagggccgtacgcaccctcgccgccgcgttcgccgactaccccgccacgcgccacaccgtcgatccggaccgccacatcgagcgggtcaccgagctgcaagaactcttcctcacgcgcgtcgggctcgacatcggcaaggtgtgggtcgcggacgacggcgccgcggtggcggtctggaccacgccggagagcgtcgaagcgggggcggtgttcgccgagatcggcccgcgcatggccgagttgagcggttcccggctggccgcgcagcaacagatggaaggcctcctggcgccgcaccggcccaaggagcccgcgtggttcctggccaccgtcggcgtctcgcccgaccaccagggcaagggtctgggcagcgccgtcgtgctccccggagtggaggcggccgagcgcgccggggtgcccgccttcctggagacctccgcgccccgcaacctccccttctacgagcggctcggcttcaccgtcaccgccgacgtcgaggtgcccgaaggaccgcgcacctggtgcatgacccgcaagcccggtgcctga

SEQ ID NO: 8292 - DNA, 1974 bp, Artificial Sequence
  Synthetic Polynucloetide
atggccttaccagtgaccgccttgctcctgccgctggccttgctgctccacgccgccaggccgagctacgtgctgacacagcctccatccgtgtctgtggctccaggacagaccgccagaatcacatgcggcggcaacaacctcggcagcaagagcgtgcactggtatcagcagccacctggacaggctccagtggtggtggtgtacgacgacagcgatagacctagcggcatccccgagagattcagcggcagcaattccggcaataccgccacactgaccatcagcagagtggaagctggcgacgaggccgtgtactactgccaagtgtgggacagcagcagcgatcacgtggtgtttggcggcggaacaaagctgacagtgcttggcggaggcggaagtggaggcggaggatctggcggcggaggctctcaactccagctgcaagagtctggccctggcctggtcaagcctagcgaaacactgagcctgacctgtaccgtgtctggcggctctatcagctccagcagctatttctggggctggatcagacaacctcctggcaaaggactggaatggatcggctccatctactacagcggcatcacctactacaaccccagcctgaagtccagagtgaccatctccgtggacaccagcaagaaccagttctccctgaagctgagcagcgtgacagccgccgataccgccgtgtattattgtgccagacatgacggcgctgtggccggcctgtttgattattggggacagggcaccctggtcaccgtgtcatctgctacgcgtgggtctggaggcggaggcagcggcggaggcgggagcggccagagttttgggttgttggaccctaaattgtgctatctgttggacggaatcctgttcatttacggagtgatcctgaccgcattgttcctgcgggttaagttttccagatccgcagacgcacccgcttaccaacaagggcagaaccaactctacaatgaacttaatttggggcggagggaagagtacgacgttctggacaaaaggaggggacgagatcccgagatgggcggaaagcctcagcgaaggaagaatccgcaagaggggctttataacgaactccagaaagataaaatggcagaagcctatagtgagattgggatgaagggagaaaggaggaggggtaaaggtcacgatgggttgtaccaaggattgagcacagccactaaagatacctatgatgcgctccacatgcaggccctgccgccaagacgcgccaagagaagcggatctggcgtgaagcagaccctgaatttcgacctgctgaagctggctggcgacgtggaatccaacccaggcccttctagaggccatatgaccgagtacaagcccacggtgcgcctcgccacccgcgacgacgtccccagggccgtacgcaccctcgccgccgcgttcgccgactaccccgccacgcgccacaccgtcgatccggaccgccacatcgagcgggtcaccgagctgcaagaactcttcctcacgcgcgtcgggctcgacatcggcaaggtgtgggtcgcggacgacggcgccgcggtggcggtctggaccacgccggagagcgtcgaagcgggggcggtgttcgccgagatcggcccgcgcatggccgagttgagcggttcccggctggccgcgcagcaacagatggaaggcctcctggcgccgcaccggcccaaggagcccgcgtggttcctggccaccgtcggcgtctcgcccgaccaccagggcaagggtctgggcagcgccgtcgtgctccccggagtggaggcggccgagcgcgccggggtgcccgccttcctggagacctccgcgccccgcaacctccccttctacgagcggctcggcttcaccgtcaccgccgacgtcgaggtgcccgaaggaccgcgcacctggtgcatgacccgcaagcccggtgcctga

SEQ ID NO: 8293 - DNA, 2274 bp, Artificial Sequence
  Synthetic Polynucloetide
atggccttaccagtgaccgccttgctcctgccgctggccttgctgctccacgccgccaggccggaagtgcagctggttgaatctggcggaggactggttcagcctggcggatctctgagactgtcttgtgccgccagcggcttcagcttcagcgacttttggatgagctgggtccgacaggcccctggcaaaggacttgaatgggtcgccacaatcagccaggccggcagcgagaaggactacgtggactctgtgaagggcagattcaccatcagccgggacaacgccaagaagtccctgtacctccagatgaacagcctgagagccgaggacaccgccgtgtactattgtgcctctggcgtgtacagcttcgactacagaggccagggcaccctggtcacagtctcttctggtaccggcggaggcggatctggcggcggaggtagcggtggcggaggatctgaattcagctacgtgctgacacagcctccatccgtgtctgtggctccaggacagaccgccagaatcacatgcggcggcaacaacctcggcagcaagagcgtgcactggtatcagcagccacctggacaggctccagtggtggtggtgtacgacgacagcgatagacctagcggcatccccgagagattcagcggcagcaattccggcaataccgccacactgaccatcagcagagtggaagctggcgacgaggccgtgtactactgccaagtgtgggacagcagcagcgatcacgtggtgtttggcggcggaacaaagctgacagtgcttctcgaggacctgaagaacgtgttcccacctgaggtggccgtgttcgagcctagcgaggccgagatcagccacacccagaaagccaccctcgtgtgcctggctaccggcttctaccccgaccatgtggaactgtcttggtgggtcaacggcaaagaggtgcacagcggcgtgtgtaccgacccccagccactgaaagaacagcccgccctgaacgacagccggtactgcctgagcagcagactgagagtgtccgccaccttctggcagaacccccggaaccacttcagatgccaggtgcagttctacggcctgagcgagaacgacgagtggacccaggacagagccaagcccgtgacccagatcgtgtctgccgaagcctggggcagagccgattgcggctttaccagcgagagctaccagcagggcgtgctgagcgccaccatcctgtacgagatcctgctgggcaaggccaccctgtacgccgtgctggtgtctgccctggtgctgatggctatggtcaagcggaaggacagccggggaagggccaagcgatctggatctggagcaacaaacttctcactactcaaacaagcaggtgacgtggaggagaatcccgggcctactagtatggactggatttggcgcatccttttccttgtcggcgctgctaccggcgcgcattccttcgaacaactccagctgcaagagtctggccctggcctggtcaagcctagcgaaacactgagcctgacctgtaccgtgtctggcggctctatcagctccagcagctatttctggggctggatcagacaacctcctggcaaaggactggaatggatcggctccatctactacagcggcatcacctactacaaccccagcctgaagtccagagtgaccatctccgtggacaccagcaagaaccagttctccctgaagctgagcagcgtgacagccgccgataccgccgtgtattattgtgccagacatgacggcgctgtggccggcctgtttgattattggggacagggcaccctggtcaccgtgtcatctgctacgcgtatccagaaccctgatcctgccgtgtaccagctgcgggatagcaagagcagcgacaagagcgtgtgtctgttcaccgacttcgacagccagaccaacgtgtcccagagcaaggactccgacgtgtacatcaccgataagtgcgtgctggacatgcggagcatggacttcaagagcaactccgccgtggcctggtccaacaagtccgatttcgcctgcgccaacgccttcaacaacagcattatccccgaggacacattcttcccaagccccgagagcagctgcgacgtgaagctggtggaaaagagcttcgagacagacaccaacctgaacttccagaacctgagcgtgatcggcttcagaatcctgctgctgaaagtggccggctttaacctgctgatgaccctgcggctgtggtccagc

SEQ ID NO: 8294 - DNA, 2286 bp, Artificial Sequence
  Synthetic Polynucloetide
atggccttaccagtgaccgccttgctcctgccgctggccttgctgctccacgccgccaggccggaagtgcagctggttgaatctggcggaggactggttcagcctggcggatctctgagactgtcttgtgccgccagcggcttcagcttcagcgacttttggatgagctgggtccgacaggcccctggcaaaggacttgaatgggtcgccacaatcagccaggccggcagcgagaaggactacgtggactctgtgaagggcagattcaccatcagccgggacaacgccaagaagtccctgtacctccagatgaacagcctgagagccgaggacaccgccgtgtactattgtgcctctggcgtgtacagcttcgactacagaggccagggcaccctggtcacagtctcttctggtaccggcggaggcggatctggcggcggaggtagcggtggcggaggatctgaattcagctacgtgctgacacagcctccatccgtgtctgtggctccaggacagaccgccagaatcacatgcggcggcaacaacctcggcagcaagagcgtgcactggtatcagcagccacctggacaggctccagtggtggtggtgtacgacgacagcgatagacctagcggcatccccgagagattcagcggcagcaattccggcaataccgccacactgaccatcagcagagtggaagctggcgacgaggccgtgtactactgccaagtgtgggacagcagcagcgatcacgtggtgtttggcggcggaacaaagctgacagtgcttctcgagatccagaaccctgatcctgccgtgtaccagctgcgggatagcaagagcagcgacaagagcgtgtgtctgttcaccgacttcgacagccagaccaacgtgtcccagagcaaggactccgacgtgtacatcaccgataagtgcgtgctggacatgcggagcatggacttcaagagcaactccgccgtggcctggtccaacaagtccgatttcgcctgcgccaacgccttcaacaacagcattatccccgaggacacattcttcccaagccccgagagcagctgcgacgtgaagctggtggaaaagagcttcgagacagacaccaacctgaacttccagaacctgagcgtgatcggcttcagaatcctgctgctgaaagtggccggctttaacctgctgatgaccctgcggctgtggtccagccgcgccaagagaagcggatctggcgtgaagcagaccctgaatttcgacctgctgaagctggctggcgacgtggaatccaacccaggccctactagtatggactggatttggcgcatccttttccttgtcggcgctgctaccggcgcgcattccttcgaacaactccagctgcaagagtctggccctggcctggtcaagcctagcgaaacactgagcctgacctgtaccgtgtctggcggctctatcagctccagcagctatttctggggctggatcagacaacctcctggcaaaggactggaatggatcggctccatctactacagcggcatcacctactacaaccccagcctgaagtccagagtgaccatctccgtggacaccagcaagaaccagttctccctgaagctgagcagcgtgacagccgccgataccgccgtgtattattgtgccagacatgacggcgctgtggccggcctgtttgattattggggacagggcaccctggtcaccgtgtcatctgctacgcgtgaggacctgaagaacgtgttcccacctgaggtggccgtgttcgagcctagcgaggccgagatcagccacacccagaaagccaccctcgtgtgcctggctaccggcttctaccccgaccatgtggaactgtcttggtgggtcaacggcaaagaggtgcacagcggcgtgtgtaccgacccccagccactgaaagaacagcccgccctgaacgacagccggtactgcctgagcagcagactgagagtgtccgccaccttctggcagaacccccggaaccacttcagatgccaggtgcagttctacggcctgagcgagaacgacgagtggacccaggacagagccaagcccgtgacccagatcgtgtctgccgaagcctggggcagagccgattgcggctttaccagcgagagctaccagcagggcgtgctgagcgccaccatcctgtacgagatcctgctgggcaaggccaccctgtacgccgtgctggtgtctgccctggtgctgatggctatggtcaagcggaaggacagccgggga

SEQ ID NO: 8295 - DNA, 2862 bp, Artificial Sequence
  Synthetic Polynucloetide
atggccttaccagtgaccgccttgctcctgccgctggccttgctgctccacgccgccaggccggaagtgcagctggttgaatctggcggaggactggttcagcctggcggatctctgagactgtcttgtgccgccagcggcttcagcttcagcgacttttggatgagctgggtccgacaggcccctggcaaaggacttgaatgggtcgccacaatcagccaggccggcagcgagaaggactacgtggactctgtgaagggcagattcaccatcagccgggacaacgccaagaagtccctgtacctccagatgaacagcctgagagccgaggacaccgccgtgtactattgtgcctctggcgtgtacagcttcgactacagaggccagggcaccctggtcacagtctcttctggtaccggcggaggcggatctggcggcggaggtagcggtggcggaggatctgaattcagctacgtgctgacacagcctccatccgtgtctgtggctccaggacagaccgccagaatcacatgcggcggcaacaacctcggcagcaagagcgtgcactggtatcagcagccacctggacaggctccagtggtggtggtgtacgacgacagcgatagacctagcggcatccccgagagattcagcggcagcaattccggcaataccgccacactgaccatcagcagagtggaagctggcgacgaggccgtgtactactgccaagtgtgggacagcagcagcgatcacgtggtgtttggcggcggaacaaagctgacagtgcttctcgaggacctgaagaacgtgttcccacctgaggtggccgtgttcgagcctagcgaggccgagatcagccacacccagaaagccaccctcgtgtgcctggctaccggcttctaccccgaccatgtggaactgtcttggtgggtcaacggcaaagaggtgcacagcggcgtgtctaccgacccccagccactgaaagaacagcccgccctgaacgacagccggtactgcctgagcagcagactgagagtgtccgccaccttctggcagaacccccggaaccacttcagatgccaggtgcagttctacggcctgagcgagaacgacgagtggacccaggacagagccaagcccgtgacccagatcgtgtctgccgaagcctggggcagagccgattgcggatcccagagcttcggcctgctggaccccaagctgtgctacctgctggatggcatcctgttcatctacggcgtgatcctgaccgccctgttcctgagagtgaagttcagcagaagcgccgacgcccctgcctaccagcagggacagaaccaactgtacaacgagctgaacctgggcagacgggaagagtacgacgtgctggacaagcggagaggcagggaccctgagatgggcggaaagccccagcggagaaagaacccccaggaaggactgtataacgaactccagaaagacaagatggccgaagcctacagcgagatcggcatgaagggcgagcggagaagaggcaagggccacgatggcctgtaccagggcctgagcaccgccaccaaggacacctatgacgccctgcacatgcaggccctgcctccaagaagggccaagcgatctggatctggagcaacaaacttctcactactcaaacaagcaggtgacgtggaggagaatcccgggcctactagtatggactggatttggcgcatccttttccttgtcggcgctgctaccggcgcgcattccttcgaacaactccagctgcaagagtctggccctggcctggtcaagcctagcgaaacactgagcctgacctgtaccgtgtctggcggctctatcagctccagcagctatttctggggctggatcagacaacctcctggcaaaggactggaatggatcggctccatctactacagcggcatcacctactacaaccccagcctgaagtccagagtgaccatctccgtggacaccagcaagaaccagttctccctgaagctgagcagcgtgacagccgccgataccgccgtgtattattgtgccagacatgacggcgctgtggccggcctgtttgattattggggacagggcaccctggtcaccgtgtcatctgctacgcgtatccagaaccctgatcctgccgtgtaccagctgcgggatagcaagagcagcgacaagagcgtgtgtctgttcaccgacttcgacagccagaccaacgtgtcccagagcaaggactccgacgtgtacatcaccgataagaccgtgctggacatgcggagcatggacttcaagagcaactccgccgtggcctggtccaacaagtccgatttcgcctgcgccaacgccttcaacaacagcattatccccgaggacacattcttcccaagccccgagagcagctgcggtacccagagttttgggttgttggaccctaaattgtgctatctgttggacggaatcctgttcatttacggagtgatcctgaccgcattgttcctgcgggttaagttttccagatccgcagacgcacccgcttaccaacaagggcagaaccaactctacaatgaacttaatttggggcggagggaagagtacgacgttctggacaaaaggaggggacgagatcccgagatgggcggaaagcctcagcgaaggaagaatccgcaagaggggctttataacgaactccagaaagataaaatggcagaagcctatagtgagattgggatgaagggagaaaggaggaggggtaaaggtcacgatgggttgtaccaaggattgagcacagccactaaagatacctatgatgcgctccacatgcaggccctgccgccaaga

SEQ ID NO: 8296 - DNA, 2352 bp, Artificial Sequence
  Synthetic Polynucloetide
atggccttaccagtgaccgccttgctcctgccgctggccttgctgctccacgccgccaggccggaagtgcagctggttgaatctggcggaggactggttcagcctggcggatctctgagactgtcttgtgccgccagcggcttcagcttcagcgacttttggatgagctgggtccgacaggcccctggcaaaggacttgaatgggtcgccacaatcagccaggccggcagcgagaaggactacgtggactctgtgaagggcagattcaccatcagccgggacaacgccaagaagtccctgtacctccagatgaacagcctgagagccgaggacaccgccgtgtactattgtgcctctggcgtgtacagcttcgactacagaggccagggcaccctggtcacagtctcttctggtaccggcggaggcggatctggcggcggaggtagcggtggcggaggatctgaattcagctacgtgctgacacagcctccatccgtgtctgtggctccaggacagaccgccagaatcacatgcggcggcaacaacctcggcagcaagagcgtgcactggtatcagcagccacctggacaggctccagtggtggtggtgtacgacgacagcgatagacctagcggcatccccgagagattcagcggcagcaattccggcaataccgccacactgaccatcagcagagtggaagctggcgacgaggccgtgtactactgccaagtgtgggacagcagcagcgatcacgtggtgtttggcggcggaacaaagctgacagtgcttctcgagggacagcctaaggccaatcctaccgtgacactgttccctccaagcagcgaagaactccaggccaacaaggccacacttgtgtgcctgatctccgacttctaccctggggctgtgacagtggcttggaaggccgatggatctcctgtgaaagccggcgtggaaaccaccaagccatccaagcagagcaacaacaaatacgccgccagctcctacctgagcctgacacctgagcagtggaagtcccacagatcctacagctgccaagtgacccacgaaggcagcaccgtggaaaagacagtggcccctacagagtgcagccccatcaagaccgatgtgattacaatggaccccaaggacaactgctccaaggacgccaacgataccctgctgctccagctgaccaacaccagcgcctactacatgtacttgttgctgctgctgaagtccgtggtgtacttcgccatcatcacatgctgcctgctgcggagaaccgccttctgctgcaacggcgagaagtctagggccaagcgatctggatctggagcaacaaacttctcactactcaaacaagcaggtgacgtggaggagaatcccgggcctactagtatggactggatttggcgcatccttttccttgtcggcgctgctaccggcgcgcattccttcgaacaactccagctgcaagagtctggccctggcctggtcaagcctagcgaaacactgagcctgacctgtaccgtgtctggcggctctatcagctccagcagctatttctggggctggatcagacaacctcctggcaaaggactggaatggatcggctccatctactacagcggcatcacctactacaaccccagcctgaagtccagagtgaccatctccgtggacaccagcaagaaccagttctccctgaagctgagcagcgtgacagccgccgataccgccgtgtattattgtgccagacatgacggcgctgtggccggcctgtttgattattggggacagggcaccctggtcaccgtgtcatctgctacgcgtgcctctacaaagggaccctccgtgtttcctctggctcccagcagcaagtctacaagcggaggaacagccgctctgggctgcctggtcaaggattactttcccgagcctgtgaccgtgtcctggaatagcggagcactgacaagcggcgtgcacacctttccagccgtgctgcaaagcagcggcctgtactctctgagcagcgtggtcacagtgcctagctctagcctgggcacccagacctacatctgcaatgtgaaccacaagcctagcaacaccaaggtggacaagagagtggaacccaagagctgtgaagtgaaaaccgactccaccgaccacgtgaagcccaaagagacagagaacaccaagcagcccagcaagagctgccacaagcccaaggccatcgtgcacaccgagaaagtgaacatgatgagcctgaccgtgctgggcctgcggatgctgttcgccaaaaccgtggccgtgaacttcctgctgaccgccaagctgttcttcctc

SEQ ID NO: 8297 - DNA, 2295 bp, Artificial Sequence
  Synthetic Polynucloetide
atggccttaccagtgaccgccttgctcctgccgctggccttgctgctccacgccgccaggccggaagtgcagctggttgaatctggcggaggactggttcagcctggcggatctctgagactgtcttgtgccgccagcggcttcagcttcagcgacttttggatgagctgggtccgacaggcccctggcaaaggacttgaatgggtcgccacaatcagccaggccggcagcgagaaggactacgtggactctgtgaagggcagattcaccatcagccgggacaacgccaagaagtccctgtacctccagatgaacagcctgagagccgaggacaccgccgtgtactattgtgcctctggcgtgtacagcttcgactacagaggccagggcaccctggtcacagtctcttctggtaccggcggaggcggatctggcggcggaggtagcggtggcggaggatctgaattcagctacgtgctgacacagcctccatccgtgtctgtggctccaggacagaccgccagaatcacatgcggcggcaacaacctcggcagcaagagcgtgcactggtatcagcagccacctggacaggctccagtggtggtggtgtacgacgacagcgatagacctagcggcatccccgagagattcagcggcagcaattccggcaataccgccacactgaccatcagcagagtggaagctggcgacgaggccgtgtactactgccaagtgtgggacagcagcagcgatcacgtggtgtttggcggcggaacaaagctgacagtgcttctcgagggacagcctaaggccaatcctaccgtgacactgttccctccaagcagcgaagaactccaggccaacaaggccacacttgtgtgcctgatctccgacttctaccctggggctgtgacagtggcttggaaggccgatggatctcctgtgaaagccggcgtggaaaccaccaagccatccaagcagagcaacaacaaatacgccgccagctcctacctgagcctgacacctgagcagtggaagtcccacagatcctacagctgccaagtgacccacgaaggcagcaccgtggaaaagacagtggcccctacagagtgcagcggcagagccgattgcggctttaccagcgagagctaccagcagggcgtgctgagcgccaccatcctgtacgagatcctgctgggcaaggccaccctgtacgccgtgctggtgtctgccctggtgctgatggctatggtcaagcggaaggacagccggggacgcgccaagagaagcggatctggcgtgaagcagaccctgaatttcgacctgctgaagctggctggcgacgtggaatccaacccaggccctactagtatggactggatttggcgcatccttttccttgtcggcgctgctaccggcgcgcattccttcgaacaactccagctgcaagagtctggccctggcctggtcaagcctagcgaaacactgagcctgacctgtaccgtgtctggcggctctatcagctccagcagctatttctggggctggatcagacaacctcctggcaaaggactggaatggatcggctccatctactacagcggcatcacctactacaaccccagcctgaagtccagagtgaccatctccgtggacaccagcaagaaccagttctccctgaagctgagcagcgtgacagccgccgataccgccgtgtattattgtgccagacatgacggcgctgtggccggcctgtttgattattggggacagggcaccctggtcaccgtgtcatctgctacgcgtgcctctacaaagggaccctccgtgtttcctctggctcccagcagcaagtctacaagcggaggaacagccgctctgggctgcctggtcaaggattactttcccgagcctgtgaccgtgtcctggaatagcggagcactgacaagcggcgtgcacacctttccagccgtgctgcaaagcagcggcctgtactctctgagcagcgtggtcacagtgcctagctctagcctgggcacccagacctacatctgcaatgtgaaccacaagcctagcaacaccaaggtggacaagagagtggaacccaagagctgtatccccgaggacacattcttcccaagccccgagagcagctgcgacgtgaagctggtggaaaagagcttcgagacagacaccaacctgaacttccagaacctgagcgtgatcggcttcagaatcctgctgctgaaagtggccggctttaacctgctgatgaccctgcggctgtggtccagc

SEQ ID NO: 8298 - DNA, 2697 bp, Artificial Sequence
  Synthetic Polynucloetide
atggccttaccagtgaccgccttgctcctgccgctggccttgctgctccacgccgccaggccggaagtgcagctggttgaatctggcggaggactggttcagcctggcggatctctgagactgtcttgtgccgccagcggcttcagcttcagcgacttttggatgagctgggtccgacaggcccctggcaaaggacttgaatgggtcgccacaatcagccaggccggcagcgagaaggactacgtggactctgtgaagggcagattcaccatcagccgggacaacgccaagaagtccctgtacctccagatgaacagcctgagagccgaggacaccgccgtgtactattgtgcctctggcgtgtacagcttcgactacagaggccagggcaccctggtcacagtctcttctggtaccggcggaggcggatctggcggcggaggtagcggtggcggaggatctgaattcagctacgtgctgacacagcctccatccgtgtctgtggctccaggacagaccgccagaatcacatgcggcggcaacaacctcggcagcaagagcgtgcactggtatcagcagccacctggacaggctccagtggtggtggtgtacgacgacagcgatagacctagcggcatccccgagagattcagcggcagcaattccggcaataccgccacactgaccatcagcagagtggaagctggcgacgaggccgtgtactactgccaagtgtgggacagcagcagcgatcacgtggtgtttggcggcggaacaaagctgacagtgcttctcgagatccagaaccctgatcctgccgtgtaccagctgcgggatagcaagagcagcgacaagagcgtgtgtctgttcaccgacttcgacagccagaccaacgtgtcccagagcaaggactccgacgtgtacatcaccgataagtgcgtgctggacatgcggagcatggacttcaagagcaactccgccgtggcctggtccaacaagtccgatttcgcctgcgccaacgccttcaacaacagcattatccccgaggacacattcttcccaagccccgagagcagctgcgacgtgaagctggtggaaaagagcttcgagacagacaccaacctgaacttccagaacctgagcgtgatcggcttcagaatcctgctgctgaaagtggccggctttaacctgctgatgaccctgcggctgtggtccagccgcgccaagagaagcggatctggcgtgaagcagaccctgaatttcgacctgctgaagctggctggcgacgtggaatccaacccaggccctactagtatggactggatttggcgcatccttttccttgtcggcgctgctaccggcgcgcattccgggccccagctccagctgcaagagtctggacctggcctggtcaagcctagcgagacactgagcctgacctgtaccgtgtccggcgatagcatcagcagcggcgattactactggggctggatcagacagcctcctggcaaaggactggaatggatcggccacatctactacagcggcgtgacctactacaaccccagcctgaagtccagagtgaccatcagcgtggacaccagccggaaccagttctccctgaagctgtctagcgtgacagccgccgataccgccgtgtactactgcaccagagaggacagcagcaactggcggagtagaggccagggaacactggtcacagttagctctggatccggcggaggcggaagtggaggcggaggatctggcggcggaggctctttcgaacaactccagctgcaagagtctggccctggcctggtcaagcctagcgaaacactgagcctgacctgtaccgtgtctggcggctctatcagctccagcagctatttctggggctggatcagacaacctcctggcaaaggactggaatggatcggctccatctactacagcggcatcacctactacaaccccagcctgaagtccagagtgaccatctccgtggacaccagcaagaaccagttctccctgaagctgagcagcgtgacagccgccgataccgccgtgtattattgtgccagacatgacggcgctgtggccggcctgtttgattattggggacagggcaccctggtcaccgtgtcatctgctacgcgtgaggacctgaagaacgtgttcccacctgaggtggccgtgttcgagcctagcgaggccgagatcagccacacccagaaagccaccctcgtgtgcctggctaccggcttctaccccgaccatgtggaactgtcttggtgggtcaacggcaaagaggtgcacagcggcgtgtgtaccgacccccagccactgaaagaacagcccgccctgaacgacagccggtactgcctgagcagcagactgagagtgtccgccaccttctggcagaacccccggaaccacttcagatgccaggtgcagttctacggcctgagcgagaacgacgagtggacccaggacagagccaagcccgtgacccagatcgtgtctgccgaagcctggggcagagccgattgcggctttaccagcgagagctaccagcagggcgtgctgagcgccaccatcctgtacgagatcctgctgggcaaggccaccctgtacgccgtgctggtgtctgccctggtgctgatggctatggtcaagcggaaggacagccgggga

SEQ ID NO: 8299 - DNA, 3273 bp, Artificial Sequence
  Synthetic Polynucloetide
atggccttaccagtgaccgccttgctcctgccgctggccttgctgctccacgccgccaggccggaagtgcagctggttgaatctggcggaggactggttcagcctggcggatctctgagactgtcttgtgccgccagcggcttcagcttcagcgacttttggatgagctgggtccgacaggcccctggcaaaggacttgaatgggtcgccacaatcagccaggccggcagcgagaaggactacgtggactctgtgaagggcagattcaccatcagccgggacaacgccaagaagtccctgtacctccagatgaacagcctgagagccgaggacaccgccgtgtactattgtgcctctggcgtgtacagcttcgactacagaggccagggcaccctggtcacagtctcttctggtaccggcggaggcggatctggcggcggaggtagcggtggcggaggatctgaattcagctacgtgctgacacagcctccatccgtgtctgtggctccaggacagaccgccagaatcacatgcggcggcaacaacctcggcagcaagagcgtgcactggtatcagcagccacctggacaggctccagtggtggtggtgtacgacgacagcgatagacctagcggcatccccgagagattcagcggcagcaattccggcaataccgccacactgaccatcagcagagtggaagctggcgacgaggccgtgtactactgccaagtgtgggacagcagcagcgatcacgtggtgtttggcggcggaacaaagctgacagtgcttctcgaggacctgaagaacgtgttcccacctgaggtggccgtgttcgagcctagcgaggccgagatcagccacacccagaaagccaccctcgtgtgcctggctaccggcttctaccccgaccatgtggaactgtcttggtgggtcaacggcaaagaggtgcacagcggcgtgtctaccgacccccagccactgaaagaacagcccgccctgaacgacagccggtactgcctgagcagcagactgagagtgtccgccaccttctggcagaacccccggaaccacttcagatgccaggtgcagttctacggcctgagcgagaacgacgagtggacccaggacagagccaagcccgtgacccagatcgtgtctgccgaagcctggggcagagccgattgcggatcccagagcttcggcctgctggaccccaagctgtgctacctgctggatggcatcctgttcatctacggcgtgatcctgaccgccctgttcctgagagtgaagttcagcagaagcgccgacgcccctgcctaccagcagggacagaaccaactgtacaacgagctgaacctgggcagacgggaagagtacgacgtgctggacaagcggagaggcagggaccctgagatgggcggaaagccccagcggagaaagaacccccaggaaggactgtataacgaactccagaaagacaagatggccgaagcctacagcgagatcggcatgaagggcgagcggagaagaggcaagggccacgatggcctgtaccagggcctgagcaccgccaccaaggacacctatgacgccctgcacatgcaggccctgcctccaagaagggccaagcgatctggatctggagcaacaaacttctcactactcaaacaagcaggtgacgtggaggagaatcccgggcctactagtatggactggatttggcgcatccttttccttgtcggcgctgctaccggcgcgcattccgggccccagctccagctgcaagagtctggacctggcctggtcaagcctagcgagacactgagcctgacctgtaccgtgtccggcgatagcatcagcagcggcgattactactggggctggatcagacagcctcctggcaaaggactggaatggatcggccacatctactacagcggcgtgacctactacaaccccagcctgaagtccagagtgaccatcagcgtggacaccagccggaaccagttctccctgaagctgtctagcgtgacagccgccgataccgccgtgtactactgcaccagagaggacagcagcaactggcggagtagaggccagggaacactggtcacagttagctctggatccggcggaggcggaagtggaggcggaggatctggcggcggaggctctttcgaacaactccagctgcaagagtctggccctggcctggtcaagcctagcgaaacactgagcctgacctgtaccgtgtctggcggctctatcagctccagcagctatttctggggctggatcagacaacctcctggcaaaggactggaatggatcggctccatctactacagcggcatcacctactacaaccccagcctgaagtccagagtgaccatctccgtggacaccagcaagaaccagttctccctgaagctgagcagcgtgacagccgccgataccgccgtgtattattgtgccagacatgacggcgctgtggccggcctgtttgattattggggacagggcaccctggtcaccgtgtcatctgctacgcgtatccagaaccctgatcctgccgtgtaccagctgcgggatagcaagagcagcgacaagagcgtgtgtctgttcaccgacttcgacagccagaccaacgtgtcccagagcaaggactccgacgtgtacatcaccgataagaccgtgctggacatgcggagcatggacttcaagagcaactccgccgtggcctggtccaacaagtccgatttcgcctgcgccaacgccttcaacaacagcattatccccgaggacacattcttcccaagccccgagagcagctgcggtacccagagttttgggttgttggaccctaaattgtgctatctgttggacggaatcctgttcatttacggagtgatcctgaccgcattgttcctgcgggttaagttttccagatccgcagacgcacccgcttaccaacaagggcagaaccaactctacaatgaacttaatttggggcggagggaagagtacgacgttctggacaaaaggaggggacgagatcccgagatgggcggaaagcctcagcgaaggaagaatccgcaagaggggctttataacgaactccagaaagataaaatggcagaagcctatagtgagattgggatgaagggagaaaggaggaggggtaaaggtcacgatgggttgtaccaaggattgagcacagccactaaagatacctatgatgcgctccacatgcaggccctgccgccaaga

SEQ ID NO: 8300 - DNA, 2763 bp, Artificial Sequence
  Synthetic Polynucloetide
atggccttaccagtgaccgccttgctcctgccgctggccttgctgctccacgccgccaggccggaagtgcagctggttgaatctggcggaggactggttcagcctggcggatctctgagactgtcttgtgccgccagcggcttcagcttcagcgacttttggatgagctgggtccgacaggcccctggcaaaggacttgaatgggtcgccacaatcagccaggccggcagcgagaaggactacgtggactctgtgaagggcagattcaccatcagccgggacaacgccaagaagtccctgtacctccagatgaacagcctgagagccgaggacaccgccgtgtactattgtgcctctggcgtgtacagcttcgactacagaggccagggcaccctggtcacagtctcttctggtaccggcggaggcggatctggcggcggaggtagcggtggcggaggatctgaattcagctacgtgctgacacagcctccatccgtgtctgtggctccaggacagaccgccagaatcacatgcggcggcaacaacctcggcagcaagagcgtgcactggtatcagcagccacctggacaggctccagtggtggtggtgtacgacgacagcgatagacctagcggcatccccgagagattcagcggcagcaattccggcaataccgccacactgaccatcagcagagtggaagctggcgacgaggccgtgtactactgccaagtgtgggacagcagcagcgatcacgtggtgtttggcggcggaacaaagctgacagtgcttctcgagggacagcctaaggccaatcctaccgtgacactgttccctccaagcagcgaagaactccaggccaacaaggccacacttgtgtgcctgatctccgacttctaccctggggctgtgacagtggcttggaaggccgatggatctcctgtgaaagccggcgtggaaaccaccaagccatccaagcagagcaacaacaaatacgccgccagctcctacctgagcctgacacctgagcagtggaagtcccacagatcctacagctgccaagtgacccacgaaggcagcaccgtggaaaagacagtggcccctacagagtgcagccccatcaagaccgatgtgattacaatggaccccaaggacaactgctccaaggacgccaacgataccctgctgctccagctgaccaacaccagcgcctactacatgtacttgttgctgctgctgaagtccgtggtgtacttcgccatcatcacatgctgcctgctgcggagaaccgccttctgctgcaacggcgagaagtctagggccaagcgatctggatctggagcaacaaacttctcactactcaaacaagcaggtgacgtggaggagaatcccgggcctactagtatggactggatttggcgcatccttttccttgtcggcgctgctaccggcgcgcattccgggccccagctccagctgcaagagtctggacctggcctggtcaagcctagcgagacactgagcctgacctgtaccgtgtccggcgatagcatcagcagcggcgattactactggggctggatcagacagcctcctggcaaaggactggaatggatcggccacatctactacagcggcgtgacctactacaaccccagcctgaagtccagagtgaccatcagcgtggacaccagccggaaccagttctccctgaagctgtctagcgtgacagccgccgataccgccgtgtactactgcaccagagaggacagcagcaactggcggagtagaggccagggaacactggtcacagttagctctggatccggcggaggcggaagtggaggcggaggatctggcggcggaggctctttcgaacaactccagctgcaagagtctggccctggcctggtcaagcctagcgaaacactgagcctgacctgtaccgtgtctggcggctctatcagctccagcagctatttctggggctggatcagacaacctcctggcaaaggactggaatggatcggctccatctactacagcggcatcacctactacaaccccagcctgaagtccagagtgaccatctccgtggacaccagcaagaaccagttctccctgaagctgagcagcgtgacagccgccgataccgccgtgtattattgtgccagacatgacggcgctgtggccggcctgtttgattattggggacagggcaccctggtcaccgtgtcatctgctacgcgtgcctctacaaagggaccctccgtgtttcctctggctcccagcagcaagtctacaagcggaggaacagccgctctgggctgcctggtcaaggattactttcccgagcctgtgaccgtgtcctggaatagcggagcactgacaagcggcgtgcacacctttccagccgtgctgcaaagcagcggcctgtactctctgagcagcgtggtcacagtgcctagctctagcctgggcacccagacctacatctgcaatgtgaaccacaagcctagcaacaccaaggtggacaagagagtggaacccaagagctgtgaagtgaaaaccgactccaccgaccacgtgaagcccaaagagacagagaacaccaagcagcccagcaagagctgccacaagcccaaggccatcgtgcacaccgagaaagtgaacatgatgagcctgaccgtgctgggcctgcggatgctgttcgccaaaaccgtggccgtgaacttcctgctgaccgccaagctgttcttcctc

SEQ ID NO: 8301 - DNA, 2706 bp, Artificial Sequence
  Synthetic Polynucloetide
atggccttaccagtgaccgccttgctcctgccgctggccttgctgctccacgccgccaggccggaagtgcagctggttgaatctggcggaggactggttcagcctggcggatctctgagactgtcttgtgccgccagcggcttcagcttcagcgacttttggatgagctgggtccgacaggcccctggcaaaggacttgaatgggtcgccacaatcagccaggccggcagcgagaaggactacgtggactctgtgaagggcagattcaccatcagccgggacaacgccaagaagtccctgtacctccagatgaacagcctgagagccgaggacaccgccgtgtactattgtgcctctggcgtgtacagcttcgactacagaggccagggcaccctggtcacagtctcttctggtaccggcggaggcggatctggcggcggaggtagcggtggcggaggatctgaattcagctacgtgctgacacagcctccatccgtgtctgtggctccaggacagaccgccagaatcacatgcggcggcaacaacctcggcagcaagagcgtgcactggtatcagcagccacctggacaggctccagtggtggtggtgtacgacgacagcgatagacctagcggcatccccgagagattcagcggcagcaattccggcaataccgccacactgaccatcagcagagtggaagctggcgacgaggccgtgtactactgccaagtgtgggacagcagcagcgatcacgtggtgtttggcggcggaacaaagctgacagtgcttctcgagggacagcctaaggccaatcctaccgtgacactgttccctccaagcagcgaagaactccaggccaacaaggccacacttgtgtgcctgatctccgacttctaccctggggctgtgacagtggcttggaaggccgatggatctcctgtgaaagccggcgtggaaaccaccaagccatccaagcagagcaacaacaaatacgccgccagctcctacctgagcctgacacctgagcagtggaagtcccacagatcctacagctgccaagtgacccacgaaggcagcaccgtggaaaagacagtggcccctacagagtgcagcggcagagccgattgcggctttaccagcgagagctaccagcagggcgtgctgagcgccaccatcctgtacgagatcctgctgggcaaggccaccctgtacgccgtgctggtgtctgccctggtgctgatggctatggtcaagcggaaggacagccggggacgcgccaagagaagcggatctggcgtgaagcagaccctgaatttcgacctgctgaagctggctggcgacgtggaatccaacccaggccctactagtatggactggatttggcgcatccttttccttgtcggcgctgctaccggcgcgcattccgggccccagctccagctgcaagagtctggacctggcctggtcaagcctagcgagacactgagcctgacctgtaccgtgtccggcgatagcatcagcagcggcgattactactggggctggatcagacagcctcctggcaaaggactggaatggatcggccacatctactacagcggcgtgacctactacaaccccagcctgaagtccagagtgaccatcagcgtggacaccagccggaaccagttctccctgaagctgtctagcgtgacagccgccgataccgccgtgtactactgcaccagagaggacagcagcaactggcggagtagaggccagggaacactggtcacagttagctctggatccggcggaggcggaagtggaggcggaggatctggcggcggaggctctttcgaacaactccagctgcaagagtctggccctggcctggtcaagcctagcgaaacactgagcctgacctgtaccgtgtctggcggctctatcagctccagcagctatttctggggctggatcagacaacctcctggcaaaggactggaatggatcggctccatctactacagcggcatcacctactacaaccccagcctgaagtccagagtgaccatctccgtggacaccagcaagaaccagttctccctgaagctgagcagcgtgacagccgccgataccgccgtgtattattgtgccagacatgacggcgctgtggccggcctgtttgattattggggacagggcaccctggtcaccgtgtcatctgctacgcgtgcctctacaaagggaccctccgtgtttcctctggctcccagcagcaagtctacaagcggaggaacagccgctctgggctgcctggtcaaggattactttcccgagcctgtgaccgtgtcctggaatagcggagcactgacaagcggcgtgcacacctttccagccgtgctgcaaagcagcggcctgtactctctgagcagcgtggtcacagtgcctagctctagcctgggcacccagacctacatctgcaatgtgaaccacaagcctagcaacaccaaggtggacaagagagtggaacccaagagctgtatccccgaggacacattcttcccaagccccgagagcagctgcgacgtgaagctggtggaaaagagcttcgagacagacaccaacctgaacttccagaacctgagcgtgatcggcttcagaatcctgctgctgaaagtggccggctttaacctgctgatgaccctgcggctgtggtccagc

SEQ ID NO: 8302 - DNA, 2277 bp, Artificial Sequence
  Synthetic Polynucloetide
atggccttaccagtgaccgccttgctcctgccgctggccttgctgctccacgccgccaggccggaagtgcaggttttggagtctggcggaggactggttcagcctggcggatctctgagactgtcttgtgccgccagcggcttcaccttcagcaactttgccatgagctgggtccgacaggcccctggcaaaggacttgaatgggtgtccacaatcagcggcagcgccggcacaacagattacgccgattctgtgaagggcagattcaccatcagccgggacaacagcaagaaaaccctgtacctccagatgaacagcctgcgcgtggaagataccgccgtgtactactgtgccgatggcagaggccccttcttcgattatcgcggccagggcacactggtcaccgtttcttctggtaccggcggaggcggatctggcggcggaggtagcggtggcggaggatctgaattcagctacgtgctgacacagcctccatccgtgtctgtggctccaggacagaccgccagaatcacatgcggcggcaacaacctcggcagcaagagcgtgcactggtatcagcagccacctggacaggctccagtggtggtggtgtacgacgacagcgatagacctagcggcatccccgagagattcagcggcagcaattccggcaataccgccacactgaccatcagcagagtggaagctggcgacgaggccgtgtactactgccaagtgtgggacagcagcagcgatcacgtggtgtttggcggcggaacaaagctgacagtgcttctcgaggacctgaagaacgtgttcccacctgaggtggccgtgttcgagcctagcgaggccgagatcagccacacccagaaagccaccctcgtgtgcctggctaccggcttctaccccgaccatgtggaactgtcttggtgggtcaacggcaaagaggtgcacagcggcgtgtgtaccgacccccagccactgaaagaacagcccgccctgaacgacagccggtactgcctgagcagcagactgagagtgtccgccaccttctggcagaacccccggaaccacttcagatgccaggtgcagttctacggcctgagcgagaacgacgagtggacccaggacagagccaagcccgtgacccagatcgtgtctgccgaagcctggggcagagccgattgcggctttaccagcgagagctaccagcagggcgtgctgagcgccaccatcctgtacgagatcctgctgggcaaggccaccctgtacgccgtgctggtgtctgccctggtgctgatggctatggtcaagcggaaggacagccggggaagggccaagcgatctggatctggagcaacaaacttctcactactcaaacaagcaggtgacgtggaggagaatcccgggcctactagtatggactggatttggcgcatccttttccttgtcggcgctgctaccggcgcgcattccttcgaacaactccagctgcaagagtctggccctggcctggtcaagcctagcgaaacactgagcctgacctgtaccgtgtctggcggctctatcagctccagcagctatttctggggctggatcagacaacctcctggcaaaggactggaatggatcggctccatctactacagcggcatcacctactacaaccccagcctgaagtccagagtgaccatctccgtggacaccagcaagaaccagttctccctgaagctgagcagcgtgacagccgccgataccgccgtgtattattgtgccagacatgacggcgctgtggccggcctgtttgattattggggacagggcaccctggtcaccgtgtcatctgctacgcgtatccagaaccctgatcctgccgtgtaccagctgcgggatagcaagagcagcgacaagagcgtgtgtctgttcaccgacttcgacagccagaccaacgtgtcccagagcaaggactccgacgtgtacatcaccgataagtgcgtgctggacatgcggagcatggacttcaagagcaactccgccgtggcctggtccaacaagtccgatttcgcctgcgccaacgccttcaacaacagcattatccccgaggacacattcttcccaagccccgagagcagctgcgacgtgaagctggtggaaaagagcttcgagacagacaccaacctgaacttccagaacctgagcgtgatcggcttcagaatcctgctgctgaaagtggccggctttaacctgctgatgaccctgcggctgtggtccagc

SEQ ID NO: 8303 - DNA, 2280 bp, Artificial Sequence
  Synthetic Polynucloetide
atggccttaccagtgaccgccttgctcctgccgctggccttgctgctccacgccgccaggccgagctacgtgctgacacagcctccatccgtgtctgtggctccaggacagaccgccagaatcacatgcggcggcaacaacctcggcagcaagagcgtgcactggtatcagcagccacctggacaggctccagtggtggtggtgtacgacgacagcgatagacctagcggcatccccgagagattcagcggcagcaattccggcaataccgccacactgaccatcagcagagtggaagctggcgacgaggccgtgtactactgccaagtgtgggacagcagcagcgatcacgtggtgtttggcggcggaacaaagctgacagtgcttctcgaggacctgaagaacgtgttcccacctgaggtggccgtgttcgagcctagcgaggccgagatcagccacacccagaaagccaccctcgtgtgcctggctaccggcttctaccccgaccatgtggaactgtcttggtgggtcaacggcaaagaggtgcacagcggcgtgtgtaccgacccccagccactgaaagaacagcccgccctgaacgacagccggtactgcctgagcagcagactgagagtgtccgccaccttctggcagaacccccggaaccacttcagatgccaggtgcagttctacggcctgagcgagaacgacgagtggacccaggacagagccaagcccgtgacccagatcgtgtctgccgaagcctggggcagagccgattgcggctttaccagcgagagctaccagcagggcgtgctgagcgccaccatcctgtacgagatcctgctgggcaaggccaccctgtacgccgtgctggtgtctgccctggtgctgatggctatggtcaagcggaaggacagccggggaagggccaagcgatctggatctggagcaacaaacttctcactactcaaacaagcaggtgacgtggaggagaatcccgggcctactagtatggactggatttggcgcatccttttccttgtcggcgctgctaccggcgcccattccgggcccgaagtgcagctggttgaatctggcggaggactggttcaggctggcggatctctgagactgtcttgtgccgccagcggcagaacctttagcatgggctggtttagacaggcccctggcaaagagagagagttcgtcgccgccatcacatactctggcggcagcccttactacgccgactctgtgaagggcagattcaccatcagccgggacaacgccaagaacaccgtgtacctccagatgaacagcctgaagcctgaggacaccgccgtgtactactgcgccgccaatccaacatacggcagcgactggaacgccgagaattggggccagggaacccaagtgacagtgtctagcggatccggcggcggaggatctggcggaggcggatctgggggcggaggctctttcgaacaactccagctgcaagagtctggccctggcctggtcaagcctagcgaaacactgagcctgacctgtaccgtgtctggcggctctatcagctccagcagctatttctggggctggatcagacaacctcctggcaaaggactggaatggatcggctccatctactacagcggcatcacctactacaaccccagcctgaagtccagagtgaccatctccgtggacaccagcaagaaccagttctccctgaagctgagcagcgtgacagccgccgataccgccgtgtattattgtgccagacatgacggcgctgtggccggcctgtttgattattggggacagggcaccctggtcaccgtgtcatctgctacgcgtatccagaaccctgatcctgccgtgtaccagctgcgggatagcaagagcagcgacaagagcgtgtgtctgttcaccgacttcgacagccagaccaacgtgtcccagagcaaggactccgacgtgtacatcaccgataagtgcgtgctggacatgcggagcatggacttcaagagcaactccgccgtggcctggtccaacaagtccgatttcgcctgcgccaacgccttcaacaacagcattatccccgaggacacattcttcccaagccccgagagcagctgcgacgtgaagctggtggaaaagagcttcgagacagacaccaacctgaacttccagaacctgagcgtgatcggcttcagaatcctgctgctgaaagtggccggctttaacctgctgatgaccctgcggctgtggtccagc

SEQ ID NO: 8304 - DNA, 2661 bp, Artificial Sequence
  Synthetic Polynucloetide
atggccttaccagtgaccgccttgctcctgccgctggccttgctgctccacgccgccaggccgagctacgtgctgacacagcctccatccgtgtctgtggctccaggacagaccgccagaatcacatgcggcggcaacaacctcggcagcaagagcgtgcactggtatcagcagccacctggacaggctccagtggtggtggtgtacgacgacagcgatagacctagcggcatccccgagagattcagcggcagcaattccggcaataccgccacactgaccatcagcagagtggaagctggcgacgaggccgtgtactactgccaagtgtgggacagcagcagcgatcacgtggtgtttggcggcggaacaaagctgacagtgcttctcgaggacctgaagaacgtgttcccacctgaggtggccgtgttcgagcctagcgaggccgagatcagccacacccagaaagccaccctcgtgtgcctggctaccggcttctaccccgaccatgtggaactgtcttggtgggtcaacggcaaagaggtgcacagcggcgtgtgtaccgacccccagccactgaaagaacagcccgccctgaacgacagccggtactgcctgagcagcagactgagagtgtccgccaccttctggcagaacccccggaaccacttcagatgccaggtgcagttctacggcctgagcgagaacgacgagtggacccaggacagagccaagcccgtgacccagatcgtgtctgccgaagcctggggcagagccgattgcggctttaccagcgagagctaccagcagggcgtgctgagcgccaccatcctgtacgagatcctgctgggcaaggccaccctgtacgccgtgctggtgtctgccctggtgctgatggctatggtcaagcggaaggacagccggggaagggccaagcgatctggatctggagcaacaaacttctcactactcaaacaagcaggtgacgtggaggagaatcccgggcctactagtatggactggatttggcgcatccttttccttgtcggcgctgctaccggcgcccattcccaactgcaactgcaagagtctggccctggcctggtcaagccttctgaaaccctgagcctgacctgtaccgtgtccggcggctctatcagcagcggcgattactactggggctggatcagacagcctccaggcaagggactcgaatggatcggcagcatcagctacagcggctccacctactacaacccaagcctgaagtccagagtgaccatcagcgtggacaccagcagaaaccagttctccctgaagctgagcagcgtgacagccgccgatacagccgtgtattattgcaccagagaggacagcagcaactggcggagtagaggacagggcacactggtcacagtgtcctcttctggaggcggtggaagcggtggaggaggatctgaagtgcagctggttgaatctggcggaggactggttcaggctggcggatctctgagactgtcttgtgccgccagcggcagaacctttagcatgggctggtttagacaggcccctggcaaagagagagagttcgtcgccgccatcacatactctggcggcagcccttactacgccgactctgtgaagggcagattcaccatcagccgggacaacgccaagaacaccgtgtacctccagatgaacagcctgaagcctgaggacaccgccgtgtactactgcgccgccaatccaacatacggcagcgactggaacgccgagaattggggccagggaacccaagtgacagtgtctagcggatccggcggcggaggatctggcggaggcggatctgggggcggaggctctttcgaacaactccagctgcaagagtctggccctggcctggtcaagcctagcgaaacactgagcctgacctgtaccgtgtctggcggctctatcagctccagcagctatttctggggctggatcagacaacctcctggcaaaggactggaatggatcggctccatctactacagcggcatcacctactacaaccccagcctgaagtccagagtgaccatctccgtggacaccagcaagaaccagttctccctgaagctgagcagcgtgacagccgccgataccgccgtgtattattgtgccagacatgacggcgctgtggccggcctgtttgattattggggacagggcaccctggtcaccgtgtcatctgctacgcgtatccagaaccctgatcctgccgtgtaccagctgcgggatagcaagagcagcgacaagagcgtgtgtctgttcaccgacttcgacagccagaccaacgtgtcccagagcaaggactccgacgtgtacatcaccgataagtgcgtgctggacatgcggagcatggacttcaagagcaactccgccgtggcctggtccaacaagtccgatttcgcctgcgccaacgccttcaacaacagcattatccccgaggacacattcttcccaagccccgagagcagctgcgacgtgaagctggtggaaaagagcttcgagacagacaccaacctgaacttccagaacctgagcgtgatcggcttcagaatcctgctgctgaaagtggccggctttaacctgctgatgaccctgcggctgtggtccagc

SEQ ID NO: 8305 - DNA, 2688 bp, Artificial Sequence
  Synthetic Polynucloetide
atggccttaccagtgaccgccttgctcctgccgctggccttgctgctccacgccgccaggccggaagtgcaggttttggagtctggcggaggactggttcagcctggcggatctctgagactgtcttgtgccgccagcggcttcaccttcagcaactttgccatgagctgggtccgacaggcccctggcaaaggacttgaatgggtgtccacaatcagcggcagcgccggcacaacagattacgccgattctgtgaagggcagattcaccatcagccgggacaacagcaagaaaaccctgtacctccagatgaacagcctgcgcgtggaagataccgccgtgtactactgtgccgatggcagaggccccttcttcgattatcgcggccagggcacactggtcaccgtttcttctggtaccggcggaggcggatctggcggcggaggtagcggtggcggaggatctgaattcagctacgtgctgacacagcctccatccgtgtctgtggctccaggacagaccgccagaatcacatgcggcggcaacaacctcggcagcaagagcgtgcactggtatcagcagccacctggacaggctccagtggtggtggtgtacgacgacagcgatagacctagcggcatccccgagagattcagcggcagcaattccggcaataccgccacactgaccatcagcagagtggaagctggcgacgaggccgtgtactactgccaagtgtgggacagcagcagcgatcacgtggtgtttggcggcggaacaaagctgacagtgcttctcgaggacctgaagaacgtgttcccacctgaggtggccgtgttcgagcctagcgaggccgagatcagccacacccagaaagccaccctcgtgtgcctggctaccggcttctaccccgaccatgtggaactgtcttggtgggtcaacggcaaagaggtgcacagcggcgtgtgtaccgacccccagccactgaaagaacagcccgccctgaacgacagccggtactgcctgagcagcagactgagagtgtccgccaccttctggcagaacccccggaaccacttcagatgccaggtgcagttctacggcctgagcgagaacgacgagtggacccaggacagagccaagcccgtgacccagatcgtgtctgccgaagcctggggcagagccgattgcggctttaccagcgagagctaccagcagggcgtgctgagcgccaccatcctgtacgagatcctgctgggcaaggccaccctgtacgccgtgctggtgtctgccctggtgctgatggctatggtcaagcggaaggacagccggggaagggccaagcgatctggatctggagcaacaaacttctcactactcaaacaagcaggtgacgtggaggagaatcccgggcctactagtatggactggatttggcgcatccttttccttgtcggcgctgctaccggcgcccattccgggcccgaagtgcagctggttgaatctggcggaggactggttcaggctggcggatctctgagactgtcttgtgccgccagcggcagaacctttagcatgggctggtttagacaggcccctggcaaagagagagagttcgtcgccgccatcacatacagcggcggcagcccttactacgcctcttctgtcagaggccggttcaccatcagccgggacaacgccaagaacaccgtgtacctccagatgaacagcctgaagccagaggacaccgccgtgtactactgtgccgccaatccaacctacggcagcgactggaatgccgagaattggggccagggcacccaagtgacagtgtctagtggatccggcggcggaggatctggcggaggcggatctgggggcggaggctctttcgaacaactccagctgcaagagtctggccctggcctggtcaagcctagcgaaacactgagcctgacctgtaccgtgtctggcggctctatcagctccagcagctatttctggggctggatcagacaacctcctggcaaaggactggaatggatcggctccatctactacagcggcatcacctactacaaccccagcctgaagtccagagtgaccatctccgtggacaccagcaagaaccagttctccctgaagctgagcagcgtgacagccgccgataccgccgtgtattattgtgccagacatgacggcgctgtggccggcctgtttgattattggggacagggcaccctggtcaccgtgtcatctgctacgcgtatccagaaccctgatcctgccgtgtaccagctgcgggatagcaagagcagcgacaagagcgtgtgtctgttcaccgacttcgacagccagaccaacgtgtcccagagcaaggactccgacgtgtacatcaccgataagtgcgtgctggacatgcggagcatggacttcaagagcaactccgccgtggcctggtccaacaagtccgatttcgcctgcgccaacgccttcaacaacagcattatccccgaggacacattcttcccaagccccgagagcagctgcgacgtgaagctggtggaaaagagcttcgagacagacaccaacctgaacttccagaacctgagcgtgatcggcttcagaatcctgctgctgaaagtggccggctttaacctgctgatgaccctgcggctgtggtccagc

SEQ ID NO: 8306 - DNA, 2184 bp, Artificial Sequence
  Synthetic Polynucloetide
atggccttaccagtgaccgccttgctcctgccgctggccttgctgctccacgccgccaggccgagctacgtgctgacacagcctccatccgtgtctgtggctccaggacagaccgccagaatcacatgcggcggcaacaacatcggcggcaagagcgtgcactggtatcagcagccacctggacaggctccagtggtggtggtgtacgacgacagcgatagacctagcggcatccccgagagattcagcggcagcaattccggcaataccgccacactgaccatcagcagagtggaagctggcgacgaggccgtgtactactgccaagtgtgggacagcagcagcgatcacgtggtgtttggcggcggaacaaagctgacagtgcttggcggaggcggaagtggaggcggaggatctggcggcggaggctctcaactccagctgcaagagtctggccctggcctggtcaagcctagcgaaacactgagcctgacctgtaccgtgtctggcggctctatcagctccagcagctatttctggggctggatcagacaacctcctggcaaaggactggaatggatcggctccatctactacagcggcatcacctactacaaccccagcctgaagtccagagtgaccatctccgtggacaccagcaagaaccagttctccctgaagctgagcagcgtgacagccgccgataccgccgtgtattattgtgccagacatgacggcgctgtggccggcctgtttgattattggggacagggcaccctggtcaccgtgtcatctgctacgcgtgagcagaaactgatctcggaagaggatctggcgaagcccaccacgacgccagcgccgcgaccaccaacaccggcgcccaccatcgcgtcgcagcccctgtccctgcgcccagaggcgtgccggccagcggcggggggcgcagtgcacacgagggggctggacttcgcctgtgacatctacatctgggcgcccttggccgggacttgtggggtccttctcctgtcactggttatcaccctttactgcaaacggggcagaaagaaactcctgtatatattcaaacaaccatttatgagaccagtacaaactactcaagaggaagatggctgtagctgccgatttccagaagaagaagaaggaggatgtgaactgagagtgaagttcagcaggagcgcagacgcccccgcgtaccagcagggccagaaccagctctataacgagctgaatctaggacgaagagaggagtacgatgttttggacaagagacgtggccgggaccctgagatggggggaaagccgagaaggaagaaccctcaggaaggcctgtacaatgaactgcagaaagataagatggcggaggcctacagtgagattgggatgaaaggcgagcgccggaggggcaaggggcacgatggcctttaccagggtctcagtacagccaccaaggacacctacgacgcccttcacatgcaggccctgccccctcgctctagtggctccggcgagggcagaggaagtctactaacctgcggagatgtggaagaaaatcctggcccacatatgaccgagtacaagcccacggtgcgcctcgccacccgcgacgacgtccccagggccgtacgcaccctcgccgccgcgttcgccgactaccccgccacgcgccacaccgtcgatccggaccgccacatcgagcgggtcaccgagctgcaagaactcttcctcacgcgcgtcgggctcgacatcggcaaggtgtgggtcgcggacgacggcgccgcggtggcggtctggaccacgccggagagcgtcgaagcgggggcggtgttcgccgagatcggcccgcgcatggccgagttgagcggttcccggctggccgcgcagcaacagatggaaggcctcctggcgccgcaccggcccaaggagcccgcgtggttcctggccaccgtcggcgtctcgcccgaccaccagggcaagggtctgggcagcgccgtcgtgctccccggagtggaggcggccgagcgcgccggggtgcccgccttcctggagacctccgcgccccgcaacctccccttctacgagcggctcggcttcaccgtcaccgccgacgtcgaggtgcccgaaggaccgcgcacctggtgcatgacccgcaagcccggtgcctga

SEQ ID NO: 8307 - DNA, 2166 bp, Artificial Sequence
  Synthetic Polynucloetide
atggccttaccagtgaccgccttgctcctgccgctggccttgctgctccacgccgccaggccgagctacgtgctgacacagcctccatccgtgtctgtggctccaggacagaccgccagaatcacatgcggcggcaacaacatcggcggcaagagcgtgcactggtatcagcagccacctggacaggctccagtggtggtggtgtacgacgacagcgatagacctagcggcatccccgagagattcagcggcagcaattccggcaataccgccacactgaccatcagcagagtggaagctggcgacgaggccgtgtactactgccaagtgtgggacagcagcagcgatcacgtggtgtttggcggcggaacaaagctgacagtgcttggcggaggcggaagtggaggcggaggatctggcggcggaggctctcaactccagctgcaagagtctggccctggcctggtcaagcctagcgaaacactgagcctgacctgtaccgtgtctggcggctctatcagctccagcagctatttctggggctggatcagacaacctcctggcaaaggactggaatggatcggctccatctactacagcggcatcacctactacaaccccagcctgaagtccagagtgaccatctccgtggacaccagcaagaaccagttctccctgaagctgagcagcgtgacagccgccgataccgccgtgtattattgtgccagacatgacggcgctgtggccggcctgtttgattattggggacagggcaccctggtcaccgtgtcatctgctacgcgtgagcagaaactgatctcggaagaggatctgaaaattgaagttatgtatcctcctccttacctagacaatgagaagagcaatggaaccattatccatgtgaaagggaaacacctttgtccaagtcccctatttcccggaccttctaagcccttttgggtgctggtggtggttgggggagtcctggcttgctatagcttgctagtaacagtggcctttattattttctgggtgaggagtaagaggagcaggctcctgcacagtgactacatgaacatgactccacgccgccccggacccacccgcaagcattaccagccctatgccccaccacgcgacttcgcagcctatcgctccagagtgaagttcagcaggagcgcagacgcccccgcgtaccagcagggccagaaccagctctataacgagctcaatctaggacgaagagaggagtacgatgttttggacaagagacgtggccgggaccctgagatggggggaaagccgagaaggaagaaccctcaggaaggcctgtacaatgaactgcagaaagataagatggcggaggcctacagtgagattgggatgaaaggcgagcgccggaggggcaaggggcacgatggcctttaccagggtctcagtacagccaccaaggacacctacgacgcccttcacatgcaggccctgccccctcgctctagtggctccggcgagggcagaggaagtctactaacctgcggagatgtggaagaaaatcctggcccacatatgaccgagtacaagcccacggtgcgcctcgccacccgcgacgacgtccccagggccgtacgcaccctcgccgccgcgttcgccgactaccccgccacgcgccacaccgtcgatccggaccgccacatcgagcgggtcaccgagctgcaagaactcttcctcacgcgcgtcgggctcgacatcggcaaggtgtgggtcgcggacgacggcgccgcggtggcggtctggaccacgccggagagcgtcgaagcgggggcggtgttcgccgagatcggcccgcgcatggccgagttgagcggttcccggctggccgcgcagcaacagatggaaggcctcctggcgccgcaccggcccaaggagcccgcgtggttcctggccaccgtcggcgtctcgcccgaccaccagggcaagggtctgggcagcgccgtcgtgctccccggagtggaggcggccgagcgcgccggggtgcccgccttcctggagacctccgcgccccgcaacctccccttctacgagcggctcggcttcaccgtcaccgccgacgtcgaggtgcccgaaggaccgcgcacctggtgcatgacccgcaagcccggtgcctga

SEQ ID NO: 8308 - DNA, 1494 bp, Artificial Sequence
  Synthetic Polynucloetide
atggccttaccagtgaccgccttgctcctgccgctggccttgctgctccacgccgccaggccgagctacgtgctgacacagcctccatccgtgtctgtggctccaggacagaccgccagaatcacatgcggcggcaacaacatcggcggcaagagcgtgcactggtatcagcagccacctggacaggctccagtggtggtggtgtacgacgacagcgatagacctagcggcatccccgagagattcagcggcagcaattccggcaataccgccacactgaccatcagcagagtggaagctggcgacgaggccgtgtactactgccaagtgtgggacagcagcagcgatcacgtggtgtttggcggcggaacaaagctgacagtgcttggcggaggcggaagtggaggcggaggatctggcggcggaggctctcaactccagctgcaagagtctggccctggcctggtcaagcctagcgaaacactgagcctgacctgtaccgtgtctggcggctctatcagctccagcagctatttctggggctggatcagacaacctcctggcaaaggactggaatggatcggctccatctactacagcggcatcacctactacaaccccagcctgaagtccagagtgaccatctccgtggacaccagcaagaaccagttctccctgaagctgagcagcgtgacagccgccgataccgccgtgtattattgtgccagacatgacggcgctgtggccggcctgtttgattattggggacagggcaccctggtcaccgtgtcatctgctacgcgtgagcagaaactgatctcggaagaggatctgaaaattgaagttatgtatcctcctccttacctagacaatgagaagagcaatggaaccattatccatgtgaaagggaaacacctttgtccaagtcccctatttcccggaccttctaagcccttttgggtgctggtggtggttgggggagtcctggcttgctatagcttgctagtaacagtggcctttattattttctgggtgaggagtaagaggagcaggctcctgcacagtgactacatgaacatgactccacgccgccccggacccacccgcaagcattaccagccctatgccccaccacgcgacttcgcagcctatcgctccagagtgaagttcagcaggagcgcagacgcccccgcgtaccagcagggccagaaccagctctataacgagctcaatctaggacgaagagaggagtacgatgttttggacaagagacgtggccgggaccctgagatggggggaaagccgagaaggaagaaccctcaggaaggcctgtacaatgaactgcagaaagataagatggcggaggcctacagtgagattgggatgaaaggcgagcgccggaggggcaaggggcacgatggcctttaccagggtctcagtacagccaccaaggacacctacgacgcccttcacatgcaggccctgccccctcgc

SEQ ID NO: 8309 - DNA, 1515 bp, Artificial Sequence
  Synthetic Polynucloetide
atggccttaccagtgaccgccttgctcctgccgctggccttgctgctccacgccgccaggccgagctacgtgctgacacagcctccatccgtgtctgtggctccaggacagaccgccagaatcacatgcggcggcaacaacatcggcggcaagagcgtgcactggtatcagcagccacctggacaggctccagtggtggtggtgtacgacgacagcgatagacctagcggcatccccgagagattcagcggcagcaattccggcaataccgccacactgaccatcagcagagtggaagctggcgacgaggccgtgtactactgccaagtgtgggacagcagcagcgatcacgtggtgtttggcggcggaacaaagctgacagtgcttggcggaggcggaagtggaggcggaggatctggcggcggaggctctcaactccagctgcaagagtctggccctggcctggtcaagcctagcgaaacactgagcctgacctgtaccgtgtctggcggctctatcagctccagcagctatttctggggctggatcagacaacctcctggcaaaggactggaatggatcggctccatctactacagcggcatcacctactacaaccccagcctgaagtccagagtgaccatctccgtggacaccagcaagaaccagttctccctgaagctgagcagcgtgacagccgccgataccgccgtgtattattgtgccagacatgacggcgctgtggccggcctgtttgattattggggacagggcaccctggtcaccgtgtcatctgctacgcgtgagcagaaactgatctcggaagaggatctggcgaagcccaccacgacgccagcgccgcgaccaccaacaccggcgcccaccatcgcgtcgcagcccctgtccctgcgcccagaggcgtgccggccagcggcggggggcgcagtgcacacgagggggctggacttcgcctgtgacatctacatctgggcgcccttggccgggacttgtggggtccttctcctgtcactggttatcaccctttactgcaaacggggcagaaagaaactcctgtatatattcaaacaaccatttatgagaccagtacaaactactcaagaggaagatggctgtagctgccgatttccagaagaagaagaaggaggatgtgaactgagagtgaagttcagcaggagcgcagacgcccccgcgtaccagcagggccagaaccagctctataacgagctgaatctaggacgaagagaggagtacgatgttttggacaagagacgtggccgggaccctgagatggggggaaagccgagaaggaagaaccctcaggaaggcctgtacaatgaactgcagaaagataagatggcggaggcctacagtgagattgggatgaaaggcgagcgccggaggggcaaggggcacgatggcctttaccagggtctcagtacagccaccaaggacacctacgacgcccttcacatgcaggccctgccccctcgctga

SEQ ID NO: 8310 - DNA, 1515 bp, Artificial Sequence
  Synthetic Polynucloetide
atggccttaccagtgaccgccttgctcctgccgctggccttgctgctccacgccgccaggccgcaactccagctgcaagagtctggccctggcctggtcaagcctagcgaaacactgagcctgacctgtaccgtgtctggcggctctatcagctccagcagctatttctggggctggatcagacaacctcctggcaaaggactggaatggatcggctccatctactacagcggcatcacctactacaaccccagcctgaagtccagagtgaccatctccgtggacaccagcaagaaccagttctccctgaagctgagcagcgtgacagccgccgataccgccgtgtattattgtgccagacatgacggcgctgtggccggcctgtttgattattggggacagggcaccctggtcaccgtgtcatctgctggcggaggcggaagtggaggcggaggatctggcggcggaggctctagctacgtgctgacacagcctccatccgtgtctgtggctccaggacagaccgccagaatcacatgcggcggcaacaacatcggcggcaagagcgtgcactggtatcagcagccacctggacaggctccagtggtggtggtgtacgacgacagcgatagacctagcggcatccccgagagattcagcggcagcaattccggcaataccgccacactgaccatcagcagagtggaagctggcgacgaggccgtgtactactgccaagtgtgggacagcagcagcgatcacgtggtgtttggcggcggaacaaagctgacagtgcttacgcgtgagcagaaactgatctcggaagaggatctggcgaagcccaccacgacgccagcgccgcgaccaccaacaccggcgcccaccatcgcgtcgcagcccctgtccctgcgcccagaggcgtgccggccagcggcggggggcgcagtgcacacgagggggctggacttcgcctgtgacatctacatctgggcgcccttggccgggacttgtggggtccttctcctgtcactggttatcaccctttactgcaaacggggcagaaagaaactcctgtatatattcaaacaaccatttatgagaccagtacaaactactcaagaggaagatggctgtagctgccgatttccagaagaagaagaaggaggatgtgaactgagagtgaagttcagcaggagcgcagacgcccccgcgtaccagcagggccagaaccagctctataacgagctgaatctaggacgaagagaggagtacgatgttttggacaagagacgtggccgggaccctgagatggggggaaagccgagaaggaagaaccctcaggaaggcctgtacaatgaactgcagaaagataagatggcggaggcctacagtgagattgggatgaaaggcgagcgccggaggggcaaggggcacgatggcctttaccagggtctcagtacagccaccaaggacacctacgacgcccttcacatgcaggccctgccccctcgctga

SEQ ID NO: 8311 - DNA, 2754 bp, Artificial Sequence
  Synthetic Polynucloetide
atggccttaccagtgaccgccttgctcctgccgctggccttgctgctccacgccgccaggccgagctacgtgctgacacagcctccatccgtgtctgtggctccaggacagaccgccagaatcacatgcggcggcaacaacatcggcggcaagagcgtgcactggtatcagcagccacctggacaggctccagtggtggtggtgtacgacgacagcgatagacctagcggcatccccgagagattcagcggcagcaattccggcaataccgccacactgaccatcagcagagtggaagctggcgacgaggccgtgtactactgccaagtgtgggacagcagcagcgatcacgtggtgtttggcggcggaacaaagctgacagtgcttggcggaggcggaagtggaggcggaggatctggcggcggaggctctcaactccagctgcaagagtctggccctggcctggtcaagcctagcgaaacactgagcctgacctgtaccgtgtctggcggctctatcagctccagcagctatttctggggctggatcagacaacctcctggcaaaggactggaatggatcggctccatctactacagcggcatcacctactacaaccccagcctgaagtccagagtgaccatctccgtggacaccagcaagaaccagttctccctgaagctgagcagcgtgacagccgccgataccgccgtgtattattgtgccagacatgacggcgctgtggccggcctgtttgattattggggacagggcaccctggtcaccgtgtcatctgctacgcgtgagcagaaactgatctcggaagaggatctggcgaagcccaccacgacgccagcgccgcgaccaccaacaccggcgcccaccatcgcgtcgcagcccctgtccctgcgcccagaggcgtgccggccagcggcggggggcgcagtgcacacgagggggctggacttcgcctgtgacatctacatctgggcgcccttggccgggacttgtggggtccttctcctgtcactggttatcaccctttactgcgggcgcgccagagtgaagttcagcaggagcgcagacgcccccgcgtaccagcagggccagaaccagctctataacgagctgaatctaggacgaagagaggagtacgatgttttggacaagagacgtggccgggaccctgagatggggggaaagccgagaaggaagaaccctcaggaaggcctgtacaatgaactgcagaaagataagatggcggaggcctacagtgagattgggatgaaaggcgagcgccggaggggcaaggggcacgatggcctttaccagggtctcagtacagccaccaaggacacctacgacgcccttcacatgcaggccctgccccctcgctctagaggatctggagcaacaaacttctcactactcaaacaagcaggtgacgtggaggagaatcccgggcctgggatccacatggccacttacgaggttctctgtgaggtggcgcggaaactgggcacggatgacagggaagtggtattgttcctcctaaacgtgttcatacctcaacccacactggcccaattaattggagctcttagagctttaaaggaggagggcaggttaacgtttcccctgttagcggaatgtctgtttcgtgcaggtcgcagagacctcttgcgcgacctgcttcacttagacccgcgttttttagagcgccacctagcgggcacaatgagttatttcagcccttatcagctcactgttctccacgtagacggggagctgtgtgcgagggatattaggtctttgatatttttaagcaaggacactatagggtctcgcagcacaccacagacattcttacactgggtgtactgtatggaaaacttagacctactgggtcccactgacgtggatgccctaatgtcaatgcttagatctttgtcaagagtagacctacagcgccaagtgcaaaccctaatgggccttcacctttccggcccatcacactcccaacactatcgccatacaccactcgagaccgatttctacgactacaaggacgacgatgacaagactagtggctccggcgagggcagaggaagtctactaacctgcggagatgtggaagaaaatcctggcccacatatgaccgagtacaagcccacggtgcgcctcgccacccgcgacgacgtccccagggccgtacgcaccctcgccgccgcgttcgccgactaccccgccacgcgccacaccgtcgatccggaccgccacatcgagcgggtcaccgagctgcaagaactcttcctcacgcgcgtcgggctcgacatcggcaaggtgtgggtcgcggacgacggcgccgcggtggcggtctggaccacgccggagagcgtcgaagcgggggcggtgttcgccgagatcggcccgcgcatggccgagttgagcggttcccggctggccgcgcagcaacagatggaaggcctcctggcgccgcaccggcccaaggagcccgcgtggttcctggccaccgtcggcgtctcgcccgaccaccagggcaagggtctgggcagcgccgtcgtgctccccggagtggaggcggccgagcgcgccggggtgcccgccttcctggagacctccgcgccccgcaacctccccttctacgagcggctcggcttcaccgtcaccgccgacgtcgaggtgcccgaaggaccgcgcacctggtgcatgacccgcaagcccggtgcctga

SEQ ID NO: 8312 - DNA, 2574 bp, Artificial Sequence
  Synthetic Polynucloetide
atggccttaccagtgaccgccttgctcctgccgctggccttgctgctccacgccgccaggccgagctacgtgctgacacagcctccatccgtgtctgtggctccaggacagaccgccagaatcacatgcggcggcaacaacatcggcggcaagagcgtgcactggtatcagcagccacctggacaggctccagtggtggtggtgtacgacgacagcgatagacctagcggcatccccgagagattcagcggcagcaattccggcaataccgccacactgaccatcagcagagtggaagctggcgacgaggccgtgtactactgccaagtgtgggacagcagcagcgatcacgtggtgtttggcggcggaacaaagctgacagtgcttctcgagatccagaaccctgatcctgccgtgtaccagctgcgggatagcaagagcagcgacaagagcgtgtgtctgttcaccgacttcgacagccagaccaacgtgtcccagagcaaggactccgacgtgtacatcaccgataagtgcgtgctggacatgcggagcatggacttcaagagcaactccgccgtggcctggtccaacaagtccgatttcgcctgcgccaacgccttcaacaacagcattatccccgaggacacattcttcccaagcagcgacgtgccctgcgacgtgaagctggtggaaaagagcttcgagacagacaccaacctgaacttccagaacctgagcgtgatcggcttcagaatcctgctgctgaaagtggccggctttaacctgctgatgaccctgcggctgtggtccagccgcgccaagagaagcggatctggcgtgaagcagaccctgaatttcgacctgctgaagctggctggcgacgtggaatccaacccaggccctactagtatggactggatttggcgcatccttttccttgtcggcgctgctaccggcgcgcattccttcgaacaactccagctgcaagagtctggccctggcctggtcaagcctagcgaaacactgagcctgacctgtaccgtgtctggcggctctatcagctccagcagctatttctggggctggatcagacaacctcctggcaaaggactggaatggatcggctccatctactacagcggcatcacctactacaaccccagcctgaagtccagagtgaccatctccgtggacaccagcaagaaccagttctccctgaagctgagcagcgtgacagccgccgataccgccgtgtattattgtgccagacatgacggcgctgtggccggcctgtttgattattggggacagggcaccctggtcaccgtgtcatctgctacgcgtgaggacctgaagaacgtgttcccacctgaggtggccgtgttcgagcctagcaaggccgagatcgcccacacccagaaagccaccctcgtgtgcctggctaccggcttctaccccgaccatgtggaactgtcttggtgggtcaacggcaaagaggtgcacagcggcgtgtgtaccgacccccagccactgaaagaacagcccgccctgaacgacagccggtactgcctgagcagcagactgagagtgtccgccaccttctggcagaacccccggaaccacttcagatgccaggtgcagttctacggcctgagcgagaacgacgagtggacccaggacagagccaagcccgtgacccagatcgtgtctgccgaagcctggggcagagccgattgcggcatcaccagcgccagctaccaccagggcgtgctgagcgccaccatcctgtacgagatcctgctgggcaaggccaccctgtacgccgtgctggtgtctgccctggtgctgatggctatggtcaagcggaaggacagccggggaagggccaagcgatctggatctggagcaacaaacttctcactactcaaacaagcaggtgacgtggaggagaatcccgggccttctagaggccatatgaccgagtacaagcccacggtgcgcctcgccacccgcgacgacgtccccagggccgtacgcaccctcgccgccgcgttcgccgactaccccgccacgcgccacaccgtcgatccggaccgccacatcgagcgggtcaccgagctgcaagaactcttcctcacgcgcgtcgggctcgacatcggcaaggtgtgggtcgcggacgacggcgccgcggtggcggtctggaccacgccggagagcgtcgaagcgggggcggtgttcgccgagatcggcccgcgcatggccgagttgagcggttcccggctggccgcgcagcaacagatggaaggcctcctggcgccgcaccggcccaaggagcccgcgtggttcctggccaccgtcggcgtctcgcccgaccaccagggcaagggtctgggcagcgccgtcgtgctccccggagtggaggcggccgagcgcgccggggtgcccgccttcctggagacctccgcgccccgcaacctccccttctacgagcggctcggcttcaccgtcaccgccgacgtcgaggtgcccgaaggaccgcgcacctggtgcatgacccgcaagcccggtgcctga

SEQ ID NO: 8313 - DNA, 2571 bp, Artificial Sequence
  Synthetic Polynucloetide
atggccttaccagtgaccgccttgctcctgccgctggccttgctgctccacgccgccaggccgagctacgtgctgacacagcctccatccgtgtctgtggctccaggacagaccgccagaatcacatgcggcggcaacaacatcggcggcaagagcgtgcactggtatcagcagccacctggacaggctccagtggtggtggtgtacgacgacagcgatagacctagcggcatccccgagagattcagcggcagcaattccggcaataccgccacactgaccatcagcagagtggaagctggcgacgaggccgtgtactactgccaagtgtgggacagcagcagcgatcacgtggtgtttggcggcggaacaaagctgacagtgcttctcgaggacctgaagaacgtgttcccacctgaggtggccgtgttcgagcctagcaaggccgagatcgcccacacccagaaagccaccctcgtgtgcctggctaccggcttctaccccgaccatgtggaactgtcttggtgggtcaacggcaaagaggtgcacagcggcgtgtgtaccgacccccagccactgaaagaacagcccgccctgaacgacagccggtactgcctgagcagcagactgagagtgtccgccaccttctggcagaacccccggaaccacttcagatgccaggtgcagttctacggcctgagcgagaacgacgagtggacccaggacagagccaagcccgtgacccagatcgtgtctgccgaagcctggggcagagccgattgcggcatcaccagcgccagctaccaccagggcgtgctgagcgccaccatcctgtacgagatcctgctgggcaaggccaccctgtacgccgtgctggtgtctgccctggtgctgatggctatggtcaagcggaaggacagccggggaagggccaagcgatctggatctggagcaacaaacttctcactactcaaacaagcaggtgacgtggaggagaatcccgggcctactagtatggactggatttggcgcatccttttccttgtcggcgctgctaccggcgcgcattccttcgaacaactccagctgcaagagtctggccctggcctggtcaagcctagcgaaacactgagcctgacctgtaccgtgtctggcggctctatcagctccagcagctatttctggggctggatcagacaacctcctggcaaaggactggaatggatcggctccatctactacagcggcatcacctactacaaccccagcctgaagtccagagtgaccatctccgtggacaccagcaagaaccagttctccctgaagctgagcagcgtgacagccgccgataccgccgtgtattattgtgccagacatgacggcgctgtggccggcctgtttgattattggggacagggcaccctggtcaccgtgtcatctgctacgcgtatccagaaccctgatcctgccgtgtaccagctgcgggatagcaagagcagcgacaagagcgtgtgtctgttcaccgacttcgacagccagaccaacgtgtcccagagcaaggactccgacgtgtacatcaccgataagtgcgtgctggacatgcggagcatggacttcaagagcaactccgccgtggcctggtccaacaagtccgatttcgcctgcgccaacgccttcaacaacagcattatccccgaggacacattcttcccaagcagcgacgtgccctgcgacgtgaagctggtggaaaagagcttcgagacagacaccaacctgaacttccagaacctgagcgtgatcggcttcagaatcctgctgctgaaagtggccggctttaacctgctgatgaccctgcggctgtggtccagccgcgccaagagaagcggatctggcgtgaagcagaccctgaatttcgacctgctgaagctggctggcgacgtggaatccaacccaggcccttctagaggccatatgaccgagtacaagcccacggtgcgcctcgccacccgcgacgacgtccccagggccgtacgcaccctcgccgccgcgttcgccgactaccccgccacgcgccacaccgtcgatccggaccgccacatcgagcgggtcaccgagctgcaagaactcttcctcacgcgcgtcgggctcgacatcggcaaggtgtgggtcgcggacgacggcgccgcggtggcggtctggaccacgccggagagcgtcgaagcgggggcggtgttcgccgagatcggcccgcgcatggccgagttgagcggttcccggctggccgcgcagcaacagatggaaggcctcctggcgccgcaccggcccaaggagcccgcgtggttcctggccaccgtcggcgtctcgcccgaccaccagggcaagggtctgggcagcgccgtcgtgctccccggagtggaggcggccgagcgcgccggggtgcccgccttcctggagacctccgcgccccgcaacctccccttctacgagcggctcggcttcaccgtcaccgccgacgtcgaggtgcccgaaggaccgcgcacctggtgcatgacccgcaagcccggtgcctga

SEQ ID NO: 8314 - DNA, 1869 bp, Artificial Sequence
  Synthetic Polynucloetide
atggccttaccagtgaccgccttgctcctgccgctggccttgctgctccacgccgccaggccgagctacgtgctgacacagcctccatccgtgtctgtggctccaggacagaccgccagaatcacatgcggcggcaacaacatcggcggcaagagcgtgcactggtatcagcagccacctggacaggctccagtggtggtggtgtacgacgacagcgatagacctagcggcatccccgagagattcagcggcagcaattccggcaataccgccacactgaccatcagcagagtggaagctggcgacgaggccgtgtactactgccaagtgtgggacagcagcagcgatcacgtggtgtttggcggcggaacaaagctgacagtgcttctcgaggacctgaagaacgtgttcccacctgaggtggccgtgttcgagcctagcgaggccgagatcagccacacccagaaagccaccctcgtgtgcctggctaccggcttctaccccgaccatgtggaactgtcttggtgggtcaacggcaaagaggtgcacagcggcgtgtgtaccgacccccagccactgaaagaacagcccgccctgaacgacagccggtactgcctgagcagcagactgagagtgtccgccaccttctggcagaacccccggaaccacttcagatgccaggtgcagttctacggcctgagcgagaacgacgagtggacccaggacagagccaagcccgtgacccagatcgtgtctgccgaagcctggggcagagccgattgcggctttaccagcgagagctaccagcagggcgtgctgagcgccaccatcctgtacgagatcctgctgggcaaggccaccctgtacgccgtgctggtgtctgccctggtgctgatggctatggtcaagcggaaggacagccggggaagggccaagcgatctggatctggagcaacaaacttctcactactcaaacaagcaggtgacgtggaggagaatcccgggcctactagtatggactggatttggcgcatccttttccttgtcggcgctgctaccggcgcgcattccttcgaacaactccagctgcaagagtctggccctggcctggtcaagcctagcgaaacactgagcctgacctgtaccgtgtctggcggctctatcagctccagcagctatttctggggctggatcagacaacctcctggcaaaggactggaatggatcggctccatctactacagcggcatcacctactacaaccccagcctgaagtccagagtgaccatctccgtggacaccagcaagaaccagttctccctgaagctgagcagcgtgacagccgccgataccgccgtgtattattgtgccagacatgacggcgctgtggccggcctgtttgattattggggacagggcaccctggtcaccgtgtcatctgctacgcgtatccagaaccctgatcctgccgtgtaccagctgcgggatagcaagagcagcgacaagagcgtgtgtctgttcaccgacttcgacagccagaccaacgtgtcccagagcaaggactccgacgtgtacatcaccgataagtgcgtgctggacatgcggagcatggacttcaagagcaactccgccgtggcctggtccaacaagtccgatttcgcctgcgccaacgccttcaacaacagcattatccccgaggacacattcttcccaagccccgagagcagctgcgacgtgaagctggtggaaaagagcttcgagacagacaccaacctgaacttccagaacctgagcgtgatcggcttcagaatcctgctgctgaaagtggccggctttaacctgctgatgaccctgcggctgtggtccagc

SEQ ID NO: 8315 - DNA, 2544 bp, Artificial Sequence
  Synthetic Polynucloetide
atggccttaccagtgaccgccttgctcctgccgctggccttgctgctccacgccgccaggccgagctacgtgctgacacagcctccatccgtgtctgtggctccaggacagaccgccagaatcacatgcggcggcaacaacatcggcggcaagagcgtgcactggtatcagcagccacctggacaggctccagtggtggtggtgtacgacgacagcgatagacctagcggcatccccgagagattcagcggcagcaattccggcaataccgccacactgaccatcagcagagtggaagctggcgacgaggccgtgtactactgccaagtgtgggacagcagcagcgatcacgtggtgtttggcggcggaacaaagctgacagtgcttctcgaggacctgaagaacgtgttcccacctgaggtggccgtgttcgagcctagcgaggccgagatcagccacacccagaaagccaccctcgtgtgcctggctaccggcttctaccccgaccatgtggaactgtcttggtgggtcaacggcaaagaggtgcacagcggcgtgtgtaccgacccccagccactgaaagaacagcccgccctgaacgacagccggtactgcctgagcagcagactgagagtgtccgccaccttctggcagaacccccggaaccacttcagatgccaggtgcagttctacggcctgagcgagaacgacgagtggacccaggacagagccaagcccgtgacccagatcgtgtctgccgaagcctggggcagagccgattgcggctttaccagcgagagctaccagcagggcgtgctgagcgccaccatcctgtacgagatcctgctgggcaaggccaccctgtacgccgtgctggtgtctgccctggtgctgatggctatggtcaagcggaaggacagccggggaagggccaagcgatctggatctggagcaacaaacttctcactactcaaacaagcaggtgacgtggaggagaatcccgggcctactagtatggactggatttggcgcatccttttccttgtcggcgctgctaccggcgcgcattccttcgaacaactccagctgcaagagtctggccctggcctggtcaagcctagcgaaacactgagcctgacctgtaccgtgtctggcggctctatcagctccagcagctatttctggggctggatcagacaacctcctggcaaaggactggaatggatcggctccatctactacagcggcatcacctactacaaccccagcctgaagtccagagtgaccatctccgtggacaccagcaagaaccagttctccctgaagctgagcagcgtgacagccgccgataccgccgtgtattattgtgccagacatgacggcgctgtggccggcctgtttgattattggggacagggcaccctggtcaccgtgtcatctgctacgcgtatccagaaccctgatcctgccgtgtaccagctgcgggatagcaagagcagcgacaagagcgtgtgtctgttcaccgacttcgacagccagaccaacgtgtcccagagcaaggactccgacgtgtacatcaccgataagtgcgtgctggacatgcggagcatggacttcaagagcaactccgccgtggcctggtccaacaagtccgatttcgcctgcgccaacgccttcaacaacagcattatccccgaggacacattcttcccaagccccgagagcagctgcgacgtgaagctggtggaaaagagcttcgagacagacaccaacctgaacttccagaacctgagcgtgatcggcttcagaatcctgctgctgaaagtggccggctttaacctgctgatgaccctgcggctgtggtccagccgcgccaagagaagcggatctggcgtgaagcagaccctgaatttcgacctgctgaagctggctggcgacgtggaatccaacccaggcccttctagaggcgggatccacaccatggctacctacgaggtgctgtgcgaggtggcaagaaagctgggcaccgacgacagagaagtggtgctgttcctgctgaacgtgttcatccctcagcctacactggcccagctgatcggtgcactgagagccctgaaagaggaaggccggctgacctttcctctgctggccgaatgcctgttcagagccggaagaagggatctgctgcgggacctgctgcatctggaccccagatttctggaaagacacctggccggcaccatgagctacttcagcccttaccagctgaccgtgctgcacgttgacggcgaactgtgcgccagagatattcggagcctgatcttcctgagcaaggacaccatcggcagccggtctacccctcagacatttctgcactgggtgtactgcatggaaaacctggacctgctcggccccacagatgtggatgccctgatgtccatgctgagaagcctgagcagagtggacctccagagacaggtgcagacactgatgggactgcacctgagcggacctagccacagccagcactacagacacacccct

SEQ ID NO: 8316 - DNA, 1881 bp, Artificial Sequence
  Synthetic Polynucloetide
atggccttaccagtgaccgccttgctcctgccgctggccttgctgctccacgccgccaggccgagctacgtgctgacacagcctccatccgtgtctgtggctccaggacagaccgccagaatcacatgcggcggcaacaacatcggcggcaagagcgtgcactggtatcagcagccacctggacaggctccagtggtggtggtgtacgacgacagcgatagacctagcggcatccccgagagattcagcggcagcaattccggcaataccgccacactgaccatcagcagagtggaagctggcgacgaggccgtgtactactgccaagtgtgggacagcagcagcgatcacgtggtgtttggcggcggaacaaagctgacagtgcttctcgagatccagaaccctgatcctgccgtgtaccagctgcgggatagcaagagcagcgacaagagcgtgtgtctgttcaccgacttcgacagccagaccaacgtgtcccagagcaaggactccgacgtgtacatcaccgataagtgcgtgctggacatgcggagcatggacttcaagagcaactccgccgtggcctggtccaacaagtccgatttcgcctgcgccaacgccttcaacaacagcattatccccgaggacacattcttcccaagccccgagagcagctgcgacgtgaagctggtggaaaagagcttcgagacagacaccaacctgaacttccagaacctgagcgtgatcggcttcagaatcctgctgctgaaagtggccggctttaacctgctgatgaccctgcggctgtggtccagccgcgccaagagaagcggatctggcgtgaagcagaccctgaatttcgacctgctgaagctggctggcgacgtggaatccaacccaggccctactagtatggactggatttggcgcatccttttccttgtcggcgctgctaccggcgcgcattccttcgaacaactccagctgcaagagtctggccctggcctggtcaagcctagcgaaacactgagcctgacctgtaccgtgtctggcggctctatcagctccagcagctatttctggggctggatcagacaacctcctggcaaaggactggaatggatcggctccatctactacagcggcatcacctactacaaccccagcctgaagtccagagtgaccatctccgtggacaccagcaagaaccagttctccctgaagctgagcagcgtgacagccgccgataccgccgtgtattattgtgccagacatgacggcgctgtggccggcctgtttgattattggggacagggcaccctggtcaccgtgtcatctgctacgcgtgaggacctgaagaacgtgttcccacctgaggtggccgtgttcgagcctagcgaggccgagatcagccacacccagaaagccaccctcgtgtgcctggctaccggcttctaccccgaccatgtggaactgtcttggtgggtcaacggcaaagaggtgcacagcggcgtgtgtaccgacccccagccactgaaagaacagcccgccctgaacgacagccggtactgcctgagcagcagactgagagtgtccgccaccttctggcagaacccccggaaccacttcagatgccaggtgcagttctacggcctgagcgagaacgacgagtggacccaggacagagccaagcccgtgacccagatcgtgtctgccgaagcctggggcagagccgattgcggctttaccagcgagagctaccagcagggcgtgctgagcgccaccatcctgtacgagatcctgctgggcaaggccaccctgtacgccgtgctggtgtctgccctggtgctgatggctatggtcaagcggaaggacagccgggga

SEQ ID NO: 8317 - DNA, 2547 bp, Artificial Sequence
  Synthetic Polynucloetide
atggccttaccagtgaccgccttgctcctgccgctggccttgctgctccacgccgccaggccgagctacgtgctgacacagcctccatccgtgtctgtggctccaggacagaccgccagaatcacatgcggcggcaacaacatcggcggcaagagcgtgcactggtatcagcagccacctggacaggctccagtggtggtggtgtacgacgacagcgatagacctagcggcatccccgagagattcagcggcagcaattccggcaataccgccacactgaccatcagcagagtggaagctggcgacgaggccgtgtactactgccaagtgtgggacagcagcagcgatcacgtggtgtttggcggcggaacaaagctgacagtgcttctcgagatccagaaccctgatcctgccgtgtaccagctgcgggatagcaagagcagcgacaagagcgtgtgtctgttcaccgacttcgacagccagaccaacgtgtcccagagcaaggactccgacgtgtacatcaccgataagtgcgtgctggacatgcggagcatggacttcaagagcaactccgccgtggcctggtccaacaagtccgatttcgcctgcgccaacgccttcaacaacagcattatccccgaggacacattcttcccaagccccgagagcagctgcgacgtgaagctggtggaaaagagcttcgagacagacaccaacctgaacttccagaacctgagcgtgatcggcttcagaatcctgctgctgaaagtggccggctttaacctgctgatgaccctgcggctgtggtccagccgcgccaagagaagcggatctggcgtgaagcagaccctgaatttcgacctgctgaagctggctggcgacgtggaatccaacccaggccctactagtatggactggatttggcgcatccttttccttgtcggcgctgctaccggcgcgcattccttcgaacaactccagctgcaagagtctggccctggcctggtcaagcctagcgaaacactgagcctgacctgtaccgtgtctggcggctctatcagctccagcagctatttctggggctggatcagacaacctcctggcaaaggactggaatggatcggctccatctactacagcggcatcacctactacaaccccagcctgaagtccagagtgaccatctccgtggacaccagcaagaaccagttctccctgaagctgagcagcgtgacagccgccgataccgccgtgtattattgtgccagacatgacggcgctgtggccggcctgtttgattattggggacagggcaccctggtcaccgtgtcatctgctacgcgtgaggacctgaagaacgtgttcccacctgaggtggccgtgttcgagcctagcgaggccgagatcagccacacccagaaagccaccctcgtgtgcctggctaccggcttctaccccgaccatgtggaactgtcttggtgggtcaacggcaaagaggtgcacagcggcgtgtgtaccgacccccagccactgaaagaacagcccgccctgaacgacagccggtactgcctgagcagcagactgagagtgtccgccaccttctggcagaacccccggaaccacttcagatgccaggtgcagttctacggcctgagcgagaacgacgagtggacccaggacagagccaagcccgtgacccagatcgtgtctgccgaagcctggggcagagccgattgcggctttaccagcgagagctaccagcagggcgtgctgagcgccaccatcctgtacgagatcctgctgggcaaggccaccctgtacgccgtgctggtgtctgccctggtgctgatggctatggtcaagcggaaggacagccggggaagggccaagcgatctggatctggagcaacaaacttctcactactcaaacaagcaggtgacgtggaggagaatcccgggccttctagaggcgggatccacaccatggctacctacgaggtgctgtgcgaggtggcaagaaagctgggcaccgacgacagagaagtggtgctgttcctgctgaacgtgttcatccctcagcctacactggcccagctgatcggtgcactgagagccctgaaagaggaaggccggctgacctttcctctgctggccgaatgcctgttcagagccggaagaagggatctgctgcgggacctgctgcatctggaccccagatttctggaaagacacctggccggcaccatgagctacttcagcccttaccagctgaccgtgctgcacgttgacggcgaactgtgcgccagagatattcggagcctgatcttcctgagcaaggacaccatcggcagccggtctacccctcagacatttctgcactgggtgtactgcatggaaaacctggacctgctcggccccacagatgtggatgccctgatgtccatgctgagaagcctgagcagagtggacctccagagacaggtgcagacactgatgggactgcacctgagcggacctagccacagccagcactacagacacacccct

SEQ ID NO: 8318 - DNA, 2706 bp, Artificial Sequence
  Synthetic Polynucloetide
atggccttaccagtgaccgccttgctcctgccgctggccttgctgctccacgccgccaggccgctcgaggggaaaccaattcccaaccctcttctgggactggattcaaccggcagcggcgaggacctgaagaacgtgttcccacctgaggtggccgtgttcgagcctagcaaggccgagatcgcccacacccagaaagccaccctcgtgtgcctggctaccggcttctaccccgaccatgtggaactgtcttggtgggtcaacggcaaagaggtgcacagcggcgtgtgtaccgacccccagccactgaaagaacagcccgccctgaacgacagccggtactgcctgagcagcagactgagagtgtccgccaccttctggcagaacccccggaaccacttcagatgccaggtgcagttctacggcctgagcgagaacgacgagtggacccaggacagagccaagcccgtgacccagatcgtgtctgccgaagcctggggcagagccgattgcggcatcaccagcgccagctaccaccagggcgtgctgagcgccaccatcctgtacgagatcctgctgggcaaggccaccctgtacgccgtgctggtgtctgccctggtgctgatggctatggtcaagcggaaggacagccggggaagggccaagcgatctggatctggagcaacaaacttctcactactcaaacaagcaggtgacgtggaggagaatcccgggcctactagcatggccttaccagtgaccgccttgctcctgccgctggccttgctgctccacgccgccaggccgagctacgtgctgacacagcctccatccgtgtctgtggctccaggacagaccgccagaatcacatgcggcggcaacaacatcggcggcaagagcgtgcactggtatcagcagccacctggacaggctccagtggtggtggtgtacgacgacagcgatagacctagcggcatccccgagagattcagcggcagcaattccggcaataccgccacactgaccatcagcagagtggaagctggcgacgaggccgtgtactactgccaagtgtgggacagcagcagcgatcacgtggtgtttggcggcggaacaaagctgacagtgcttggcggaggcggaagtggaggcggaggatctggcggcggaggctctcaactccagctgcaagagtctggccctggcctggtcaagcctagcgaaacactgagcctgacctgtaccgtgtctggcggctctatcagctccagcagctatttctggggctggatcagacaacctcctggcaaaggactggaatggatcggctccatctactacagcggcatcacctactacaaccccagcctgaagtccagagtgaccatctccgtggacaccagcaagaaccagttctccctgaagctgagcagcgtgacagccgccgataccgccgtgtattattgtgccagacatgacggcgctgtggccggcctgtttgattattggggacagggcaccctggtcaccgtgtcatctgctacgcgtgagcagaaactgatctcggaagaggatgggagcggcatccagaaccctgatcctgccgtgtaccagctgcgggatagcaagagcagcgacaagagcgtgtgtctgttcaccgacttcgacagccagaccaacgtgtcccagagcaaggactccgacgtgtacatcaccgataagtgcgtgctggacatgcggagcatggacttcaagagcaactccgccgtggcctggtccaacaagtccgatttcgcctgcgccaacgccttcaacaacagcattatccccgaggacacattcttcccaagcagcgacgtgccctgcgacgtgaagctggtggaaaagagcttcgagacagacaccaacctgaacttccagaacctgagcgtgatcggcttcagaatcctgctgctgaaagtggccggctttaacctgctgatgaccctgcggctgtggtccagccgcgccaagagaagcggatctggcgtgaagcagaccctgaatttcgacctgctgaagctggctggcgacgtggaatccaacccaggcccttctagaggccatatgaccgagtacaagcccacggtgcgcctcgccacccgcgacgacgtccccagggccgtacgcaccctcgccgccgcgttcgccgactaccccgccacgcgccacaccgtcgatccggaccgccacatcgagcgggtcaccgagctgcaagaactcttcctcacgcgcgtcgggctcgacatcggcaaggtgtgggtcgcggacgacggcgccgcggtggcggtctggaccacgccggagagcgtcgaagcgggggcggtgttcgccgagatcggcccgcgcatggccgagttgagcggttcccggctggccgcgcagcaacagatggaaggcctcctggcgccgcaccggcccaaggagcccgcgtggttcctggccaccgtcggcgtctcgcccgaccaccagggcaagggtctgggcagcgccgtcgtgctccccggagtggaggcggccgagcgcgccggggtgcccgccttcctggagacctccgcgccccgcaacctccccttctacgagcggctcggcttcaccgtcaccgccgacgtcgaggtgcccgaaggaccgcgcacctggtgcatgacccgcaagcccggtgcctga

SEQ ID NO: 8319 - DNA, 2709 bp, Artificial Sequence
  Synthetic Polynucloetide
atggccttaccagtgaccgccttgctcctgccgctggccttgctgctccacgccgccaggccgctcgagcagaaactgatctcggaagaggatctgggctccggcgatcgccctgatcctgccgtgtaccagctgcgggatagcaagagcagcgacaagagcgtgtgtctgttcaccgacttcgacagccagaccaacgtgtcccagagcaaggactccgacgtgtacatcaccgataagtgcgtgctggacatgcggagcatggacttcaagagcaactccgccgtggcctggtccaacaagtccgatttcgcctgcgccaacgccttcaacaacagcattatccccgaggacacattcttcccaagccccgagagcagctgcgacgtgaagctggtggaaaagagcttcgagacagacaccaacctgaacttccagaacctgagcgtgatcggcttcagaatcctgctgctgaaagtggccggctttaacctgctgatgaccctgcggctgtggtccagctctagtcgcgccaagagaagcggatctggcgtgaagcagaccctgaatttcgacctgctgaagctggctggcgacgtggaatccaacccaggccccactagcatggccttaccagtgaccgccttgctcctgccgctggccttgctgctccacgccgccaggccgagctacgtgctgacacagcctccatccgtgtctgtggctccaggacagaccgccagaatcacatgcggcggcaacaacatcggcggcaagagcgtgcactggtatcagcagccacctggacaggctccagtggtggtggtgtacgacgacagcgatagacctagcggcatccccgagagattcagcggcagcaattccggcaataccgccacactgaccatcagcagagtggaagctggcgacgaggccgtgtactactgccaagtgtgggacagcagcagcgatcacgtggtgtttggcggcggaacaaagctgacagtgcttggcggaggcggaagtggaggcggaggatctggcggcggaggctctcaactccagctgcaagagtctggccctggcctggtcaagcctagcgaaacactgagcctgacctgtaccgtgtctggcggctctatcagctccagcagctatttctggggctggatcagacaacctcctggcaaaggactggaatggatcggctccatctactacagcggcatcacctactacaaccccagcctgaagtccagagtgaccatctccgtggacaccagcaagaaccagttctccctgaagctgagcagcgtgacagccgccgataccgccgtgtattattgtgccagacatgacggcgctgtggccggcctgtttgattattggggacagggcaccctggtcaccgtgtcatctgctacgcgtgggaaaccaattcccaaccctcttctgggactggattcaaccggcagcggcgaggacctgaagaacgtgttcccacctgaggtggccgtgttcgagcctagcgaggccgagatcagccacacccagaaagccaccctcgtgtgcctggctaccggcttctaccccgaccatgtggaactgtcttggtgggtcaacggcaaagaggtgcacagcggcgtgtgtaccgacccccagccactgaaagaacagcccgccctgaacgacagccggtactgcctgagcagcagactgagagtgtccgccaccttctggcagaacccccggaaccacttcagatgccaggtgcagttctacggcctgagcgagaacgacgagtggacccaggacagagccaagcccgtgacccagatcgtgtctgccgaagcctggggcagagccgattgcggctttaccagcgagagctaccagcagggcgtgctgagcgccaccatcctgtacgagatcctgctgggcaaggccaccctgtacgccgtgctggtgtctgccctggtgctgatggctatggtcaagcggaaggacagccggggaagggccaagcgatctggatctggagcaacaaacttctcactactcaaacaagcaggtgacgtggaggagaatcccgggccttctagaggccatatgaccgagtacaagcccacggtgcgcctcgccacccgcgacgacgtccccagggccgtacgcaccctcgccgccgcgttcgccgactaccccgccacgcgccacaccgtcgatccggaccgccacatcgagcgggtcaccgagctgcaagaactcttcctcacgcgcgtcgggctcgacatcggcaaggtgtgggtcgcggacgacggcgccgcggtggcggtctggaccacgccggagagcgtcgaagcgggggcggtgttcgccgagatcggcccgcgcatggccgagttgagcggttcccggctggccgcgcagcaacagatggaaggcctcctggcgccgcaccggcccaaggagcccgcgtggttcctggccaccgtcggcgtctcgcccgaccaccagggcaagggtctgggcagcgccgtcgtgctccccggagtggaggcggccgagcgcgccggggtgcccgccttcctggagacctccgcgccccgcaacctccccttctacgagcggctcggcttcaccgtcaccgccgacgtcgaggtgcccgaaggaccgcgcacctggtgcatgacccgcaagcccggtgcctga

SEQ ID NO: 8320 - DNA, 2571 bp, Artificial Sequence
  Synthetic Polynucloetide
atggccttaccagtgaccgccttgctcctgccgctggccttgctgctccacgccgccaggccgagctacgtgctgacacagcctccatccgtgtctgtggctccaggacagaccgccagaatcacatgcggcggcaacaacatcggcggcaagagcgtgcactggtatcagcagccacctggacaggctccagtggtggtggtgtacgacgacagcgatagacctagcggcatccccgagagattcagcggcagcaattccggcaataccgccacactgaccatcagcagagtggaagctggcgacgaggccgtgtactactgccaagtgtgggacagcagcagcgatcacgtggtgtttggcggcggaacaaagctgacagtgcttctcgaggacctgaagaacgtgttcccacctgaggtggccgtgttcgagcctagcgaggccgagatcagccacacccagaaagccaccctcgtgtgcctggctaccggcttctaccccgaccatgtggaactgtcttggtgggtcaacggcaaagaggtgcacagcggcgtgtctaccgacccccagccactgaaagaacagcccgccctgaacgacagccggtactgcctgagcagcagactgagagtgtccgccaccttctggcagaacccccggaaccacttcagatgccaggtgcagttctacggcctgagcgagaacgacgagtggacccaggacagagccaagcccgtgacccagatcgtgtctgccgaagcctggggcagagccgattgcggctttaccagcgagagctaccagcagggcgtgctgagcgccaccatcctgtacgagatcctgctgggcaaggccaccctgtacgccgtgctggtgtctgccctggtgctgatggctatggtcaagcggaaggacagccggggaagggccaagcgatctggatctggagcaacaaacttctcactactcaaacaagcaggtgacgtggaggagaatcccgggcctactagtatggactggatttggcgcatccttttccttgtcggcgctgctaccggcgcgcattccttcgaacaactccagctgcaagagtctggccctggcctggtcaagcctagcgaaacactgagcctgacctgtaccgtgtctggcggctctatcagctccagcagctatttctggggctggatcagacaacctcctggcaaaggactggaatggatcggctccatctactacagcggcatcacctactacaaccccagcctgaagtccagagtgaccatctccgtggacaccagcaagaaccagttctccctgaagctgagcagcgtgacagccgccgataccgccgtgtattattgtgccagacatgacggcgctgtggccggcctgtttgattattggggacagggcaccctggtcaccgtgtcatctgctacgcgtatccagaaccctgatcctgccgtgtaccagctgcgggatagcaagagcagcgacaagagcgtgtgtctgttcaccgacttcgacagccagaccaacgtgtcccagagcaaggactccgacgtgtacatcaccgataagaccgtgctggacatgcggagcatggacttcaagagcaactccgccgtggcctggtccaacaagtccgatttcgcctgcgccaacgccttcaacaacagcattatccccgaggacacattcttcccaagccccgagagcagctgcgacgtgaagctggtggaaaagagcttcgagacagacaccaacctgaacttccagaacctgagcgtgatcggcttcagaatcctgctgctgaaagtggccggctttaacctgctgatgaccctgcggctgtggtccagccgcgccaagagaagcggatctggcgtgaagcagaccctgaatttcgacctgctgaagctggctggcgacgtggaatccaacccaggcccttctagaggccatatgaccgagtacaagcccacggtgcgcctcgccacccgcgacgacgtccccagggccgtacgcaccctcgccgccgcgttcgccgactaccccgccacgcgccacaccgtcgatccggaccgccacatcgagcgggtcaccgagctgcaagaactcttcctcacgcgcgtcgggctcgacatcggcaaggtgtgggtcgcggacgacggcgccgcggtggcggtctggaccacgccggagagcgtcgaagcgggggcggtgttcgccgagatcggcccgcgcatggccgagttgagcggttcccggctggccgcgcagcaacagatggaaggcctcctggcgccgcaccggcccaaggagcccgcgtggttcctggccaccgtcggcgtctcgcccgaccaccagggcaagggtctgggcagcgccgtcgtgctccccggagtggaggcggccgagcgcgccggggtgcccgccttcctggagacctccgcgccccgcaacctccccttctacgagcggctcggcttcaccgtcaccgccgacgtcgaggtgcccgaaggaccgcgcacctggtgcatgacccgcaagcccggtgcctga

SEQ ID NO: 8321 - DNA, 2817 bp, Artificial Sequence
  Synthetic Polynucloetide
atggccttaccagtgaccgccttgctcctgccgctggccttgctgctccacgccgccaggccgagctacgtgctgacacagcctccatccgtgtctgtggctccaggacagaccgccagaatcacatgcggcggcaacaacatcggcggcaagagcgtgcactggtatcagcagccacctggacaggctccagtggtggtggtgtacgacgacagcgatagacctagcggcatccccgagagattcagcggcagcaattccggcaataccgccacactgaccatcagcagagtggaagctggcgacgaggccgtgtactactgccaagtgtgggacagcagcagcgatcacgtggtgtttggcggcggaacaaagctgacagtgcttctcgaggacctgaagaacgtgttcccacctgaggtggccgtgttcgagcctagcgaggccgagatcagccacacccagaaagccaccctcgtgtgcctggctaccggcttctaccccgaccatgtggaactgtcttggtgggtcaacggcaaagaggtgcacagcggcgtgtctaccgacccccagccactgaaagaacagcccgccctgaacgacagccggtactgcctgagcagcagactgagagtgtccgccaccttctggcagaacccccggaaccacttcagatgccaggtgcagttctacggcctgagcgagaacgacgagtggacccaggacagagccaagcccgtgacccagatcgtgtctgccgaagcctggggcagagccgattgcggctttaccagcgagagctaccagcagggcgtgctgagcgccaccatcctgtacgagatcctgctgggcaaggccaccctgtacgccgtgctggtgtctgccctggtgctgatggctatggtcaagcggaaggacagccggggaagggccaagcgatctggatctggagcaacaaacttctcactactcaaacaagcaggtgacgtggaggagaatcccgggcctactagtatggactggatttggcgcatccttttccttgtcggcgctgctaccggcgcgcattccttcgaacaactccagctgcaagagtctggccctggcctggtcaagcctagcgaaacactgagcctgacctgtaccgtgtctggcggctctatcagctccagcagctatttctggggctggatcagacaacctcctggcaaaggactggaatggatcggctccatctactacagcggcatcacctactacaaccccagcctgaagtccagagtgaccatctccgtggacaccagcaagaaccagttctccctgaagctgagcagcgtgacagccgccgataccgccgtgtattattgtgccagacatgacggcgctgtggccggcctgtttgattattggggacagggcaccctggtcaccgtgtcatctgctacgcgtgagcagaaactgatctcggaagaggatgggagcggcaccccattcccttctctggcccctcccatcatgctgctggtggacggcaagcagcagatggtggtcgtgtgcctggtgctggatgtggccccacctggactggacagccccatctggtttagcgccggcaatggctctgccctggacgcctttacctacggcccaagccctgccaccgatggcacctggacaaatctggcccacctgagcctgcccagcgaggaactggcttcttgggagcctctcgtgtgccacacaggacctggcgctgagggacacagcagatccacccagcctatgcacctgtctggcgaggccagcaccgccagaacctgtcctcaggaacctctgagaggcacccctggcggagcactgtggctgggagtgctgagactgctgctgttcaagctgctgctgtttgacctgctgctgacctgctcctgtctgtgcgatcctgccggccctctgccttctcctgccaccaccacaagactgagagccctgggcagccacagactgcaccctgccacagagacaggcggcagagaggccacaagcagccctagaccccagcccagagacagaagatggggcgataccccccctggcagaaagcctggatctccagtccgcgccaagagaagcggatctggcgtgaagcagaccctgaatttcgacctgctgaagctggctggcgacgtggaatccaacccaggcccttctagaggccatatgaccgagtacaagcccacggtgcgcctcgccacccgcgacgacgtccccagggccgtacgcaccctcgccgccgcgttcgccgactaccccgccacgcgccacaccgtcgatccggaccgccacatcgagcgggtcaccgagctgcaagaactcttcctcacgcgcgtcgggctcgacatcggcaaggtgtgggtcgcggacgacggcgccgcggtggcggtctggaccacgccggagagcgtcgaagcgggggcggtgttcgccgagatcggcccgcgcatggccgagttgagcggttcccggctggccgcgcagcaacagatggaaggcctcctggcgccgcaccggcccaaggagcccgcgtggttcctggccaccgtcggcgtctcgcccgaccaccagggcaagggtctgggcagcgccgtcgtgctccccggagtggaggcggccgagcgcgccggggtgcccgccttcctggagacctccgcgccccgcaacctccccttctacgagcggctcggcttcaccgtcaccgccgacgtcgaggtgcccgaaggaccgcgcacctggtgcatgacccgcaagcccggtgcctga

SEQ ID NO: 8322 - DNA, 2871 bp, Artificial Sequence
  Synthetic Polynucloetide
atggccttaccagtgaccgccttgctcctgccgctggccttgctgctccacgccgccaggccgctcgaggacctgaagaacgtgttcccacctgaggtggccgtgttcgagcctagcgaggccgagatcagccacacccagaaagccaccctcgtgtgcctggctaccggcttctaccccgaccatgtggaactgtcttggtgggtcaacggcaaagaggtgcacagcggcgtgtctaccgacccccagccactgaaagaacagcccgccctgaacgacagccggtactgcctgagcagcagactgagagtgtccgccaccttctggcagaacccccggaaccacttcagatgccaggtgcagttctacggcctgagcgagaacgacgagtggacccaggacagagccaagcccgtgacccagatcgtgtctgccgaagcctggggcagagccgattgcggctttaccagcgagagctaccagcagggcgtgctgagcgccaccatcctgtacgagatcctgctgggcaaggccaccctgtacgccgtgctggtgtctgccctggtgctgatggctatggtcaagcggaaggacagccggggaagggccaagcgatctggatctggagcaacaaacttctcactactcaaacaagcaggtgacgtggaggagaatcccgggcctactagcatggccttaccagtgaccgccttgctcctgccgctggccttgctgctccacgccgccaggccgagctacgtgctgacacagcctccatccgtgtctgtggctccaggacagaccgccagaatcacatgcggcggcaacaacatcggcggcaagagcgtgcactggtatcagcagccacctggacaggctccagtggtggtggtgtacgacgacagcgatagacctagcggcatccccgagagattcagcggcagcaattccggcaataccgccacactgaccatcagcagagtggaagctggcgacgaggccgtgtactactgccaagtgtgggacagcagcagcgatcacgtggtgtttggcggcggaacaaagctgacagtgcttggcggaggcggaagtggaggcggaggatctggcggcggaggctctcaactccagctgcaagagtctggccctggcctggtcaagcctagcgaaacactgagcctgacctgtaccgtgtctggcggctctatcagctccagcagctatttctggggctggatcagacaacctcctggcaaaggactggaatggatcggctccatctactacagcggcatcacctactacaaccccagcctgaagtccagagtgaccatctccgtggacaccagcaagaaccagttctccctgaagctgagcagcgtgacagccgccgataccgccgtgtattattgtgccagacatgacggcgctgtggccggcctgtttgattattggggacagggcaccctggtcaccgtgtcatctgctacgcgtgagcagaaactgatctcggaagaggatctggggagcggcaccccattcccttctctggcccctcccatcatgctgctggtggacggcaagcagcagatggtggtcgtgtgcctggtgctggatgtggccccacctggactggacagccccatctggtttagcgccggcaatggctctgccctggacgcctttacctacggcccaagccctgccaccgatggcacctggacaaatctggcccacctgagcctgcccagcgaggaactggcttcttgggagcctctcgtgtgccacacaggacctggcgctgagggacacagcagatccacccagcctatgcacctgtctggcgaggccagcaccgccagaacctgtcctcaggaacctctgagaggcacccctggcggagcactgtggctgggagtgctgagactgctgctgttcaagctgctgctgtttgacctgctgctgacctgctcctgtctgtgcgatcctgccggccctctgccttctcctgccaccaccacaagactgagagccctgggcagccacagactgcaccctgccacagagacaggcggcagagaggccacaagcagccctagaccccagcccagagacagaagatggggcgataccccccctggcagaaagcctggatctccagtccgcgccaagagaagcggatctggcgtgaagcagaccctgaatttcgacctgctgaagctggctggcgacgtggaatccaacccaggcccttctagatctagaggccatatgaccgagtacaagcccacggtgcgcctcgccacccgcgacgacgtccccagggccgtacgcaccctcgccgccgcgttcgccgactaccccgccacgcgccacaccgtcgatccggaccgccacatcgagcgggtcaccgagctgcaagaactcttcctcacgcgcgtcgggctcgacatcggcaaggtgtgggtcgcggacgacggcgccgcggtggcggtctggaccacgccggagagcgtcgaagcgggggcggtgttcgccgagatcggcccgcgcatggccgagttgagcggttcccggctggccgcgcagcaacagatggaaggcctcctggcgccgcaccggcccaaggagcccgcgtggttcctggccaccgtcggcgtctcgcccgaccaccagggcaagggtctgggcagcgccgtcgtgctccccggagtggaggcggccgagcgcgccggggtgcccgccttcctggagacctccgcgccccgcaacctccccttctacgagcggctcggcttcaccgtcaccgccgacgtcgaggtgcccgaaggaccgcgcacctggtgcatgacccgcaagcccggtgcctga

SEQ ID NO: 8323 - DNA, 2682 bp, Artificial Sequence
  Synthetic Polynucloetide
atggccttaccagtgaccgccttgctcctgccgctggccttgctgctccacgccgccaggccgagctacgtgctgacacagcctccatccgtgtctgtggctccaggacagaccgccagaatcacatgcggcggcaacaacatcggcggcaagagcgtgcactggtatcagcagccacctggacaggctccagtggtggtggtgtacgacgacagcgatagacctagcggcatccccgagagattcagcggcagcaattccggcaataccgccacactgaccatcagcagagtggaagctggcgacgaggccgtgtactactgccaagtgtgggacagcagcagcgatcacgtggtgtttggcggcggaacaaagctgacagtgcttctcgaggggaaaccaattcccaaccctcttctgggactggattcaaccggcagcggcgacaagcagctggacgccgacgtgtcccccaagcctaccatcttcctgccctctatcgccgagacaaagctccagaaggccggcacctacctgtgcctgctggaaaagttcttcccagatgtgattaagatccactggcaggaaaagaagtccaacaccatcctgggcagccaggaaggcaacaccatgaagaccaacgacacctacatgaagttcagctggctgaccgtgcccgagaagtccctggacaaagaacacagatgcatcgtgcggcacgaaaacaacaagaacggcgtggaccaggaaatcatcttcccacccatcaagaccgatgtgattacaatggaccccaaggacaactgctccaaggacgccaacgataccctgctgctccagctgaccaacaccagcgcctactacatgtacttgttgctgctgctgaagtccgtggtgtacttcgccatcatcacatgctgcctgctgcggagaaccgccttctgctgcaacggcgagaagtctagggccaagcgatctggatctggagcaacaaacttctcactactcaaacaagcaggtgacgtggaggagaatcccgggcctactagtatggactggatttggcgcatccttttccttgtcggcgctgctaccggcgcgcattccttcgaacaactccagctgcaagagtctggccctggcctggtcaagcctagcgaaacactgagcctgacctgtaccgtgtctggcggctctatcagctccagcagctatttctggggctggatcagacaacctcctggcaaaggactggaatggatcggctccatctactacagcggcatcacctactacaaccccagcctgaagtccagagtgaccatctccgtggacaccagcaagaaccagttctccctgaagctgagcagcgtgacagccgccgataccgccgtgtattattgtgccagacatgacggcgctgtggccggcctgtttgattattggggacagggcaccctggtcaccgtgtcatctgctacgcgtgagcagaaactgatctcggaagaggatgggagcggcagccagcctcacaccaagcccagcgtgttcgtgatgaagaacggcaccaacgtggcctgcctcgtgaaagagttctaccccaaggacatcaggatcaacctggtgtccagcaagaagatcaccgagttcgaccccgccatcgtgatctcccccagcggcaagtacaacgccgtgaagctggggaagtacgaggacagcaacagcgtgacctgctccgtgcagcacgacaacaagaccgtgcacagcaccgactttgaagtgaaaaccgactccaccgaccacgtgaagcccaaagagacagagaacaccaagcagcccagcaagagctgccacaagcccaaggccatcgtgcacaccgagaaagtgaacatgatgagcctgaccgtgctgggcctgcggatgctgttcgccaaaaccgtggccgtgaacttcctgctgaccgccaagctgttcttcctccgcgccaagagaagcggatctggcgtgaagcagaccctgaatttcgacctgctgaagctggctggcgacgtggaatccaacccaggcccttctagaggccatatgaccgagtacaagcccacggtgcgcctcgccacccgcgacgacgtccccagggccgtacgcaccctcgccgccgcgttcgccgactaccccgccacgcgccacaccgtcgatccggaccgccacatcgagcgggtcaccgagctgcaagaactcttcctcacgcgcgtcgggctcgacatcggcaaggtgtgggtcgcggacgacggcgccgcggtggcggtctggaccacgccggagagcgtcgaagcgggggcggtgttcgccgagatcggcccgcgcatggccgagttgagcggttcccggctggccgcgcagcaacagatggaaggcctcctggcgccgcaccggcccaaggagcccgcgtggttcctggccaccgtcggcgtctcgcccgaccaccagggcaagggtctgggcagcgccgtcgtgctccccggagtggaggcggccgagcgcgccggggtgcccgccttcctggagacctccgcgccccgcaacctccccttctacgagcggctcggcttcaccgtcaccgccgacgtcgaggtgcccgaaggaccgcgcacctggtgcatgacccgcaagcccggtgcctga

SEQ ID NO: 8324 - DNA, 1893 bp, Artificial Sequence
  Synthetic Polynucloetide
atggccttaccagtgaccgccttgctcctgccgctggccttgctgctccacgccgccaggccgagctacgtgctgacacagcctccatccgtgtctgtggctccaggacagaccgccagaatcacatgcggcggcaacaacatcggcggcaagagcgtgcactggtatcagcagccacctggacaggctccagtggtggtggtgtacgacgacagcgatagacctagcggcatccccgagagattcagcggcagcaattccggcaataccgccacactgaccatcagcagagtggaagctggcgacgaggccgtgtactactgccaagtgtgggacagcagcagcgatcacgtggtgtttggcggcggaacaaagctgacagtgcttctcgagagccagcctcacaccaagcccagcgtgttcgtgatgaagaacggcaccaacgtggcctgcctcgtgaaagagttctaccccaaggacatcaggatcaacctggtgtccagcaagaagatcaccgagttcgaccccgccatcgtgatctcccccagcggcaagtacaacgccgtgaagctggggaagtacgaggacagcaacagcgtgacctgctccgtgcagcacgacaacaagaccgtgcacagcaccgactttgaagtgaaaaccgactccaccgaccacgtgaagcccaaagagacagagaacaccaagcagcccagcaagagctgccacaagcccaaggccatcgtgcacaccgagaaagtgaacatgatgagcctgaccgtgctgggcctgcggatgctgttcgccaaaaccgtggccgtgaacttcctgctgaccgccaagctgttcttcctcagggccaagcgatctggatctggagcaacaaacttctcactactcaaacaagcaggtgacgtggaggagaatcccgggcctactagtatggactggatttggcgcatccttttccttgtcggcgctgctaccggcgcgcattccttcgaacaactccagctgcaagagtctggccctggcctggtcaagcctagcgaaacactgagcctgacctgtaccgtgtctggcggctctatcagctccagcagctatttctggggctggatcagacaacctcctggcaaaggactggaatggatcggctccatctactacagcggcatcacctactacaaccccagcctgaagtccagagtgaccatctccgtggacaccagcaagaaccagttctccctgaagctgagcagcgtgacagccgccgataccgccgtgtattattgtgccagacatgacggcgctgtggccggcctgtttgattattggggacagggcaccctggtcaccgtgtcatctgctacgcgtgacaagcagctggacgccgacgtgtcccccaagcctaccatcttcctgccctctatcgccgagacaaagctccagaaggccggcacctacctgtgcctgctggaaaagttcttcccagatgtgattaagatccactggcaggaaaagaagtccaacaccatcctgggcagccaggaaggcaacaccatgaagaccaacgacacctacatgaagttcagctggctgaccgtgcccgagaagtccctggacaaagaacacagatgcatcgtgcggcacgaaaacaacaagaacggcgtggaccaggaaatcatcttcccacccatcaagaccgatgtgattacaatggaccccaaggacaactgctccaaggacgccaacgataccctgctgctccagctgaccaacaccagcgcctactacatgtacttgttgctgctgctgaagtccgtggtgtacttcgccatcatcacatgctgcctgctgcggagaaccgccttctgctgcaacggcgagaagtct

SEQ ID NO: 8325 - DNA, 2727 bp, Artificial Sequence
  Synthetic Polynucloetide
atggccttaccagtgaccgccttgctcctgccgctggccttgctgctccacgccgccaggccgctcgaggggaaaccaattcccaaccctcttctgggactggattcaaccggcagcggcgacaagcagctggacgccgacgtgtcccccaagcctaccatcttcctgccctctatcgccgagacaaagctccagaaggccggcacctacctgtgcctgctggaaaagttcttcccagatgtgattaagatccactggcaggaaaagaagtccaacaccatcctgggcagccaggaaggcaacaccatgaagaccaacgacacctacatgaagttcagctggctgaccgtgcccgagaagtccctggacaaagaacacagatgcatcgtgcggcacgaaaacaacaagaacggcgtggaccaggaaatcatcttcccacccatcaagaccgatgtgattacaatggaccccaaggacaactgctccaaggacgccaacgataccctgctgctccagctgaccaacaccagcgcctactacatgtacttgttgctgctgctgaagtccgtggtgtacttcgccatcatcacatgctgcctgctgcggagaaccgccttctgctgcaacggcgagaagtctagggccaagcgatctggatctggagcaacaaacttctcactactcaaacaagcaggtgacgtggaggagaatcccgggcctactagcatggccttaccagtgaccgccttgctcctgccgctggccttgctgctccacgccgccaggccgagctacgtgctgacacagcctccatccgtgtctgtggctccaggacagaccgccagaatcacatgcggcggcaacaacatcggcggcaagagcgtgcactggtatcagcagccacctggacaggctccagtggtggtggtgtacgacgacagcgatagacctagcggcatccccgagagattcagcggcagcaattccggcaataccgccacactgaccatcagcagagtggaagctggcgacgaggccgtgtactactgccaagtgtgggacagcagcagcgatcacgtggtgtttggcggcggaacaaagctgacagtgcttggcggaggcggaagtggaggcggaggatctggcggcggaggctctcaactccagctgcaagagtctggccctggcctggtcaagcctagcgaaacactgagcctgacctgtaccgtgtctggcggctctatcagctccagcagctatttctggggctggatcagacaacctcctggcaaaggactggaatggatcggctccatctactacagcggcatcacctactacaaccccagcctgaagtccagagtgaccatctccgtggacaccagcaagaaccagttctccctgaagctgagcagcgtgacagccgccgataccgccgtgtattattgtgccagacatgacggcgctgtggccggcctgtttgattattggggacagggcaccctggtcaccgtgtcatctgctacgcgtgagcagaaactgatctcggaagaggatgggagcggcagccagcctcacaccaagcccagcgtgttcgtgatgaagaacggcaccaacgtggcctgcctcgtgaaagagttctaccccaaggacatcaggatcaacctggtgtccagcaagaagatcaccgagttcgaccccgccatcgtgatctcccccagcggcaagtacaacgccgtgaagctggggaagtacgaggacagcaacagcgtgacctgctccgtgcagcacgacaacaagaccgtgcacagcaccgactttgaagtgaaaaccgactccaccgaccacgtgaagcccaaagagacagagaacaccaagcagcccagcaagagctgccacaagcccaaggccatcgtgcacaccgagaaagtgaacatgatgagcctgaccgtgctgggcctgcggatgctgttcgccaaaaccgtggccgtgaacttcctgctgaccgccaagctgttcttcctccgcgccaagagaagcggatctggcgtgaagcagaccctgaatttcgacctgctgaagctggctggcgacgtggaatccaacccaggcccttctagaggccatatgaccgagtacaagcccacggtgcgcctcgccacccgcgacgacgtccccagggccgtacgcaccctcgccgccgcgttcgccgactaccccgccacgcgccacaccgtcgatccggaccgccacatcgagcgggtcaccgagctgcaagaactcttcctcacgcgcgtcgggctcgacatcggcaaggtgtgggtcgcggacgacggcgccgcggtggcggtctggaccacgccggagagcgtcgaagcgggggcggtgttcgccgagatcggcccgcgcatggccgagttgagcggttcccggctggccgcgcagcaacagatggaaggcctcctggcgccgcaccggcccaaggagcccgcgtggttcctggccaccgtcggcgtctcgcccgaccaccagggcaagggtctgggcagcgccgtcgtgctccccggagtggaggcggccgagcgcgccggggtgcccgccttcctggagacctccgcgccccgcaacctccccttctacgagcggctcggcttcaccgtcaccgccgacgtcgaggtgcccgaaggaccgcgcacctggtgcatgacccgcaagcccggtgcctga

SEQ ID NO: 8326 - DNA, 3102 bp, Artificial Sequence
  Synthetic Polynucloetide
atggccttaccagtgaccgccttgctcctgccgctggccttgctgctccacgccgccaggccgagctacgtgctgacacagcctccatccgtgtctgtggctccaggacagaccgccagaatcacatgcggcggcaacaacatcggcggcaagagcgtgcactggtatcagcagccacctggacaggctccagtggtggtggtgtacgacgacagcgatagacctagcggcatccccgagagattcagcggcagcaattccggcaataccgccacactgaccatcagcagagtggaagctggcgacgaggccgtgtactactgccaagtgtgggacagcagcagcgatcacgtggtgtttggcggcggaacaaagctgacagtgcttggacagcctaaggccaatcctaccgtgacactgttccctccaagcagcgaagaactccaggccaacaaggccacacttgtgtgcctgatctccgacttctaccctggggctgtgacagtggcttggaaggccgatggatctcctgtgaaagccggcgtggaaaccaccaagccatccaagcagagcaacaacaaatacgccgccagctcctacctgagcctgacacctgagcagtggaagtcccacagatcctacagctgccaagtgacccacgaaggcagcaccgtggaaaagacagtggcccctacagagtgcagcggatcccagagcttcggcctgctggaccccaagctgtgctacctgctggatggcatcctgttcatctacggcgtgatcctgaccgccctgttcctgagagtgaagttcagcagaagcgccgacgcccctgcctaccagcagggacagaaccaactgtacaacgagctgaacctgggcagacgggaagagtacgacgtgctggacaagcggagaggcagggaccctgagatgggcggaaagccccagcggagaaagaacccccaggaaggactgtataacgaactccagaaagacaagatggccgaagcctacagcgagatcggcatgaagggcgagcggagaagaggcaagggccacgatggcctgtaccagggcctgagcaccgccaccaaggacacctatgacgccctgcacatgcaggccctgcctccaagaagggccaagcgatctggatctggagcaacaaacttctcactactcaaacaagcaggtgacgtggaggagaatcccgggcctactagtatggactggatttggcgcatccttttccttgtcggcgctgctaccggcgcgcattccttcgaacaactccagctgcaagagtctggccctggcctggtcaagcctagcgaaacactgagcctgacctgtaccgtgtctggcggctctatcagctccagcagctatttctggggctggatcagacaacctcctggcaaaggactggaatggatcggctccatctactacagcggcatcacctactacaaccccagcctgaagtccagagtgaccatctccgtggacaccagcaagaaccagttctccctgaagctgagcagcgtgacagccgccgataccgccgtgtattattgtgccagacatgacggcgctgtggccggcctgtttgattattggggacagggcaccctggtcaccgtgtcatctgctgcctctacaaagggaccctccgtgtttcctctggctcccagcagcaagtctacaagcggaggaacagccgctctgggctgcctggtcaaggattactttcccgagcctgtgaccgtgtcctggaatagcggagcactgacaagcggcgtgcacacctttccagccgtgctgcaaagcagcggcctgtactctctgagcagcgtggtcacagtgcctagctctagcctgggcacccagacctacatctgcaatgtgaaccacaagcctagcaacaccaaggtggacaagagagtggaacccaagagctgtggtacccagagttttgggttgttggaccctaaattgtgctatctgttggacggaatcctgttcatttacggagtgatcctgaccgcattgttcctgcgggttaagttttccagatccgcagacgcacccgcttaccaacaagggcagaaccaactctacaatgaacttaatttggggcggagggaagagtacgacgttctggacaaaaggaggggacgagatcccgagatgggcggaaagcctcagcgaaggaagaatccgcaagaggggctttataacgaactccagaaagataaaatggcagaagcctatagtgagattgggatgaagggagaaaggaggaggggtaaaggtcacgatgggttgtaccaaggattgagcacagccactaaagatacctatgatgcgctccacatgcaggccctgccgccaagacgcgccaagagaagcggatctggcgtgaagcagaccctgaatttcgacctgctgaagctggctggcgacgtggaatccaacccaggcccttctagaggccatatgaccgagtacaagcccacggtgcgcctcgccacccgcgacgacgtccccagggccgtacgcaccctcgccgccgcgttcgccgactaccccgccacgcgccacaccgtcgatccggaccgccacatcgagcgggtcaccgagctgcaagaactcttcctcacgcgcgtcgggctcgacatcggcaaggtgtgggtcgcggacgacggcgccgcggtggcggtctggaccacgccggagagcgtcgaagcgggggcggtgttcgccgagatcggcccgcgcatggccgagttgagcggttcccggctggccgcgcagcaacagatggaaggcctcctggcgccgcaccggcccaaggagcccgcgtggttcctggccaccgtcggcgtctcgcccgaccaccagggcaagggtctgggcagcgccgtcgtgctccccggagtggaggcggccgagcgcgccggggtgcccgccttcctggagacctccgcgccccgcaacctccccttctacgagcggctcggcttcaccgtcaccgccgacgtcgaggtgcccgaaggaccgcgcacctggtgcatgacccgcaagcccggtgcctga

SEQ ID NO: 8327 - DNA, 2457 bp, Artificial Sequence
  Synthetic Polynucloetide
atggccttaccagtgaccgccttgctcctgccgctggccttgctgctccacgccgccaggccgagctacgtgctgacacagcctccatccgtgtctgtggctccaggacagaccgccagaatcacatgcggcggcaacaacatcggcggcaagagcgtgcactggtatcagcagccacctggacaggctccagtggtggtggtgtacgacgacagcgatagacctagcggcatccccgagagattcagcggcagcaattccggcaataccgccacactgaccatcagcagagtggaagctggcgacgaggccgtgtactactgccaagtgtgggacagcagcagcgatcacgtggtgtttggcggcggaacaaagctgacagtgcttctcgaggacctgaagaacgtgttcccacctgaggtggccgtgttcgagcctagcgaggccgagatcagccacacccagaaagccaccctcgtgtgcctggctaccggcttctaccccgaccatgtggaactgtcttggtgggtcaacggcaaagaggtgcacagcggcgtgtctaccgacccccagccactgaaagaacagcccgccctgaacgacagccggtactgcctgagcagcagactgagagtgtccgccaccttctggcagaacccccggaaccacttcagatgccaggtgcagttctacggcctgagcgagaacgacgagtggacccaggacagagccaagcccgtgacccagatcgtgtctgccgaagcctggggcagagccgattgcggatcccagagcttcggcctgctggaccccaagctgtgctacctgctggatggcatcctgttcatctacggcgtgatcctgaccgccctgttcctgagagtgaagttcagcagaagcgccgacgcccctgcctaccagcagggacagaaccaactgtacaacgagctgaacctgggcagacgggaagagtacgacgtgctggacaagcggagaggcagggaccctgagatgggcggaaagccccagcggagaaagaacccccaggaaggactgtataacgaactccagaaagacaagatggccgaagcctacagcgagatcggcatgaagggcgagcggagaagaggcaagggccacgatggcctgtaccagggcctgagcaccgccaccaaggacacctatgacgccctgcacatgcaggccctgcctccaagaagggccaagcgatctggatctggagcaacaaacttctcactactcaaacaagcaggtgacgtggaggagaatcccgggcctactagtatggactggatttggcgcatccttttccttgtcggcgctgctaccggcgcgcattccttcgaacaactccagctgcaagagtctggccctggcctggtcaagcctagcgaaacactgagcctgacctgtaccgtgtctggcggctctatcagctccagcagctatttctggggctggatcagacaacctcctggcaaaggactggaatggatcggctccatctactacagcggcatcacctactacaaccccagcctgaagtccagagtgaccatctccgtggacaccagcaagaaccagttctccctgaagctgagcagcgtgacagccgccgataccgccgtgtattattgtgccagacatgacggcgctgtggccggcctgtttgattattggggacagggcaccctggtcaccgtgtcatctgctacgcgtatccagaaccctgatcctgccgtgtaccagctgcgggatagcaagagcagcgacaagagcgtgtgtctgttcaccgacttcgacagccagaccaacgtgtcccagagcaaggactccgacgtgtacatcaccgataagaccgtgctggacatgcggagcatggacttcaagagcaactccgccgtggcctggtccaacaagtccgatttcgcctgcgccaacgccttcaacaacagcattatccccgaggacacattcttcccaagccccgagagcagctgcggtacccagagttttgggttgttggaccctaaattgtgctatctgttggacggaatcctgttcatttacggagtgatcctgaccgcattgttcctgcgggttaagttttccagatccgcagacgcacccgcttaccaacaagggcagaaccaactctacaatgaacttaatttggggcggagggaagagtacgacgttctggacaaaaggaggggacgagatcccgagatgggcggaaagcctcagcgaaggaagaatccgcaagaggggctttataacgaactccagaaagataaaatggcagaagcctatagtgagattgggatgaagggagaaaggaggaggggtaaaggtcacgatgggttgtaccaaggattgagcacagccactaaagatacctatgatgcgctccacatgcaggccctgccgccaaga

SEQ ID NO: 8328 - DNA, 2457 bp, Artificial Sequence
  Synthetic Polynucloetide
atggccttaccagtgaccgccttgctcctgccgctggccttgctgctccacgccgccaggccgagctacgtgctgacacagcctccatccgtgtctgtggctccaggacagaccgccagaatcacatgcggcggcaacaacatcggcggcaagagcgtgcactggtatcagcagccacctggacaggctccagtggtggtggtgtacgacgacagcgatagacctagcggcatccccgagagattcagcggcagcaattccggcaataccgccacactgaccatcagcagagtggaagctggcgacgaggccgtgtactactgccaagtgtgggacagcagcagcgatcacgtggtgtttggcggcggaacaaagctgacagtgcttctcgaggacctgaagaacgtgttcccacctgaggtggccgtgttcgagcctagcaaggccgagatcgcccacacccagaaagccaccctcgtgtgcctggctaccggcttctaccccgaccatgtggaactgtcttggtgggtcaacggcaaagaggtgcacagcggcgtgtgtaccgacccccagccactgaaagaacagcccgccctgaacgacagccggtactgcctgagcagcagactgagagtgtccgccaccttctggcagaacccccggaaccacttcagatgccaggtgcagttctacggcctgagcgagaacgacgagtggacccaggacagagccaagcccgtgacccagatcgtgtctgccgaagcctggggcagagccgattgcggatcccagagcttcggcctgctggaccccaagctgtgctacctgctggatggcatcctgttcatctacggcgtgatcctgaccgccctgttcctgagagtgaagttcagcagaagcgccgacgcccctgcctaccagcagggacagaaccaactgtacaacgagctgaacctgggcagacgggaagagtacgacgtgctggacaagcggagaggcagggaccctgagatgggcggaaagccccagcggagaaagaacccccaggaaggactgtataacgaactccagaaagacaagatggccgaagcctacagcgagatcggcatgaagggcgagcggagaagaggcaagggccacgatggcctgtaccagggcctgagcaccgccaccaaggacacctatgacgccctgcacatgcaggccctgcctccaagaagggccaagcgatctggatctggagcaacaaacttctcactactcaaacaagcaggtgacgtggaggagaatcccgggcctactagtatggactggatttggcgcatccttttccttgtcggcgctgctaccggcgcgcattccttcgaacaactccagctgcaagagtctggccctggcctggtcaagcctagcgaaacactgagcctgacctgtaccgtgtctggcggctctatcagctccagcagctatttctggggctggatcagacaacctcctggcaaaggactggaatggatcggctccatctactacagcggcatcacctactacaaccccagcctgaagtccagagtgaccatctccgtggacaccagcaagaaccagttctccctgaagctgagcagcgtgacagccgccgataccgccgtgtattattgtgccagacatgacggcgctgtggccggcctgtttgattattggggacagggcaccctggtcaccgtgtcatctgctacgcgtatccagaaccctgatcctgccgtgtaccagctgcgggatagcaagagcagcgacaagagcgtgtgtctgttcaccgacttcgacagccagaccaacgtgtcccagagcaaggactccgacgtgtacatcaccgataagtgcgtgctggacatgcggagcatggacttcaagagcaactccgccgtggcctggtccaacaagtccgatttcgcctgcgccaacgccttcaacaacagcattatccccgaggacacattcttcccaagcagcgacgtgccctgcggtacccagagttttgggttgttggaccctaaattgtgctatctgttggacggaatcctgttcatttacggagtgatcctgaccgcattgttcctgcgggttaagttttccagatccgcagacgcacccgcttaccaacaagggcagaaccaactctacaatgaacttaatttggggcggagggaagagtacgacgttctggacaaaaggaggggacgagatcccgagatgggcggaaagcctcagcgaaggaagaatccgcaagaggggctttataacgaactccagaaagataaaatggcagaagcctatagtgagattgggatgaagggagaaaggaggaggggtaaaggtcacgatgggttgtaccaaggattgagcacagccactaaagatacctatgatgcgctccacatgcaggccctgccgccaaga

SEQ ID NO: 8329 - DNA, 2670 bp, Artificial Sequence
  Synthetic Polynucloetide
atggccttaccagtgaccgccttgctcctgccgctggccttgctgctccacgccgccaggccgagctacgtgctgacacagcctccatccgtgtctgtggctccaggacagaccgccagaatcacatgcggcggcaacaacatcggcggcaagagcgtgcactggtatcagcagccacctggacaggctccagtggtggtggtgtacgacgacagcgatagacctagcggcatccccgagagattcagcggcagcaattccggcaataccgccacactgaccatcagcagagtggaagctggcgacgaggccgtgtactactgccaagtgtgggacagcagcagcgatcacgtggtgtttggcggcggaacaaagctgacagtgcttctcgaggggaaaccaattcccaaccctcttctgggactggattcaaccggcagcggcgaggacctgaagaacgtgttcccacctgaggtggccgtgttcgagcctagcgaggccgagatcagccacacccagaaagccaccctcgtgtgcctggctaccggcttctaccccgaccatgtggaactgtcttggtgggtcaacggcaaagaggtgcacagcggcgtgtctaccgacccccagccactgaaagaacagcccgccctgaacgacagccggtactgcctgagcagcagactgagagtgtccgccaccttctggcagaacccccggaaccacttcagatgccaggtgcagttctacggcctgagcgagaacgacgagtggacccaggacagagccaagcccgtgacccagatcgtgtctgccgaagcctggggcagagccgattgcggatcccagagcttcggcctgctggaccccaagctgtgctacctgctggatggcatcctgttcatctacggcgtgatcctgaccgccctgttcctgagagtgaagttcagcagaagcgccgacgcccctgcctaccagcagggacagaaccaactgtacaacgagctgaacctgggcagacgggaagagtacgacgtgctggacaagcggagaggcagggaccctgagatgggcggaaagccccagcggagaaagaacccccaggaaggactgtataacgaactccagaaagacaagatggccgaagcctacagcgagatcggcatgaagggcgagcggagaagaggcaagggccacgatggcctgtaccagggcctgagcaccgccaccaaggacacctatgacgccctgcacatgcaggccctgcctccaagaagggccaagcgatctggatctggagcaacaaacttctcactactcaaacaagcaggtgacgtggaggagaatcccgggcctactagtatggactggatttggcgcatccttttccttgtcggcgctgctaccggcgcgcattccttcgaacaactccagctgcaagagtctggccctggcctggtcaagcctagcgaaacactgagcctgacctgtaccgtgtctggcggctctatcagctccagcagctatttctggggctggatcagacaacctcctggcaaaggactggaatggatcggctccatctactacagcggcatcacctactacaaccccagcctgaagtccagagtgaccatctccgtggacaccagcaagaaccagttctccctgaagctgagcagcgtgacagccgccgataccgccgtgtattattgtgccagacatgacggcgctgtggccggcctgtttgattattggggacagggcaccctggtcaccgtgtcatctgctacgcgtgagcagaaactgatctcggaagaggatgggagcggcatccagaaccctgatcctgccgtgtaccagctgcgggatagcaagagcagcgacaagagcgtgtgtctgttcaccgacttcgacagccagaccaacgtgtcccagagcaaggactccgacgtgtacatcaccgataagaccgtgctggacatgcggagcatggacttcaagagcaactccgccgtggcctggtccaacaagtccgatttcgcctgcgccaacgccttcaacaacagcattatccccgaggacacattcttcccaagccccgagagcagctgcggtacccagagttttgggttgttggaccctaaattgtgctatctgttggacggaatcctgttcatttacggagtgatcctgaccgcattgttcctgaggagcaagcggtcacggctgctccacagcgattacatgaatatgacaccacgaagaccgggtcctactcgcaaacactaccaaccctacgcacctccccgcgactttgcagcgtaccgatctcgggttaagttttccagatccgcagacgcacccgcttaccaacaagggcagaaccaactctacaatgaacttaatttggggcggagggaagagtacgacgttctggacaaaaggaggggacgagatcccgagatgggcggaaagcctcagcgaaggaagaatccgcaagaggggctttataacgaactccagaaagataaaatggcagaagcctatagtgagattgggatgaagggagaaaggaggaggggtaaaggtcacgatgggttgtaccaaggattgagcacagccactaaagatacctatgatgcgctccacatgcaggccctgccgccaaga

SEQ ID NO: 8330 - DNA, 2793 bp, Artificial Sequence
  Synthetic Polynucloetide
atggccttaccagtgaccgccttgctcctgccgctggccttgctgctccacgccgccaggccgagctacgtgctgacacagcctccatccgtgtctgtggctccaggacagaccgccagaatcacatgcggcggcaacaacatcggcggcaagagcgtgcactggtatcagcagccacctggacaggctccagtggtggtggtgtacgacgacagcgatagacctagcggcatccccgagagattcagcggcagcaattccggcaataccgccacactgaccatcagcagagtggaagctggcgacgaggccgtgtactactgccaagtgtgggacagcagcagcgatcacgtggtgtttggcggcggaacaaagctgacagtgcttctcgaggggaaaccaattcccaaccctcttctgggactggattcaaccggcagcggcgaggacctgaagaacgtgttcccacctgaggtggccgtgttcgagcctagcgaggccgagatcagccacacccagaaagccaccctcgtgtgcctggctaccggcttctaccccgaccatgtggaactgtcttggtgggtcaacggcaaagaggtgcacagcggcgtgtctaccgacccccagccactgaaagaacagcccgccctgaacgacagccggtactgcctgagcagcagactgagagtgtccgccaccttctggcagaacccccggaaccacttcagatgccaggtgcagttctacggcctgagcgagaacgacgagtggacccaggacagagccaagcccgtgacccagatcgtgtctgccgaagcctggggcagagccgattgcggatcccagagcttcggcctgctggaccccaagctgtgctacctgctggatggcatcctgttcatctacggcgtgatcctgaccgccctgttcctgaggagtaagaggagcaggctcctgcacagtgactacatgaacatgactccacgccgccccggacccacccgcaagcattaccagccctatgccccaccacgcgacttcgcagcctatcgctccagagtgaagttcagcagaagcgccgacgcccctgcctaccagcagggacagaaccaactgtacaacgagctgaacctgggcagacgggaagagtacgacgtgctggacaagcggagaggcagggaccctgagatgggcggaaagccccagcggagaaagaacccccaggaaggactgtataacgaactccagaaagacaagatggccgaagcctacagcgagatcggcatgaagggcgagcggagaagaggcaagggccacgatggcctgtaccagggcctgagcaccgccaccaaggacacctatgacgccctgcacatgcaggccctgcctccaagaagggccaagcgatctggatctggagcaacaaacttctcactactcaaacaagcaggtgacgtggaggagaatcccgggcctactagtatggactggatttggcgcatccttttccttgtcggcgctgctaccggcgcgcattccttcgaacaactccagctgcaagagtctggccctggcctggtcaagcctagcgaaacactgagcctgacctgtaccgtgtctggcggctctatcagctccagcagctatttctggggctggatcagacaacctcctggcaaaggactggaatggatcggctccatctactacagcggcatcacctactacaaccccagcctgaagtccagagtgaccatctccgtggacaccagcaagaaccagttctccctgaagctgagcagcgtgacagccgccgataccgccgtgtattattgtgccagacatgacggcgctgtggccggcctgtttgattattggggacagggcaccctggtcaccgtgtcatctgctacgcgtgagcagaaactgatctcggaagaggatgggagcggcatccagaaccctgatcctgccgtgtaccagctgcgggatagcaagagcagcgacaagagcgtgtgtctgttcaccgacttcgacagccagaccaacgtgtcccagagcaaggactccgacgtgtacatcaccgataagaccgtgctggacatgcggagcatggacttcaagagcaactccgccgtggcctggtccaacaagtccgatttcgcctgcgccaacgccttcaacaacagcattatccccgaggacacattcttcccaagccccgagagcagctgcggtacccagagttttgggttgttggaccctaaattgtgctatctgttggacggaatcctgttcatttacggagtgatcctgaccgcattgttcctgaggagcaagcggtcacggctgctccacagcgattacatgaatatgacaccacgaagaccgggtcctactcgcaaacactaccaaccctacgcacctccccgcgactttgcagcgtaccgatctcgggttaagttttccagatccgcagacgcacccgcttaccaacaagggcagaaccaactctacaatgaacttaatttggggcggagggaagagtacgacgttctggacaaaaggaggggacgagatcccgagatgggcggaaagcctcagcgaaggaagaatccgcaagaggggctttataacgaactccagaaagataaaatggcagaagcctatagtgagattgggatgaagggagaaaggaggaggggtaaaggtcacgatgggttgtaccaaggattgagcacagccactaaagatacctatgatgcgctccacatgcaggccctgccgccaaga

SEQ ID NO: 8331 - DNA, 2676 bp, Artificial Sequence
  Synthetic Polynucloetide
atggccttaccagtgaccgccttgctcctgccgctggccttgctgctccacgccgccaggccgagctacgtgctgacacagcctccatccgtgtctgtggctccaggacagaccgccagaatcacatgcggcggcaacaacatcggcggcaagagcgtgcactggtatcagcagccacctggacaggctccagtggtggtggtgtacgacgacagcgatagacctagcggcatccccgagagattcagcggcagcaattccggcaataccgccacactgaccatcagcagagtggaagctggcgacgaggccgtgtactactgccaagtgtgggacagcagcagcgatcacgtggtgtttggcggcggaacaaagctgacagtgcttctcgaggggaaaccaattcccaaccctcttctgggactggattcaaccggcagcggcgaggacctgaagaacgtgttcccacctgaggtggccgtgttcgagcctagcgaggccgagatcagccacacccagaaagccaccctcgtgtgcctggctaccggcttctaccccgaccatgtggaactgtcttggtgggtcaacggcaaagaggtgcacagcggcgtgtctaccgacccccagccactgaaagaacagcccgccctgaacgacagccggtactgcctgagcagcagactgagagtgtccgccaccttctggcagaacccccggaaccacttcagatgccaggtgcagttctacggcctgagcgagaacgacgagtggacccaggacagagccaagcccgtgacccagatcgtgtctgccgaagcctggggcagagccgattgcggatcccagagcttcggcctgctggaccccaagctgtgctacctgctggatggcatcctgttcatctacggcgtgatcctgaccgccctgttcctgagagtgaagttcagcagaagcgccgacgcccctgcctaccagcagggacagaaccaactgtacaacgagctgaacctgggcagacgggaagagtacgacgtgctggacaagcggagaggcagggaccctgagatgggcggaaagccccagcggagaaagaacccccaggaaggactgtataacgaactccagaaagacaagatggccgaagcctacagcgagatcggcatgaagggcgagcggagaagaggcaagggccacgatggcctgtaccagggcctgagcaccgccaccaaggacacctatgacgccctgcacatgcaggccctgcctccaagaagggccaagcgatctggatctggagcaacaaacttctcactactcaaacaagcaggtgacgtggaggagaatcccgggcctactagtatggactggatttggcgcatccttttccttgtcggcgctgctaccggcgcgcattccttcgaacaactccagctgcaagagtctggccctggcctggtcaagcctagcgaaacactgagcctgacctgtaccgtgtctggcggctctatcagctccagcagctatttctggggctggatcagacaacctcctggcaaaggactggaatggatcggctccatctactacagcggcatcacctactacaaccccagcctgaagtccagagtgaccatctccgtggacaccagcaagaaccagttctccctgaagctgagcagcgtgacagccgccgataccgccgtgtattattgtgccagacatgacggcgctgtggccggcctgtttgattattggggacagggcaccctggtcaccgtgtcatctgctacgcgtgagcagaaactgatctcggaagaggatctggggagcggcatccagaaccctgatcctgccgtgtaccagctgcgggatagcaagagcagcgacaagagcgtgtgtctgttcaccgacttcgacagccagaccaacgtgtcccagagcaaggactccgacgtgtacatcaccgataagaccgtgctggacatgcggagcatggacttcaagagcaactccgccgtggcctggtccaacaagtccgatttcgcctgcgccaacgccttcaacaacagcattatccccgaggacacattcttcccaagccccgagagcagctgcggtacccagagttttgggttgttggaccctaaattgtgctatctgttggacggaatcctgttcatttacggagtgatcctgaccgcattgttcctgaagagaggccggaagaagctgctgtacatcttcaagcagcctttcatgcggcccgtgcagaccacccaggaagaggacggctgctcctgccggttccccgaggaagaagaaggcggctgcgagctgcgggttaagttttccagatccgcagacgcacccgcttaccaacaagggcagaaccaactctacaatgaacttaatttggggcggagggaagagtacgacgttctggacaaaaggaggggacgagatcccgagatgggcggaaagcctcagcgaaggaagaatccgcaagaggggctttataacgaactccagaaagataaaatggcagaagcctatagtgagattgggatgaagggagaaaggaggaggggtaaaggtcacgatgggttgtaccaaggattgagcacagccactaaagatacctatgatgcgctccacatgcaggccctgccgccaaga

SEQ ID NO: 8332 - DNA, 2802 bp, Artificial Sequence
  Synthetic Polynucloetide
atggccttaccagtgaccgccttgctcctgccgctggccttgctgctccacgccgccaggccgagctacgtgctgacacagcctccatccgtgtctgtggctccaggacagaccgccagaatcacatgcggcggcaacaacatcggcggcaagagcgtgcactggtatcagcagccacctggacaggctccagtggtggtggtgtacgacgacagcgatagacctagcggcatccccgagagattcagcggcagcaattccggcaataccgccacactgaccatcagcagagtggaagctggcgacgaggccgtgtactactgccaagtgtgggacagcagcagcgatcacgtggtgtttggcggcggaacaaagctgacagtgcttctcgaggggaaaccaattcccaaccctcttctgggactggattcaaccggcagcggcgaggacctgaagaacgtgttcccacctgaggtggccgtgttcgagcctagcgaggccgagatcagccacacccagaaagccaccctcgtgtgcctggctaccggcttctaccccgaccatgtggaactgtcttggtgggtcaacggcaaagaggtgcacagcggcgtgtctaccgacccccagccactgaaagaacagcccgccctgaacgacagccggtactgcctgagcagcagactgagagtgtccgccaccttctggcagaacccccggaaccacttcagatgccaggtgcagttctacggcctgagcgagaacgacgagtggacccaggacagagccaagcccgtgacccagatcgtgtctgccgaagcctggggcagagccgattgcggatcccagagcttcggcctgctggaccccaagctgtgctacctgctggatggcatcctgttcatctacggcgtgatcctgaccgccctgttcctgaaacggggcagaaagaaactcctgtatatattcaaacaaccatttatgagaccagtacaaactactcaagaggaagatggctgtagctgccgatttccagaagaagaagaaggaggatgtgaactgagagtgaagttcagcagaagcgccgacgcccctgcctaccagcagggacagaaccaactgtacaacgagctgaacctgggcagacgggaagagtacgacgtgctggacaagcggagaggcagggaccctgagatgggcggaaagccccagcggagaaagaacccccaggaaggactgtataacgaactccagaaagacaagatggccgaagcctacagcgagatcggcatgaagggcgagcggagaagaggcaagggccacgatggcctgtaccagggcctgagcaccgccaccaaggacacctatgacgccctgcacatgcaggccctgcctccaagaagggccaagcgatctggatctggagcaacaaacttctcactactcaaacaagcaggtgacgtggaggagaatcccgggcctactagtatggactggatttggcgcatccttttccttgtcggcgctgctaccggcgcgcattccttcgaacaactccagctgcaagagtctggccctggcctggtcaagcctagcgaaacactgagcctgacctgtaccgtgtctggcggctctatcagctccagcagctatttctggggctggatcagacaacctcctggcaaaggactggaatggatcggctccatctactacagcggcatcacctactacaaccccagcctgaagtccagagtgaccatctccgtggacaccagcaagaaccagttctccctgaagctgagcagcgtgacagccgccgataccgccgtgtattattgtgccagacatgacggcgctgtggccggcctgtttgattattggggacagggcaccctggtcaccgtgtcatctgctacgcgtgagcagaaactgatctcggaagaggatctggggagcggcatccagaaccctgatcctgccgtgtaccagctgcgggatagcaagagcagcgacaagagcgtgtgtctgttcaccgacttcgacagccagaccaacgtgtcccagagcaaggactccgacgtgtacatcaccgataagaccgtgctggacatgcggagcatggacttcaagagcaactccgccgtggcctggtccaacaagtccgatttcgcctgcgccaacgccttcaacaacagcattatccccgaggacacattcttcccaagccccgagagcagctgcggtacccagagttttgggttgttggaccctaaattgtgctatctgttggacggaatcctgttcatttacggagtgatcctgaccgcattgttcctgaagagaggccggaagaagctgctgtacatcttcaagcagcctttcatgcggcccgtgcagaccacccaggaagaggacggctgctcctgccggttccccgaggaagaagaaggcggctgcgagctgcgggttaagttttccagatccgcagacgcacccgcttaccaacaagggcagaaccaactctacaatgaacttaatttggggcggagggaagagtacgacgttctggacaaaaggaggggacgagatcccgagatgggcggaaagcctcagcgaaggaagaatccgcaagaggggctttataacgaactccagaaagataaaatggcagaagcctatagtgagattgggatgaagggagaaaggaggaggggtaaaggtcacgatgggttgtaccaaggattgagcacagccactaaagatacctatgatgcgctccacatgcaggccctgccgccaaga

SEQ ID NO: 8333 - DNA, 2475 bp, Artificial Sequence
  Synthetic Polynucloetide
atggccttaccagtgaccgccttgctcctgccgctggccttgctgctccacgccgccaggccgagctacgtgctgacacagcctccatccgtgtctgtggctccaggacagaccgccagaatcacatgcggcggcaacaacatcggcggcaagagcgtgcactggtatcagcagccacctggacaggctccagtggtggtggtgtacgacgacagcgatagacctagcggcatccccgagagattcagcggcagcaattccggcaataccgccacactgaccatcagcagagtggaagctggcgacgaggccgtgtactactgccaagtgtgggacagcagcagcgatcacgtggtgtttggcggcggaacaaagctgacagtgcttctcgagcagagcttcggcctgctggaccccaagctgtgctacctgctggatggcatcctgttcatctacggcgtgatcctgaccgccctgttcctgagagtgaagttcagcagaagcgccgacgcccctgcctaccagcagggacagaaccaactgtacaacgagctgaacctgggcagacgggaagagtacgacgtgctggacaagcggagaggcagggaccctgagatgggcggaaagccccagcggagaaagaacccccaggaaggactgtataacgaactccagaaagacaagatggccgaagcctacagcgagatcggcatgaagggcgagcggagaagaggcaagggccacgatggcctgtaccagggcctgagcaccgccaccaaggacacctatgacgccctgcacatgcaggccctgcctccaagaagggccaagcgatctggatctggagcaacaaacttctcactactcaaacaagcaggtgacgtggaggagaatcccgggcctactagtatggactggatttggcgcatccttttccttgtcggcgctgctaccggcgcgcattccttcgaacaactccagctgcaagagtctggccctggcctggtcaagcctagcgaaacactgagcctgacctgtaccgtgtctggcggctctatcagctccagcagctatttctggggctggatcagacaacctcctggcaaaggactggaatggatcggctccatctactacagcggcatcacctactacaaccccagcctgaagtccagagtgaccatctccgtggacaccagcaagaaccagttctccctgaagctgagcagcgtgacagccgccgataccgccgtgtattattgtgccagacatgacggcgctgtggccggcctgtttgattattggggacagggcaccctggtcaccgtgtcatctgctacgcgtcagagttttgggttgttggaccctaaattgtgctatctgttggacggaatcctgttcatttacggagtgatcctgaccgcattgttcctgcgggttaagttttccagatccgcagacgcacccgcttaccaacaagggcagaaccaactctacaatgaacttaatttggggcggagggaagagtacgacgttctggacaaaaggaggggacgagatcccgagatgggcggaaagcctcagcgaaggaagaatccgcaagaggggctttataacgaactccagaaagataaaatggcagaagcctatagtgagattgggatgaagggagaaaggaggaggggtaaaggtcacgatgggttgtaccaaggattgagcacagccactaaagatacctatgatgcgctccacatgcaggccctgccgccaagacgcgccaagagaagcggatctggcgtgaagcagaccctgaatttcgacctgctgaagctggctggcgacgtggaatccaacccaggcccttctagaggccatatgaccgagtacaagcccacggtgcgcctcgccacccgcgacgacgtccccagggccgtacgcaccctcgccgccgcgttcgccgactaccccgccacgcgccacaccgtcgatccggaccgccacatcgagcgggtcaccgagctgcaagaactcttcctcacgcgcgtcgggctcgacatcggcaaggtgtgggtcgcggacgacggcgccgcggtggcggtctggaccacgccggagagcgtcgaagcgggggcggtgttcgccgagatcggcccgcgcatggccgagttgagcggttcccggctggccgcgcagcaacagatggaaggcctcctggcgccgcaccggcccaaggagcccgcgtggttcctggccaccgtcggcgtctcgcccgaccaccagggcaagggtctgggcagcgccgtcgtgctccccggagtggaggcggccgagcgcgccggggtgcccgccttcctggagacctccgcgccccgcaacctccccttctacgagcggctcggcttcaccgtcaccgccgacgtcgaggtgcccgaaggaccgcgcacctggtgcatgacccgcaagcccggtgcctga

SEQ ID NO: 8334 - DNA, 1947 bp, Artificial Sequence
  Synthetic Polynucloetide
atggccttaccagtgaccgccttgctcctgccgctggccttgctgctccacgccgccaggccgagctacgtgctgacacagcctccatccgtgtctgtggctccaggacagaccgccagaatcacatgcggcggcaacaacatcggcggcaagagcgtgcactggtatcagcagccacctggacaggctccagtggtggtggtgtacgacgacagcgatagacctagcggcatccccgagagattcagcggcagcaattccggcaataccgccacactgaccatcagcagagtggaagctggcgacgaggccgtgtactactgccaagtgtgggacagcagcagcgatcacgtggtgtttggcggcggaacaaagctgacagtgcttctcgagggacagcctaaggccaatcctaccgtgacactgttccctccaagcagcgaagaactccaggccaacaaggccacacttgtgtgcctgatctccgacttctaccctggggctgtgacagtggcttggaaggccgatggatctcctgtgaaagccggcgtggaaaccaccaagccatccaagcagagcaacaacaaatacgccgccagctcctacctgagcctgacacctgagcagtggaagtcccacagatcctacagctgccaagtgacccacgaaggcagcaccgtggaaaagacagtggcccctacagagtgcagccccatcaagaccgatgtgattacaatggaccccaaggacaactgctccaaggacgccaacgataccctgctgctccagctgaccaacaccagcgcctactacatgtacttgttgctgctgctgaagtccgtggtgtacttcgccatcatcacatgctgcctgctgcggagaaccgccttctgctgcaacggcgagaagtctagggccaagcgatctggatctggagcaacaaacttctcactactcaaacaagcaggtgacgtggaggagaatcccgggcctactagtatggactggatttggcgcatccttttccttgtcggcgctgctaccggcgcgcattccttcgaacaactccagctgcaagagtctggccctggcctggtcaagcctagcgaaacactgagcctgacctgtaccgtgtctggcggctctatcagctccagcagctatttctggggctggatcagacaacctcctggcaaaggactggaatggatcggctccatctactacagcggcatcacctactacaaccccagcctgaagtccagagtgaccatctccgtggacaccagcaagaaccagttctccctgaagctgagcagcgtgacagccgccgataccgccgtgtattattgtgccagacatgacggcgctgtggccggcctgtttgattattggggacagggcaccctggtcaccgtgtcatctgctacgcgtgcctctacaaagggaccctccgtgtttcctctggctcccagcagcaagtctacaagcggaggaacagccgctctgggctgcctggtcaaggattactttcccgagcctgtgaccgtgtcctggaatagcggagcactgacaagcggcgtgcacacctttccagccgtgctgcaaagcagcggcctgtactctctgagcagcgtggtcacagtgcctagctctagcctgggcacccagacctacatctgcaatgtgaaccacaagcctagcaacaccaaggtggacaagagagtggaacccaagagctgtgaagtgaaaaccgactccaccgaccacgtgaagcccaaagagacagagaacaccaagcagcccagcaagagctgccacaagcccaaggccatcgtgcacaccgagaaagtgaacatgatgagcctgaccgtgctgggcctgcggatgctgttcgccaaaaccgtggccgtgaacttcctgctgaccgccaagctgttcttcctc

SEQ ID NO: 8335 - DNA, 1881 bp, Artificial Sequence
  Synthetic Polynucloetide
atggccttaccagtgaccgccttgctcctgccgctggccttgctgctccacgccgccaggccgagctacgtgctgacacagcctccatccgtgtctgtggctccaggacagaccgccagaatcacatgcggcggcaacaacatcggcggcaagagcgtgcactggtatcagcagccacctggacaggctccagtggtggtggtgtacgacgacagcgatagacctagcggcatccccgagagattcagcggcagcaattccggcaataccgccacactgaccatcagcagagtggaagctggcgacgaggccgtgtactactgccaagtgtgggacagcagcagcgatcacgtggtgtttggcggcggaacaaagctgacagtgcttctcgagggacagcctaaggccaatcctaccgtgacactgttccctccaagcagcgaagaactccaggccaacaaggccacacttgtgtgcctgatctccgacttctaccctggggctgtgacagtggcttggaaggccgatggatctcctgtgaaagccggcgtggaaaccaccaagccatccaagcagagcaacaacaaatacgccgccagctcctacctgagcctgacacctgagcagtggaagtcccacagatcctacagctgccaagtgacccacgaaggcagcaccgtggaaaagacagtggcccctacagagtgcagcggcagagccgattgcggcatcaccagcgccagctaccaccagggcgtgctgagcgccaccatcctgtacgagatcctgctgggcaaggccaccctgtacgccgtgctggtgtctgccctggtgctgatggctatggtcaagcggaaggacagccggggaagggccaagcgatctggatctggagcaacaaacttctcactactcaaacaagcaggtgacgtggaggagaatcccgggcctactagtatggactggatttggcgcatccttttccttgtcggcgctgctaccggcgcgcattccttcgaacaactccagctgcaagagtctggccctggcctggtcaagcctagcgaaacactgagcctgacctgtaccgtgtctggcggctctatcagctccagcagctatttctggggctggatcagacaacctcctggcaaaggactggaatggatcggctccatctactacagcggcatcacctactacaaccccagcctgaagtccagagtgaccatctccgtggacaccagcaagaaccagttctccctgaagctgagcagcgtgacagccgccgataccgccgtgtattattgtgccagacatgacggcgctgtggccggcctgtttgattattggggacagggcaccctggtcaccgtgtcatctgctacgcgtgcctctacaaagggaccctccgtgtttcctctggctcccagcagcaagtctacaagcggaggaacagccgctctgggctgcctggtcaaggattactttcccgagcctgtgaccgtgtcctggaatagcggagcactgacaagcggcgtgcacacctttccagccgtgctgcaaagcagcggcctgtactctctgagcagcgtggtcacagtgcctagctctagcctgggcacccagacctacatctgcaatgtgaaccacaagcctagcaacaccaaggtggacaagagagtggaacccaagagctgtatccccgaggacacattcttcccaagcagcgacgtgccctgcgacgtgaagctggtggaaaagagcttcgagacagacaccaacctgaacttccagaacctgagcgtgatcggcttcagaatcctgctgctgaaagtggccggctttaacctgctgatgaccctgcggctgtggtccagc

SEQ ID NO: 8336 - DNA, 1881 bp, Artificial Sequence
  Synthetic Polynucloetide
atggccttaccagtgaccgccttgctcctgccgctggccttgctgctccacgccgccaggccgagctacgtgctgacacagcctccatccgtgtctgtggctccaggacagaccgccagaatcacatgcggcggcaacaacatcggcggcaagagcgtgcactggtatcagcagccacctggacaggctccagtggtggtggtgtacgacgacagcgatagacctagcggcatccccgagagattcagcggcagcaattccggcaataccgccacactgaccatcagcagagtggaagctggcgacgaggccgtgtactactgccaagtgtgggacagcagcagcgatcacgtggtgtttggcggcggaacaaagctgacagtgcttctcgagggacagcctaaggccaatcctaccgtgacactgttccctccaagcagcgaagaactccaggccaacaaggccacacttgtgtgcctgatctccgacttctaccctggggctgtgacagtggcttggaaggccgatggatctcctgtgaaagccggcgtggaaaccaccaagccatccaagcagagcaacaacaaatacgccgccagctcctacctgagcctgacacctgagcagtggaagtcccacagatcctacagctgccaagtgacccacgaaggcagcaccgtggaaaagacagtggcccctacagagtgcagcggcagagccgattgcggctttaccagcgagagctaccagcagggcgtgctgagcgccaccatcctgtacgagatcctgctgggcaaggccaccctgtacgccgtgctggtgtctgccctggtgctgatggctatggtcaagcggaaggacagccggggaagggccaagcgatctggatctggagcaacaaacttctcactactcaaacaagcaggtgacgtggaggagaatcccgggcctactagtatggactggatttggcgcatccttttccttgtcggcgctgctaccggcgcgcattccttcgaacaactccagctgcaagagtctggccctggcctggtcaagcctagcgaaacactgagcctgacctgtaccgtgtctggcggctctatcagctccagcagctatttctggggctggatcagacaacctcctggcaaaggactggaatggatcggctccatctactacagcggcatcacctactacaaccccagcctgaagtccagagtgaccatctccgtggacaccagcaagaaccagttctccctgaagctgagcagcgtgacagccgccgataccgccgtgtattattgtgccagacatgacggcgctgtggccggcctgtttgattattggggacagggcaccctggtcaccgtgtcatctgctacgcgtgcctctacaaagggaccctccgtgtttcctctggctcccagcagcaagtctacaagcggaggaacagccgctctgggctgcctggtcaaggattactttcccgagcctgtgaccgtgtcctggaatagcggagcactgacaagcggcgtgcacacctttccagccgtgctgcaaagcagcggcctgtactctctgagcagcgtggtcacagtgcctagctctagcctgggcacccagacctacatctgcaatgtgaaccacaagcctagcaacaccaaggtggacaagagagtggaacccaagagctgtatccccgaggacacattcttcccaagccccgagagcagctgcgacgtgaagctggtggaaaagagcttcgagacagacaccaacctgaacttccagaacctgagcgtgatcggcttcagaatcctgctgctgaaagtggccggctttaacctgctgatgaccctgcggctgtggtccagc

SEQ ID NO: 8337 - DNA, 1359 bp, Artificial Sequence
  Synthetic Polynucloetide
atggccttaccagtgaccgccttgctcctgccgctggccttgctgctccacgccgccaggccgagctacgtgctgacacagcctccatccgtgtctgtggctccaggacagaccgccagaatcacatgcggcggcaacaacatcggcggcaagagcgtgcactggtatcagcagccacctggacaggctccagtggtggtggtgtacgacgacagcgatagacctagcggcatccccgagagattcagcggcagcaattccggcaataccgccacactgaccatcagcagagtggaagctggcgacgaggccgtgtactactgccaagtgtgggacagcagcagcgatcacgtggtgtttggcggcggaacaaagctgacagtgcttggcggaggcggaagtggaggcggaggatctggcggcggaggctctcaactccagctgcaagagtctggccctggcctggtcaagcctagcgaaacactgagcctgacctgtaccgtgtctggcggctctatcagctccagcagctatttctggggctggatcagacaacctcctggcaaaggactggaatggatcggctccatctactacagcggcatcacctactacaaccccagcctgaagtccagagtgaccatctccgtggacaccagcaagaaccagttctccctgaagctgagcagcgtgacagccgccgataccgccgtgtattattgtgccagacatgacggcgctgtggccggcctgtttgattattggggacagggcaccctggtcaccgtgtcatctgctacgcgtgacggtaacgaggagatgggaggaatcactcaaaccccttacaaagtctcaatttcaggaacaactgttatccttacatgtccccagtatcctggcagcgagatcctttggcagcataacgacaagaatatagggggagatgaagacgataagaatatcggatctgacgaggatcacttgagcctgaaagagttctccgagcttgaacaaagcggatattatgtgtgctatccgcgcgggtcaaagccggaagacgctaacttttacctttatctccgagccagagtgtgcgaaaattgcatggaaatggacgttatgtccgttgctacaatagttatcgtagatatatgcatcacgggtggactgcttctgctggtttattattggtccaagaatagaaaggccaaagctaaacccgtgaccagaggcgctggcgcaggcggaaggcaaaggggacaaaacaaagaacggccaccaccagtgccaaatccagattatgagcctattcggaaaggacagagggacctgtactctggcctgaatcagagaagaatc

SEQ ID NO: 8338 - DNA, 1254 bp, Artificial Sequence
  Synthetic Polynucloetide
atggccttaccagtgaccgccttgctcctgccgctggccttgctgctccacgccgccaggccgagctacgtgctgacacagcctccatccgtgtctgtggctccaggacagaccgccagaatcacatgcggcggcaacaacatcggcggcaagagcgtgcactggtatcagcagccacctggacaggctccagtggtggtggtgtacgacgacagcgatagacctagcggcatccccgagagattcagcggcagcaattccggcaataccgccacactgaccatcagcagagtggaagctggcgacgaggccgtgtactactgccaagtgtgggacagcagcagcgatcacgtggtgtttggcggcggaacaaagctgacagtgcttggcggaggcggaagtggaggcggaggatctggcggcggaggctctcaactccagctgcaagagtctggccctggcctggtcaagcctagcgaaacactgagcctgacctgtaccgtgtctggcggctctatcagctccagcagctatttctggggctggatcagacaacctcctggcaaaggactggaatggatcggctccatctactacagcggcatcacctactacaaccccagcctgaagtccagagtgaccatctccgtggacaccagcaagaaccagttctccctgaagctgagcagcgtgacagccgccgataccgccgtgtattattgtgccagacatgacggcgctgtggccggcctgtttgattattggggacagggcaccctggtcaccgtgtcatctgctacgcgtttcaagatccccatcgaggaactggaagatcgggtgttcgtgaactgcaacacctctatcacctgggtggaaggcaccgtgggaacactgctgagcgacatcaccagactggacctcggcaagcggattctggaccctcggggcatctacagatgcaacggcaccgacatctacaaggacaaagaaagcaccgtgcaggtccactacagaatgtgccagtcctgcgtggaactggaccctgctacagtggccggcatcatcgtgaccgatgtgatcgctactctgctgctggctctgggagtgttctgcttcgccggacacgaaacaggcagactgtctggcgctgccgatacacaggccctgctgagaaacgaccaagtgtatcagcccctgcgcgacagagatgatgcccagtattctcacctcggcggcaactgggctagaaacaag

SEQ ID NO: 8339 - DNA, 1284 bp, Artificial Sequence
  Synthetic Polynucloetide
atggccttaccagtgaccgccttgctcctgccgctggccttgctgctccacgccgccaggccgagctacgtgctgacacagcctccatccgtgtctgtggctccaggacagaccgccagaatcacatgcggcggcaacaacatcggcggcaagagcgtgcactggtatcagcagccacctggacaggctccagtggtggtggtgtacgacgacagcgatagacctagcggcatccccgagagattcagcggcagcaattccggcaataccgccacactgaccatcagcagagtggaagctggcgacgaggccgtgtactactgccaagtgtgggacagcagcagcgatcacgtggtgtttggcggcggaacaaagctgacagtgcttggcggaggcggaagtggaggcggaggatctggcggcggaggctctcaactccagctgcaagagtctggccctggcctggtcaagcctagcgaaacactgagcctgacctgtaccgtgtctggcggctctatcagctccagcagctatttctggggctggatcagacaacctcctggcaaaggactggaatggatcggctccatctactacagcggcatcacctactacaaccccagcctgaagtccagagtgaccatctccgtggacaccagcaagaaccagttctccctgaagctgagcagcgtgacagccgccgataccgccgtgtattattgtgccagacatgacggcgctgtggccggcctgtttgattattggggacagggcaccctggtcaccgtgtcatctgctacgcgtcagagcatcaagggcaaccacctggtcaaggtgtacgactaccaagaggacggcagcgtgctgctgacatgtgatgccgaggccaagaacatcacctggtttaaggacggcaagatgatcggcttcctgaccgaggacaagaagaagtggaacctgggcagcaacgctaaggaccccagaggcatgtatcagtgcaagggcagccagaacaagagcaagcccctccaggtgtactaccggatgtgccagaactgcatcgagctgaacgccgctaccatcagcggctttctgttcgccgagatcgtgtccatcttcgtgctggccgtgggcgtgtactttatcgctggacaggatggcgtgcggcagagcagagcttccgataagcaaaccctgctgcctaacgaccagctgtaccagcctctgaaggacagagaggacgaccagtacagccacctccagggcaatcagctgagaagaaac

SEQ ID NO: 8340 - DNA, 1233 bp, Artificial Sequence
  Synthetic Polynucloetide
atggccttaccagtgaccgccttgctcctgccgctggccttgctgctccacgccgccaggccgagctacgtgctgacacagcctccatccgtgtctgtggctccaggacagaccgccagaatcacatgcggcggcaacaacatcggcggcaagagcgtgcactggtatcagcagccacctggacaggctccagtggtggtggtgtacgacgacagcgatagacctagcggcatccccgagagattcagcggcagcaattccggcaataccgccacactgaccatcagcagagtggaagctggcgacgaggccgtgtactactgccaagtgtgggacagcagcagcgatcacgtggtgtttggcggcggaacaaagctgacagtgcttggcggaggcggaagtggaggcggaggatctggcggcggaggctctcaactccagctgcaagagtctggccctggcctggtcaagcctagcgaaacactgagcctgacctgtaccgtgtctggcggctctatcagctccagcagctatttctggggctggatcagacaacctcctggcaaaggactggaatggatcggctccatctactacagcggcatcacctactacaaccccagcctgaagtccagagtgaccatctccgtggacaccagcaagaaccagttctccctgaagctgagcagcgtgacagccgccgataccgccgtgtattattgtgccagacatgacggcgctgtggccggcctgtttgattattggggacagggcaccctggtcaccgtgtcatctgctacgcgtcagagttttgggttgttggaccctaaattgtgctatctgttggacggaatcctgttcatttacggagtgatcctgaccgcattgttcctgcgggttaagttttccagatccgcagacgcacccgcttaccaacaagggcagaaccaactctacaatgaacttaatttggggcggagggaagagtacgacgttctggacaaaaggaggggacgagatcccgagatgggcggaaagcctcagcgaaggaagaatccgcaagaggggctttataacgaactccagaaagataaaatggcagaagcctatagtgagattgggatgaagggagaaaggaggaggggtaaaggtcacgatgggttgtaccaaggattgagcacagccactaaagatacctatgatgcgctccacatgcaggccctgccgccaaga

SEQ ID NO: 8341 - DNA, 1359 bp, Artificial Sequence
  Synthetic Polynucloetide
atggccttaccagtgaccgccttgctcctgccgctggccttgctgctccacgccgccaggccgcaactccagctgcaagagtctggccctggcctggtcaagcctagcgaaacactgagcctgacctgtaccgtgtctggcggctctatcagctccagcagctatttctggggctggatcagacaacctcctggcaaaggactggaatggatcggctccatctactacagcggcatcacctactacaaccccagcctgaagtccagagtgaccatctccgtggacaccagcaagaaccagttctccctgaagctgagcagcgtgacagccgccgataccgccgtgtattattgtgccagacatgacggcgctgtggccggcctgtttgattattggggacagggcaccctggtcaccgtgtcatctgctggcggaggcggaagtggaggcggaggatctggcggcggaggctctagctacgtgctgacacagcctccatccgtgtctgtggctccaggacagaccgccagaatcacatgcggcggcaacaacatcggcggcaagagcgtgcactggtatcagcagccacctggacaggctccagtggtggtggtgtacgacgacagcgatagacctagcggcatccccgagagattcagcggcagcaattccggcaataccgccacactgaccatcagcagagtggaagctggcgacgaggccgtgtactactgccaagtgtgggacagcagcagcgatcacgtggtgtttggcggcggaacaaagctgacagtgcttacgcgtgacggtaacgaggagatgggaggaatcactcaaaccccttacaaagtctcaatttcaggaacaactgttatccttacatgtccccagtatcctggcagcgagatcctttggcagcataacgacaagaatatagggggagatgaagacgataagaatatcggatctgacgaggatcacttgagcctgaaagagttctccgagcttgaacaaagcggatattatgtgtgctatccgcgcgggtcaaagccggaagacgctaacttttacctttatctccgagccagagtgtgcgaaaattgcatggaaatggacgttatgtccgttgctacaatagttatcgtagatatatgcatcacgggtggactgcttctgctggtttattattggtccaagaatagaaaggccaaagctaaacccgtgaccagaggcgctggcgcaggcggaaggcaaaggggacaaaacaaagaacggccaccaccagtgccaaatccagattatgagcctattcggaaaggacagagggacctgtactctggcctgaatcagagaagaatc

SEQ ID NO: 8342 - DNA, 1254 bp, Artificial Sequence
  Synthetic Polynucloetide
atggccttaccagtgaccgccttgctcctgccgctggccttgctgctccacgccgccaggccgcaactccagctgcaagagtctggccctggcctggtcaagcctagcgaaacactgagcctgacctgtaccgtgtctggcggctctatcagctccagcagctatttctggggctggatcagacaacctcctggcaaaggactggaatggatcggctccatctactacagcggcatcacctactacaaccccagcctgaagtccagagtgaccatctccgtggacaccagcaagaaccagttctccctgaagctgagcagcgtgacagccgccgataccgccgtgtattattgtgccagacatgacggcgctgtggccggcctgtttgattattggggacagggcaccctggtcaccgtgtcatctgctggcggaggcggaagtggaggcggaggatctggcggcggaggctctagctacgtgctgacacagcctccatccgtgtctgtggctccaggacagaccgccagaatcacatgcggcggcaacaacatcggcggcaagagcgtgcactggtatcagcagccacctggacaggctccagtggtggtggtgtacgacgacagcgatagacctagcggcatccccgagagattcagcggcagcaattccggcaataccgccacactgaccatcagcagagtggaagctggcgacgaggccgtgtactactgccaagtgtgggacagcagcagcgatcacgtggtgtttggcggcggaacaaagctgacagtgcttacgcgtttcaagatccccatcgaggaactggaagatcgggtgttcgtgaactgcaacacctctatcacctgggtggaaggcaccgtgggaacactgctgagcgacatcaccagactggacctcggcaagcggattctggaccctcggggcatctacagatgcaacggcaccgacatctacaaggacaaagaaagcaccgtgcaggtccactacagaatgtgccagtcctgcgtggaactggaccctgctacagtggccggcatcatcgtgaccgatgtgatcgctactctgctgctggctctgggagtgttctgcttcgccggacacgaaacaggcagactgtctggcgctgccgatacacaggccctgctgagaaacgaccaagtgtatcagcccctgcgcgacagagatgatgcccagtattctcacctcggcggcaactgggctagaaacaag

SEQ ID NO: 8343 - DNA, 1284 bp, Artificial Sequence
  Synthetic Polynucloetide
atggccttaccagtgaccgccttgctcctgccgctggccttgctgctccacgccgccaggccgcaactccagctgcaagagtctggccctggcctggtcaagcctagcgaaacactgagcctgacctgtaccgtgtctggcggctctatcagctccagcagctatttctggggctggatcagacaacctcctggcaaaggactggaatggatcggctccatctactacagcggcatcacctactacaaccccagcctgaagtccagagtgaccatctccgtggacaccagcaagaaccagttctccctgaagctgagcagcgtgacagccgccgataccgccgtgtattattgtgccagacatgacggcgctgtggccggcctgtttgattattggggacagggcaccctggtcaccgtgtcatctgctggcggaggcggaagtggaggcggaggatctggcggcggaggctctagctacgtgctgacacagcctccatccgtgtctgtggctccaggacagaccgccagaatcacatgcggcggcaacaacatcggcggcaagagcgtgcactggtatcagcagccacctggacaggctccagtggtggtggtgtacgacgacagcgatagacctagcggcatccccgagagattcagcggcagcaattccggcaataccgccacactgaccatcagcagagtggaagctggcgacgaggccgtgtactactgccaagtgtgggacagcagcagcgatcacgtggtgtttggcggcggaacaaagctgacagtgcttacgcgtcagagcatcaagggcaaccacctggtcaaggtgtacgactaccaagaggacggcagcgtgctgctgacatgtgatgccgaggccaagaacatcacctggtttaaggacggcaagatgatcggcttcctgaccgaggacaagaagaagtggaacctgggcagcaacgctaaggaccccagaggcatgtatcagtgcaagggcagccagaacaagagcaagcccctccaggtgtactaccggatgtgccagaactgcatcgagctgaacgccgctaccatcagcggctttctgttcgccgagatcgtgtccatcttcgtgctggccgtgggcgtgtactttatcgctggacaggatggcgtgcggcagagcagagcttccgataagcaaaccctgctgcctaacgaccagctgtaccagcctctgaaggacagagaggacgaccagtacagccacctccagggcaatcagctgagaagaaac

SEQ ID NO: 8344 - DNA, 1233 bp, Artificial Sequence
  Synthetic Polynucloetide
atggccttaccagtgaccgccttgctcctgccgctggccttgctgctccacgccgccaggccgcaactccagctgcaagagtctggccctggcctggtcaagcctagcgaaacactgagcctgacctgtaccgtgtctggcggctctatcagctccagcagctatttctggggctggatcagacaacctcctggcaaaggactggaatggatcggctccatctactacagcggcatcacctactacaaccccagcctgaagtccagagtgaccatctccgtggacaccagcaagaaccagttctccctgaagctgagcagcgtgacagccgccgataccgccgtgtattattgtgccagacatgacggcgctgtggccggcctgtttgattattggggacagggcaccctggtcaccgtgtcatctgctggcggaggcggaagtggaggcggaggatctggcggcggaggctctagctacgtgctgacacagcctccatccgtgtctgtggctccaggacagaccgccagaatcacatgcggcggcaacaacatcggcggcaagagcgtgcactggtatcagcagccacctggacaggctccagtggtggtggtgtacgacgacagcgatagacctagcggcatccccgagagattcagcggcagcaattccggcaataccgccacactgaccatcagcagagtggaagctggcgacgaggccgtgtactactgccaagtgtgggacagcagcagcgatcacgtggtgtttggcggcggaacaaagctgacagtgcttacgcgtcagagttttgggttgttggaccctaaattgtgctatctgttggacggaatcctgttcatttacggagtgatcctgaccgcattgttcctgcgggttaagttttccagatccgcagacgcacccgcttaccaacaagggcagaaccaactctacaatgaacttaatttggggcggagggaagagtacgacgttctggacaaaaggaggggacgagatcccgagatgggcggaaagcctcagcgaaggaagaatccgcaagaggggctttataacgaactccagaaagataaaatggcagaagcctatagtgagattgggatgaagggagaaaggaggaggggtaaaggtcacgatgggttgtaccaaggattgagcacagccactaaagatacctatgatgcgctccacatgcaggccctgccgccaaga

SEQ ID NO: 8345 - DNA, 1935 bp, Artificial Sequence
  Synthetic Polynucloetide
atggccttaccagtgaccgccttgctcctgccgctggccttgctgctccacgccgccaggccgagctacgtgctgacacagcctccatccgtgtctgtggctccaggacagaccgccagaatcacatgcggcggcaacaacatcggcggcaagagcgtgcactggtatcagcagccacctggacaggctccagtggtggtggtgtacgacgacagcgatagacctagcggcatccccgagagattcagcggcagcaattccggcaataccgccacactgaccatcagcagagtggaagctggcgacgaggccgtgtactactgccaagtgtgggacagcagcagcgatcacgtggtgtttggcggcggaacaaagctgacagtgcttggcggaggcggaagtggaggcggaggatctggcggcggaggctctcaactccagctgcaagagtctggccctggcctggtcaagcctagcgaaacactgagcctgacctgtaccgtgtctggcggctctatcagctccagcagctatttctggggctggatcagacaacctcctggcaaaggactggaatggatcggctccatctactacagcggcatcacctactacaaccccagcctgaagtccagagtgaccatctccgtggacaccagcaagaaccagttctccctgaagctgagcagcgtgacagccgccgataccgccgtgtattattgtgccagacatgacggcgctgtggccggcctgtttgattattggggacagggcaccctggtcaccgtgtcatctgctacgcgtgggagcggcatccagaaccctgatcctgccgtgtaccagctgcgggatagcaagagcagcgacaagagcgtgtgtctgttcaccgacttcgacagccagaccaacgtgtcccagagcaaggactccgacgtgtacatcaccgataagaccgtgctggacatgcggagcatggacttcaagagcaactccgccgtggcctggtccaacaagtccgatttcgcctgcgccaacgccttcaacaacagcattatccccgaggacacattcttcccaagccccgagagcagctgcgacgtgaagctggtggaaaagagcttcgagacagacaccaacctgaacttccagaacctgagcgtgatcggcttcagaatcctgctgctgaaagtggccggctttaacctgctgatgaccctgcggctgtggtccagccgcgccaagagaagcggatctggcgtgaagcagaccctgaatttcgacctgctgaagctggctggcgacgtggaatccaacccaggcccttctagaggccatatgaccgagtacaagcccacggtgcgcctcgccacccgcgacgacgtccccagggccgtacgcaccctcgccgccgcgttcgccgactaccccgccacgcgccacaccgtcgatccggaccgccacatcgagcgggtcaccgagctgcaagaactcttcctcacgcgcgtcgggctcgacatcggcaaggtgtgggtcgcggacgacggcgccgcggtggcggtctggaccacgccggagagcgtcgaagcgggggcggtgttcgccgagatcggcccgcgcatggccgagttgagcggttcccggctggccgcgcagcaacagatggaaggcctcctggcgccgcaccggcccaaggagcccgcgtggttcctggccaccgtcggcgtctcgcccgaccaccagggcaagggtctgggcagcgccgtcgtgctccccggagtggaggcggccgagcgcgccggggtgcccgccttcctggagacctccgcgccccgcaacctccccttctacgagcggctcggcttcaccgtcaccgccgacgtcgaggtgcccgaaggaccgcgcacctggtgcatgacccgcaagcccggtgcctga

SEQ ID NO: 8346 - DNA, 2031 bp, Artificial Sequence
  Synthetic Polynucloetide
atggccttaccagtgaccgccttgctcctgccgctggccttgctgctccacgccgccaggccgagctacgtgctgacacagcctccatccgtgtctgtggctccaggacagaccgccagaatcacatgcggcggcaacaacatcggcggcaagagcgtgcactggtatcagcagccacctggacaggctccagtggtggtggtgtacgacgacagcgatagacctagcggcatccccgagagattcagcggcagcaattccggcaataccgccacactgaccatcagcagagtggaagctggcgacgaggccgtgtactactgccaagtgtgggacagcagcagcgatcacgtggtgtttggcggcggaacaaagctgacagtgcttggcggaggcggaagtggaggcggaggatctggcggcggaggctctcaactccagctgcaagagtctggccctggcctggtcaagcctagcgaaacactgagcctgacctgtaccgtgtctggcggctctatcagctccagcagctatttctggggctggatcagacaacctcctggcaaaggactggaatggatcggctccatctactacagcggcatcacctactacaaccccagcctgaagtccagagtgaccatctccgtggacaccagcaagaaccagttctccctgaagctgagcagcgtgacagccgccgataccgccgtgtattattgtgccagacatgacggcgctgtggccggcctgtttgattattggggacagggcaccctggtcaccgtgtcatctgctctcgaggacctgaagaacgtgttcccacctgaggtggccgtgttcgagcctagcgaggccgagatcagccacacccagaaagccaccctcgtgtgcctggctaccggcttctaccccgaccatgtggaactgtcttggtgggtcaacggcaaagaggtgcacagcggcgtgtctaccgacccccagccactgaaagaacagcccgccctgaacgacagccggtactgcctgagcagcagactgagagtgtccgccaccttctggcagaacccccggaaccacttcagatgccaggtgcagttctacggcctgagcgagaacgacgagtggacccaggacagagccaagcccgtgacccagatcgtgtctgccgaagcctggggcagagccgattgcggctttaccagcgagagctaccagcagggcgtgctgagcgccaccatcctgtacgagatcctgctgggcaaggccaccctgtacgccgtgctggtgtctgccctggtgctgatggctatggtcaagcggaaggacagccggggaagggccaagcgatctggatctggagcaacaaacttctcactactcaaacaagcaggtgacgtggaggagaatcccgggcctactagaggccatatgaccgagtacaagcccacggtgcgcctcgccacccgcgacgacgtccccagggccgtacgcaccctcgccgccgcgttcgccgactaccccgccacgcgccacaccgtcgatccggaccgccacatcgagcgggtcaccgagctgcaagaactcttcctcacgcgcgtcgggctcgacatcggcaaggtgtgggtcgcggacgacggcgccgcggtggcggtctggaccacgccggagagcgtcgaagcgggggcggtgttcgccgagatcggcccgcgcatggccgagttgagcggttcccggctggccgcgcagcaacagatggaaggcctcctggcgccgcaccggcccaaggagcccgcgtggttcctggccaccgtcggcgtctcgcccgaccaccagggcaagggtctgggcagcgccgtcgtgctccccggagtggaggcggccgagcgcgccggggtgcccgccttcctggagacctccgcgccccgcaacctccccttctacgagcggctcggcttcaccgtcaccgccgacgtcgaggtgcccgaaggaccgcgcacctggtgcatgacccgcaagcccggtgcctga

SEQ ID NO: 8347 - DNA, 2181 bp, Artificial Sequence
  Synthetic Polynucloetide
atggccttaccagtgaccgccttgctcctgccgctggccttgctgctccacgccgccaggccgagctacgtgctgacacagcctccatccgtgtctgtggctccaggacagaccgccagaatcacatgcggcggcaacaacatcggcggcaagagcgtgcactggtatcagcagccacctggacaggctccagtggtggtggtgtacgacgacagcgatagacctagcggcatccccgagagattcagcggcagcaattccggcaataccgccacactgaccatcagcagagtggaagctggcgacgaggccgtgtactactgccaagtgtgggacagcagcagcgatcacgtggtgtttggcggcggaacaaagctgacagtgcttggcggaggcggaagtggaggcggaggatctggcggcggaggctctcaactccagctgcaagagtctggccctggcctggtcaagcctagcgaaacactgagcctgacctgtaccgtgtctggcggctctatcagctccagcagctatttctggggctggatcagacaacctcctggcaaaggactggaatggatcggctccatctactacagcggcatcacctactacaaccccagcctgaagtccagagtgaccatctccgtggacaccagcaagaaccagttctccctgaagctgagcagcgtgacagccgccgataccgccgtgtattattgtgccagacatgacggcgctgtggccggcctgtttgattattggggacagggcaccctggtcaccgtgtcatctgctacgcgtgagcagaaactgatctcggaagaggatctggggagcggcaccccattcccttctctggcccctcccatcatgctgctggtggacggcaagcagcagatggtggtcgtgtgcctggtgctggatgtggccccacctggactggacagccccatctggtttagcgccggcaatggctctgccctggacgcctttacctacggcccaagccctgccaccgatggcacctggacaaatctggcccacctgagcctgcccagcgaggaactggcttcttgggagcctctcgtgtgccacacaggacctggcgctgagggacacagcagatccacccagcctatgcacctgtctggcgaggccagcaccgccagaacctgtcctcaggaacctctgagaggcacccctggcggagcactgtggctgggagtgctgagactgctgctgttcaagctgctgctgtttgacctgctgctgacctgctcctgtctgtgcgatcctgccggccctctgccttctcctgccaccaccacaagactgagagccctgggcagccacagactgcaccctgccacagagacaggcggcagagaggccacaagcagccctagaccccagcccagagacagaagatggggcgataccccccctggcagaaagcctggatctccagtccgcgccaagagaagcggatctggcgtgaagcagaccctgaatttcgacctgctgaagctggctggcgacgtggaatccaacccaggcccttctagatctagaggccatatgaccgagtacaagcccacggtgcgcctcgccacccgcgacgacgtccccagggccgtacgcaccctcgccgccgcgttcgccgactaccccgccacgcgccacaccgtcgatccggaccgccacatcgagcgggtcaccgagctgcaagaactcttcctcacgcgcgtcgggctcgacatcggcaaggtgtgggtcgcggacgacggcgccgcggtggcggtctggaccacgccggagagcgtcgaagcgggggcggtgttcgccgagatcggcccgcgcatggccgagttgagcggttcccggctggccgcgcagcaacagatggaaggcctcctggcgccgcaccggcccaaggagcccgcgtggttcctggccaccgtcggcgtctcgcccgaccaccagggcaagggtctgggcagcgccgtcgtgctccccggagtggaggcggccgagcgcgccggggtgcccgccttcctggagacctccgcgccccgcaacctccccttctacgagcggctcggcttcaccgtcaccgccgacgtcgaggtgcccgaaggaccgcgcacctggtgcatgacccgcaagcccggtgcctga

SEQ ID NO: 8348 - DNA, 1620 bp, Artificial Sequence; identical to SEQ ID NO: 8072
  Synthetic Polynucloetide

SEQ ID NO: 8349 - DNA, 927 bp, Artificial Sequence; identical to SEQ ID NO: 8073
  Synthetic Polynucloetide

SEQ ID NO: 8350 - DNA, 1356 bp, Artificial Sequence; identical to SEQ ID NO: 7453
  Synthetic Polynucloetide

SEQ ID NO: 8351 - DNA, 855 bp, Artificial Sequence; identical to SEQ ID NO: 7454
  Synthetic Polynucloetide

SEQ ID NO: 8352 - DNA, 1674 bp, Artificial Sequence; identical to SEQ ID NO: 8076
  Synthetic Polynucloetide

SEQ ID NO: 8353 - DNA, 984 bp, Artificial Sequence; identical to SEQ ID NO: 8077
  Synthetic Polynucloetide

SEQ ID NO: 8354 - DNA, 1392 bp, Artificial Sequence; identical to SEQ ID NO: 7457
  Synthetic Polynucloetide

SEQ ID NO: 8355 - DNA, 894 bp, Artificial Sequence; identical to SEQ ID NO: 7458
  Synthetic Polynucloetide

SEQ ID NO: 8356 - DNA, 1935 bp, Artificial Sequence
  Synthetic Polynucloetide
atggccttaccagtgaccgccttgctcctgccgctggccttgctgctccacgccgccaggccgagctacgtgctgacacagcctccatccgtgtctgtggctccaggacagaccgccagaatcacatgcggcggcaacaacatcggcggcaagagcgtgcactggtatcagcagccacctggacaggctccagtggtggtggtgtacgacgacagcgatagacctagcggcatccccgagagattcagcggcagcaattccggcaataccgccacactgaccatcagcagagtggaagctggcgacgaggccgtgtactactgccaagtgtgggacagcagcagcgatcacgtggtgtttggcggcggaacaaagctgacagtgcttggcggaggcggaagtggaggcggaggatctggcggcggaggctctcaactccagctgcaagagtctggccctggcctggtcaagcctagcgaaacactgagcctgacctgtaccgtgtctggcggctctatcagctccagcagctatttctggggctggatcagacaacctcctggcaaaggactggaatggatcggctccatctactacagcggcatcacctactacaaccccagcctgaagtccagagtgaccatctccgtggacaccagcaagaaccagttctccctgaagctgagcagcgtgacagccgccgataccgccgtgtattattgtgccagacatgacggcgctgtggccggcctgtttgattattggggacagggcaccctggtcaccgtgtcatctgctacgcgtgggagcggcatccagaaccctgatcctgccgtgtaccagctgcgggatagcaagagcagcgacaagagcgtgtgtctgttcaccgacttcgacagccagaccaacgtgtcccagagcaaggactccgacgtgtacatcaccgataagaccgtgctggacatgcggagcatggacttcaagagcaactccgccgtggcctggtccaacaagtccgatttcgcctgcgccaacgccttcaacaacagcattatccccgaggacacattcttcccaagcagcgacgtgccctgcgacgtgaagctggtggaaaagagcttcgagacagacaccaacctgaacttccagaacctgagcgtgatcggcttcagaatcctgctgctgaaagtggccggctttaacctgctgatgaccctgcggctgtggtccagccgcgccaagagaagcggatctggcgtgaagcagaccctgaatttcgacctgctgaagctggctggcgacgtggaatccaacccaggcccttctagaggccatatgaccgagtacaagcccacggtgcgcctcgccacccgcgacgacgtccccagggccgtacgcaccctcgccgccgcgttcgccgactaccccgccacgcgccacaccgtcgatccggaccgccacatcgagcgggtcaccgagctgcaagaactcttcctcacgcgcgtcgggctcgacatcggcaaggtgtgggtcgcggacgacggcgccgcggtggcggtctggaccacgccggagagcgtcgaagcgggggcggtgttcgccgagatcggcccgcgcatggccgagttgagcggttcccggctggccgcgcagcaacagatggaaggcctcctggcgccgcaccggcccaaggagcccgcgtggttcctggccaccgtcggcgtctcgcccgaccaccagggcaagggtctgggcagcgccgtcgtgctccccggagtggaggcggccgagcgcgccggggtgcccgccttcctggagacctccgcgccccgcaacctccccttctacgagcggctcggcttcaccgtcaccgccgacgtcgaggtgcccgaaggaccgcgcacctggtgcatgacccgcaagcccggtgcctga

SEQ ID NO: 8357 - DNA, 2031 bp, Artificial Sequence
  Synthetic Polynucloetide
atggccttaccagtgaccgccttgctcctgccgctggccttgctgctccacgccgccaggccgagctacgtgctgacacagcctccatccgtgtctgtggctccaggacagaccgccagaatcacatgcggcggcaacaacatcggcggcaagagcgtgcactggtatcagcagccacctggacaggctccagtggtggtggtgtacgacgacagcgatagacctagcggcatccccgagagattcagcggcagcaattccggcaataccgccacactgaccatcagcagagtggaagctggcgacgaggccgtgtactactgccaagtgtgggacagcagcagcgatcacgtggtgtttggcggcggaacaaagctgacagtgcttggcggaggcggaagtggaggcggaggatctggcggcggaggctctcaactccagctgcaagagtctggccctggcctggtcaagcctagcgaaacactgagcctgacctgtaccgtgtctggcggctctatcagctccagcagctatttctggggctggatcagacaacctcctggcaaaggactggaatggatcggctccatctactacagcggcatcacctactacaaccccagcctgaagtccagagtgaccatctccgtggacaccagcaagaaccagttctccctgaagctgagcagcgtgacagccgccgataccgccgtgtattattgtgccagacatgacggcgctgtggccggcctgtttgattattggggacagggcaccctggtcaccgtgtcatctgctctcgaggacctgaagaacgtgttcccacctgaggtggccgtgttcgagcctagcaaggccgagatcgcccacacccagaaagccaccctcgtgtgcctggctaccggcttctaccccgaccatgtggaactgtcttggtgggtcaacggcaaagaggtgcacagcggcgtgtctaccgacccccagccactgaaagaacagcccgccctgaacgacagccggtactgcctgagcagcagactgagagtgtccgccaccttctggcagaacccccggaaccacttcagatgccaggtgcagttctacggcctgagcgagaacgacgagtggacccaggacagagccaagcccgtgacccagatcgtgtctgccgaagcctggggcagagccgattgcggcatcaccagcgccagctaccaccagggcgtgctgagcgccaccatcctgtacgagatcctgctgggcaaggccaccctgtacgccgtgctggtgtctgccctggtgctgatggctatggtcaagcggaaggacagccggggaagggccaagcgatctggatctggagcaacaaacttctcactactcaaacaagcaggtgacgtggaggagaatcccgggcctactagaggccatatgaccgagtacaagcccacggtgcgcctcgccacccgcgacgacgtccccagggccgtacgcaccctcgccgccgcgttcgccgactaccccgccacgcgccacaccgtcgatccggaccgccacatcgagcgggtcaccgagctgcaagaactcttcctcacgcgcgtcgggctcgacatcggcaaggtgtgggtcgcggacgacggcgccgcggtggcggtctggaccacgccggagagcgtcgaagcgggggcggtgttcgccgagatcggcccgcgcatggccgagttgagcggttcccggctggccgcgcagcaacagatggaaggcctcctggcgccgcaccggcccaaggagcccgcgtggttcctggccaccgtcggcgtctcgcccgaccaccagggcaagggtctgggcagcgccgtcgtgctccccggagtggaggcggccgagcgcgccggggtgcccgccttcctggagacctccgcgccccgcaacctccccttctacgagcggctcggcttcaccgtcaccgccgacgtcgaggtgcccgaaggaccgcgcacctggtgcatgacccgcaagcccggtgcctga

SEQ ID NO: 8358 - DNA, 2100 bp, Artificial Sequence
  Synthetic Polynucloetide
atggccttaccagtgaccgccttgctcctgccgctggccttgctgctccacgccgccaggccgagctacgtgctgacacagcctccatccgtgtctgtggctccaggacagaccgccagaatcacatgcggcggcaacaacatcggcggcaagagcgtgcactggtatcagcagccacctggacaggctccagtggtggtggtgtacgacgacagcgatagacctagcggcatccccgagagattcagcggcagcaattccggcaataccgccacactgaccatcagcagagtggaagctggcgacgaggccgtgtactactgccaagtgtgggacagcagcagcgatcacgtggtgtttggcggcggaacaaagctgacagtgcttggcggaggcggaagtggaggcggaggatctggcggcggaggctctcaactccagctgcaagagtctggccctggcctggtcaagcctagcgaaacactgagcctgacctgtaccgtgtctggcggctctatcagctccagcagctatttctggggctggatcagacaacctcctggcaaaggactggaatggatcggctccatctactacagcggcatcacctactacaaccccagcctgaagtccagagtgaccatctccgtggacaccagcaagaaccagttctccctgaagctgagcagcgtgacagccgccgataccgccgtgtattattgtgccagacatgacggcgctgtggccggcctgtttgattattggggacagggcaccctggtcaccgtgtcatctgctacgcgtgggtctggaggcggaggcagcggcggaggcgggagcggcgacggtaacgaggagatgggaggaatcactcaaaccccttacaaagtctcaatttcaggaacaactgttatccttacatgtccccagtatcctggcagcgagatcctttggcagcataacgacaagaatatagggggagatgaagacgataagaatatcggatctgacgaggatcacttgagcctgaaagagttctccgagcttgaacaaagcggatattatgtgtgctatccgcgcgggtcaaagccggaagacgctaacttttacctttatctccgagccagagtgtgcgaaaattgcatggaaatggacgttatgtccgttgctacaatagttatcgtagatatatgcatcacgggtggactgcttctgctggtttattattggtccaagaatagaaaggccaaagctaaacccgtgaccagaggcgctggcgcaggcggaaggcaaaggggacaaaacaaagaacggccaccaccagtgccaaatccagattatgagcctattcggaaaggacagagggacctgtactctggcctgaatcagagaagaatccgcgccaagagaagcggatctggcgtgaagcagaccctgaatttcgacctgctgaagctggctggcgacgtggaatccaacccaggcccttctagaggccatatgaccgagtacaagcccacggtgcgcctcgccacccgcgacgacgtccccagggccgtacgcaccctcgccgccgcgttcgccgactaccccgccacgcgccacaccgtcgatccggaccgccacatcgagcgggtcaccgagctgcaagaactcttcctcacgcgcgtcgggctcgacatcggcaaggtgtgggtcgcggacgacggcgccgcggtggcggtctggaccacgccggagagcgtcgaagcgggggcggtgttcgccgagatcggcccgcgcatggccgagttgagcggttcccggctggccgcgcagcaacagatggaaggcctcctggcgccgcaccggcccaaggagcccgcgtggttcctggccaccgtcggcgtctcgcccgaccaccagggcaagggtctgggcagcgccgtcgtgctccccggagtggaggcggccgagcgcgccggggtgcccgccttcctggagacctccgcgccccgcaacctccccttctacgagcggctcggcttcaccgtcaccgccgacgtcgaggtgcccgaaggaccgcgcacctggtgcatgacccgcaagcccggtgcctga

SEQ ID NO: 8359 - DNA, 1995 bp, Artificial Sequence
  Synthetic Polynucloetide
atggccttaccagtgaccgccttgctcctgccgctggccttgctgctccacgccgccaggccgagctacgtgctgacacagcctccatccgtgtctgtggctccaggacagaccgccagaatcacatgcggcggcaacaacatcggcggcaagagcgtgcactggtatcagcagccacctggacaggctccagtggtggtggtgtacgacgacagcgatagacctagcggcatccccgagagattcagcggcagcaattccggcaataccgccacactgaccatcagcagagtggaagctggcgacgaggccgtgtactactgccaagtgtgggacagcagcagcgatcacgtggtgtttggcggcggaacaaagctgacagtgcttggcggaggcggaagtggaggcggaggatctggcggcggaggctctcaactccagctgcaagagtctggccctggcctggtcaagcctagcgaaacactgagcctgacctgtaccgtgtctggcggctctatcagctccagcagctatttctggggctggatcagacaacctcctggcaaaggactggaatggatcggctccatctactacagcggcatcacctactacaaccccagcctgaagtccagagtgaccatctccgtggacaccagcaagaaccagttctccctgaagctgagcagcgtgacagccgccgataccgccgtgtattattgtgccagacatgacggcgctgtggccggcctgtttgattattggggacagggcaccctggtcaccgtgtcatctgctacgcgtgggtctggaggcggaggcagcggcggaggcgggagcggcttcaagatccccatcgaggaactggaagatcgggtgttcgtgaactgcaacacctctatcacctgggtggaaggcaccgtgggaacactgctgagcgacatcaccagactggacctcggcaagcggattctggaccctcggggcatctacagatgcaacggcaccgacatctacaaggacaaagaaagcaccgtgcaggtccactacagaatgtgccagtcctgcgtggaactggaccctgctacagtggccggcatcatcgtgaccgatgtgatcgctactctgctgctggctctgggagtgttctgcttcgccggacacgaaacaggcagactgtctggcgctgccgatacacaggccctgctgagaaacgaccaagtgtatcagcccctgcgcgacagagatgatgcccagtattctcacctcggcggcaactgggctagaaacaagcgcgccaagagaagcggatctggcgtgaagcagaccctgaatttcgacctgctgaagctggctggcgacgtggaatccaacccaggcccttctagaggccatatgaccgagtacaagcccacggtgcgcctcgccacccgcgacgacgtccccagggccgtacgcaccctcgccgccgcgttcgccgactaccccgccacgcgccacaccgtcgatccggaccgccacatcgagcgggtcaccgagctgcaagaactcttcctcacgcgcgtcgggctcgacatcggcaaggtgtgggtcgcggacgacggcgccgcggtggcggtctggaccacgccggagagcgtcgaagcgggggcggtgttcgccgagatcggcccgcgcatggccgagttgagcggttcccggctggccgcgcagcaacagatggaaggcctcctggcgccgcaccggcccaaggagcccgcgtggttcctggccaccgtcggcgtctcgcccgaccaccagggcaagggtctgggcagcgccgtcgtgctccccggagtggaggcggccgagcgcgccggggtgcccgccttcctggagacctccgcgccccgcaacctccccttctacgagcggctcggcttcaccgtcaccgccgacgtcgaggtgcccgaaggaccgcgcacctggtgcatgacccgcaagcccggtgcctga

SEQ ID NO: 8360 - DNA, 2025 bp, Artificial Sequence
  Synthetic Polynucloetide
atggccttaccagtgaccgccttgctcctgccgctggccttgctgctccacgccgccaggccgagctacgtgctgacacagcctccatccgtgtctgtggctccaggacagaccgccagaatcacatgcggcggcaacaacatcggcggcaagagcgtgcactggtatcagcagccacctggacaggctccagtggtggtggtgtacgacgacagcgatagacctagcggcatccccgagagattcagcggcagcaattccggcaataccgccacactgaccatcagcagagtggaagctggcgacgaggccgtgtactactgccaagtgtgggacagcagcagcgatcacgtggtgtttggcggcggaacaaagctgacagtgcttggcggaggcggaagtggaggcggaggatctggcggcggaggctctcaactccagctgcaagagtctggccctggcctggtcaagcctagcgaaacactgagcctgacctgtaccgtgtctggcggctctatcagctccagcagctatttctggggctggatcagacaacctcctggcaaaggactggaatggatcggctccatctactacagcggcatcacctactacaaccccagcctgaagtccagagtgaccatctccgtggacaccagcaagaaccagttctccctgaagctgagcagcgtgacagccgccgataccgccgtgtattattgtgccagacatgacggcgctgtggccggcctgtttgattattggggacagggcaccctggtcaccgtgtcatctgctacgcgtgggtctggaggcggaggcagcggcggaggcgggagcggccagagcatcaagggcaaccacctggtcaaggtgtacgactaccaagaggacggcagcgtgctgctgacatgtgatgccgaggccaagaacatcacctggtttaaggacggcaagatgatcggcttcctgaccgaggacaagaagaagtggaacctgggcagcaacgctaaggaccccagaggcatgtatcagtgcaagggcagccagaacaagagcaagcccctccaggtgtactaccggatgtgccagaactgcatcgagctgaacgccgctaccatcagcggctttctgttcgccgagatcgtgtccatcttcgtgctggccgtgggcgtgtactttatcgctggacaggatggcgtgcggcagagcagagcttccgataagcaaaccctgctgcctaacgaccagctgtaccagcctctgaaggacagagaggacgaccagtacagccacctccagggcaatcagctgagaagaaaccgcgccaagagaagcggatctggcgtgaagcagaccctgaatttcgacctgctgaagctggctggcgacgtggaatccaacccaggcccttctagaggccatatgaccgagtacaagcccacggtgcgcctcgccacccgcgacgacgtccccagggccgtacgcaccctcgccgccgcgttcgccgactaccccgccacgcgccacaccgtcgatccggaccgccacatcgagcgggtcaccgagctgcaagaactcttcctcacgcgcgtcgggctcgacatcggcaaggtgtgggtcgcggacgacggcgccgcggtggcggtctggaccacgccggagagcgtcgaagcgggggcggtgttcgccgagatcggcccgcgcatggccgagttgagcggttcccggctggccgcgcagcaacagatggaaggcctcctggcgccgcaccggcccaaggagcccgcgtggttcctggccaccgtcggcgtctcgcccgaccaccagggcaagggtctgggcagcgccgtcgtgctccccggagtggaggcggccgagcgcgccggggtgcccgccttcctggagacctccgcgccccgcaacctccccttctacgagcggctcggcttcaccgtcaccgccgacgtcgaggtgcccgaaggaccgcgcacctggtgcatgacccgcaagcccggtgcctga

SEQ ID NO: 8361 - DNA, 1974 bp, Artificial Sequence
  Synthetic Polynucloetide
atggccttaccagtgaccgccttgctcctgccgctggccttgctgctccacgccgccaggccgagctacgtgctgacacagcctccatccgtgtctgtggctccaggacagaccgccagaatcacatgcggcggcaacaacatcggcggcaagagcgtgcactggtatcagcagccacctggacaggctccagtggtggtggtgtacgacgacagcgatagacctagcggcatccccgagagattcagcggcagcaattccggcaataccgccacactgaccatcagcagagtggaagctggcgacgaggccgtgtactactgccaagtgtgggacagcagcagcgatcacgtggtgtttggcggcggaacaaagctgacagtgcttggcggaggcggaagtggaggcggaggatctggcggcggaggctctcaactccagctgcaagagtctggccctggcctggtcaagcctagcgaaacactgagcctgacctgtaccgtgtctggcggctctatcagctccagcagctatttctggggctggatcagacaacctcctggcaaaggactggaatggatcggctccatctactacagcggcatcacctactacaaccccagcctgaagtccagagtgaccatctccgtggacaccagcaagaaccagttctccctgaagctgagcagcgtgacagccgccgataccgccgtgtattattgtgccagacatgacggcgctgtggccggcctgtttgattattggggacagggcaccctggtcaccgtgtcatctgctacgcgtgggtctggaggcggaggcagcggcggaggcgggagcggccagagttttgggttgttggaccctaaattgtgctatctgttggacggaatcctgttcatttacggagtgatcctgaccgcattgttcctgcgggttaagttttccagatccgcagacgcacccgcttaccaacaagggcagaaccaactctacaatgaacttaatttggggcggagggaagagtacgacgttctggacaaaaggaggggacgagatcccgagatgggcggaaagcctcagcgaaggaagaatccgcaagaggggctttataacgaactccagaaagataaaatggcagaagcctatagtgagattgggatgaagggagaaaggaggaggggtaaaggtcacgatgggttgtaccaaggattgagcacagccactaaagatacctatgatgcgctccacatgcaggccctgccgccaagacgcgccaagagaagcggatctggcgtgaagcagaccctgaatttcgacctgctgaagctggctggcgacgtggaatccaacccaggcccttctagaggccatatgaccgagtacaagcccacggtgcgcctcgccacccgcgacgacgtccccagggccgtacgcaccctcgccgccgcgttcgccgactaccccgccacgcgccacaccgtcgatccggaccgccacatcgagcgggtcaccgagctgcaagaactcttcctcacgcgcgtcgggctcgacatcggcaaggtgtgggtcgcggacgacggcgccgcggtggcggtctggaccacgccggagagcgtcgaagcgggggcggtgttcgccgagatcggcccgcgcatggccgagttgagcggttcccggctggccgcgcagcaacagatggaaggcctcctggcgccgcaccggcccaaggagcccgcgtggttcctggccaccgtcggcgtctcgcccgaccaccagggcaagggtctgggcagcgccgtcgtgctccccggagtggaggcggccgagcgcgccggggtgcccgccttcctggagacctccgcgccccgcaacctccccttctacgagcggctcggcttcaccgtcaccgccgacgtcgaggtgcccgaaggaccgcgcacctggtgcatgacccgcaagcccggtgcctga

SEQ ID NO: 8362 - DNA, 2274 bp, Artificial Sequence
  Synthetic Polynucloetide
atggccttaccagtgaccgccttgctcctgccgctggccttgctgctccacgccgccaggccggaagtgcagctggttgaatctggcggaggactggttcagcctggcggatctctgagactgtcttgtgccgccagcggcttcagcttcagcgacttttggatgagctgggtccgacaggcccctggcaaaggacttgaatgggtcgccacaatcagccaggccggcagcgagaaggactacgtggactctgtgaagggcagattcaccatcagccgggacaacgccaagaagtccctgtacctccagatgaacagcctgagagccgaggacaccgccgtgtactattgtgcctctggcgtgtacagcttcgactacagaggccagggcaccctggtcacagtctcttctggtaccggcggaggcggatctggcggcggaggtagcggtggcggaggatctgaattcagctacgtgctgacacagcctccatccgtgtctgtggctccaggacagaccgccagaatcacatgcggcggcaacaacatcggcggcaagagcgtgcactggtatcagcagccacctggacaggctccagtggtggtggtgtacgacgacagcgatagacctagcggcatccccgagagattcagcggcagcaattccggcaataccgccacactgaccatcagcagagtggaagctggcgacgaggccgtgtactactgccaagtgtgggacagcagcagcgatcacgtggtgtttggcggcggaacaaagctgacagtgcttctcgaggacctgaagaacgtgttcccacctgaggtggccgtgttcgagcctagcgaggccgagatcagccacacccagaaagccaccctcgtgtgcctggctaccggcttctaccccgaccatgtggaactgtcttggtgggtcaacggcaaagaggtgcacagcggcgtgtgtaccgacccccagccactgaaagaacagcccgccctgaacgacagccggtactgcctgagcagcagactgagagtgtccgccaccttctggcagaacccccggaaccacttcagatgccaggtgcagttctacggcctgagcgagaacgacgagtggacccaggacagagccaagcccgtgacccagatcgtgtctgccgaagcctggggcagagccgattgcggctttaccagcgagagctaccagcagggcgtgctgagcgccaccatcctgtacgagatcctgctgggcaaggccaccctgtacgccgtgctggtgtctgccctggtgctgatggctatggtcaagcggaaggacagccggggaagggccaagcgatctggatctggagcaacaaacttctcactactcaaacaagcaggtgacgtggaggagaatcccgggcctactagtatggactggatttggcgcatccttttccttgtcggcgctgctaccggcgcgcattccttcgaacaactccagctgcaagagtctggccctggcctggtcaagcctagcgaaacactgagcctgacctgtaccgtgtctggcggctctatcagctccagcagctatttctggggctggatcagacaacctcctggcaaaggactggaatggatcggctccatctactacagcggcatcacctactacaaccccagcctgaagtccagagtgaccatctccgtggacaccagcaagaaccagttctccctgaagctgagcagcgtgacagccgccgataccgccgtgtattattgtgccagacatgacggcgctgtggccggcctgtttgattattggggacagggcaccctggtcaccgtgtcatctgctacgcgtatccagaaccctgatcctgccgtgtaccagctgcgggatagcaagagcagcgacaagagcgtgtgtctgttcaccgacttcgacagccagaccaacgtgtcccagagcaaggactccgacgtgtacatcaccgataagtgcgtgctggacatgcggagcatggacttcaagagcaactccgccgtggcctggtccaacaagtccgatttcgcctgcgccaacgccttcaacaacagcattatccccgaggacacattcttcccaagccccgagagcagctgcgacgtgaagctggtggaaaagagcttcgagacagacaccaacctgaacttccagaacctgagcgtgatcggcttcagaatcctgctgctgaaagtggccggctttaacctgctgatgaccctgcggctgtggtccagc

SEQ ID NO: 8363 - DNA, 2286 bp, Artificial Sequence
  Synthetic Polynucloetide
atggccttaccagtgaccgccttgctcctgccgctggccttgctgctccacgccgccaggccggaagtgcagctggttgaatctggcggaggactggttcagcctggcggatctctgagactgtcttgtgccgccagcggcttcagcttcagcgacttttggatgagctgggtccgacaggcccctggcaaaggacttgaatgggtcgccacaatcagccaggccggcagcgagaaggactacgtggactctgtgaagggcagattcaccatcagccgggacaacgccaagaagtccctgtacctccagatgaacagcctgagagccgaggacaccgccgtgtactattgtgcctctggcgtgtacagcttcgactacagaggccagggcaccctggtcacagtctcttctggtaccggcggaggcggatctggcggcggaggtagcggtggcggaggatctgaattcagctacgtgctgacacagcctccatccgtgtctgtggctccaggacagaccgccagaatcacatgcggcggcaacaacatcggcggcaagagcgtgcactggtatcagcagccacctggacaggctccagtggtggtggtgtacgacgacagcgatagacctagcggcatccccgagagattcagcggcagcaattccggcaataccgccacactgaccatcagcagagtggaagctggcgacgaggccgtgtactactgccaagtgtgggacagcagcagcgatcacgtggtgtttggcggcggaacaaagctgacagtgcttctcgagatccagaaccctgatcctgccgtgtaccagctgcgggatagcaagagcagcgacaagagcgtgtgtctgttcaccgacttcgacagccagaccaacgtgtcccagagcaaggactccgacgtgtacatcaccgataagtgcgtgctggacatgcggagcatggacttcaagagcaactccgccgtggcctggtccaacaagtccgatttcgcctgcgccaacgccttcaacaacagcattatccccgaggacacattcttcccaagccccgagagcagctgcgacgtgaagctggtggaaaagagcttcgagacagacaccaacctgaacttccagaacctgagcgtgatcggcttcagaatcctgctgctgaaagtggccggctttaacctgctgatgaccctgcggctgtggtccagccgcgccaagagaagcggatctggcgtgaagcagaccctgaatttcgacctgctgaagctggctggcgacgtggaatccaacccaggccctactagtatggactggatttggcgcatccttttccttgtcggcgctgctaccggcgcgcattccttcgaacaactccagctgcaagagtctggccctggcctggtcaagcctagcgaaacactgagcctgacctgtaccgtgtctggcggctctatcagctccagcagctatttctggggctggatcagacaacctcctggcaaaggactggaatggatcggctccatctactacagcggcatcacctactacaaccccagcctgaagtccagagtgaccatctccgtggacaccagcaagaaccagttctccctgaagctgagcagcgtgacagccgccgataccgccgtgtattattgtgccagacatgacggcgctgtggccggcctgtttgattattggggacagggcaccctggtcaccgtgtcatctgctacgcgtgaggacctgaagaacgtgttcccacctgaggtggccgtgttcgagcctagcgaggccgagatcagccacacccagaaagccaccctcgtgtgcctggctaccggcttctaccccgaccatgtggaactgtcttggtgggtcaacggcaaagaggtgcacagcggcgtgtgtaccgacccccagccactgaaagaacagcccgccctgaacgacagccggtactgcctgagcagcagactgagagtgtccgccaccttctggcagaacccccggaaccacttcagatgccaggtgcagttctacggcctgagcgagaacgacgagtggacccaggacagagccaagcccgtgacccagatcgtgtctgccgaagcctggggcagagccgattgcggctttaccagcgagagctaccagcagggcgtgctgagcgccaccatcctgtacgagatcctgctgggcaaggccaccctgtacgccgtgctggtgtctgccctggtgctgatggctatggtcaagcggaaggacagccgggga

SEQ ID NO: 8364 - DNA, 2862 bp, Artificial Sequence
  Synthetic Polynucloetide
atggccttaccagtgaccgccttgctcctgccgctggccttgctgctccacgccgccaggccggaagtgcagctggttgaatctggcggaggactggttcagcctggcggatctctgagactgtcttgtgccgccagcggcttcagcttcagcgacttttggatgagctgggtccgacaggcccctggcaaaggacttgaatgggtcgccacaatcagccaggccggcagcgagaaggactacgtggactctgtgaagggcagattcaccatcagccgggacaacgccaagaagtccctgtacctccagatgaacagcctgagagccgaggacaccgccgtgtactattgtgcctctggcgtgtacagcttcgactacagaggccagggcaccctggtcacagtctcttctggtaccggcggaggcggatctggcggcggaggtagcggtggcggaggatctgaattcagctacgtgctgacacagcctccatccgtgtctgtggctccaggacagaccgccagaatcacatgcggcggcaacaacatcggcggcaagagcgtgcactggtatcagcagccacctggacaggctccagtggtggtggtgtacgacgacagcgatagacctagcggcatccccgagagattcagcggcagcaattccggcaataccgccacactgaccatcagcagagtggaagctggcgacgaggccgtgtactactgccaagtgtgggacagcagcagcgatcacgtggtgtttggcggcggaacaaagctgacagtgcttctcgaggacctgaagaacgtgttcccacctgaggtggccgtgttcgagcctagcgaggccgagatcagccacacccagaaagccaccctcgtgtgcctggctaccggcttctaccccgaccatgtggaactgtcttggtgggtcaacggcaaagaggtgcacagcggcgtgtctaccgacccccagccactgaaagaacagcccgccctgaacgacagccggtactgcctgagcagcagactgagagtgtccgccaccttctggcagaacccccggaaccacttcagatgccaggtgcagttctacggcctgagcgagaacgacgagtggacccaggacagagccaagcccgtgacccagatcgtgtctgccgaagcctggggcagagccgattgcggatcccagagcttcggcctgctggaccccaagctgtgctacctgctggatggcatcctgttcatctacggcgtgatcctgaccgccctgttcctgagagtgaagttcagcagaagcgccgacgcccctgcctaccagcagggacagaaccaactgtacaacgagctgaacctgggcagacgggaagagtacgacgtgctggacaagcggagaggcagggaccctgagatgggcggaaagccccagcggagaaagaacccccaggaaggactgtataacgaactccagaaagacaagatggccgaagcctacagcgagatcggcatgaagggcgagcggagaagaggcaagggccacgatggcctgtaccagggcctgagcaccgccaccaaggacacctatgacgccctgcacatgcaggccctgcctccaagaagggccaagcgatctggatctggagcaacaaacttctcactactcaaacaagcaggtgacgtggaggagaatcccgggcctactagtatggactggatttggcgcatccttttccttgtcggcgctgctaccggcgcgcattccttcgaacaactccagctgcaagagtctggccctggcctggtcaagcctagcgaaacactgagcctgacctgtaccgtgtctggcggctctatcagctccagcagctatttctggggctggatcagacaacctcctggcaaaggactggaatggatcggctccatctactacagcggcatcacctactacaaccccagcctgaagtccagagtgaccatctccgtggacaccagcaagaaccagttctccctgaagctgagcagcgtgacagccgccgataccgccgtgtattattgtgccagacatgacggcgctgtggccggcctgtttgattattggggacagggcaccctggtcaccgtgtcatctgctacgcgtatccagaaccctgatcctgccgtgtaccagctgcgggatagcaagagcagcgacaagagcgtgtgtctgttcaccgacttcgacagccagaccaacgtgtcccagagcaaggactccgacgtgtacatcaccgataagaccgtgctggacatgcggagcatggacttcaagagcaactccgccgtggcctggtccaacaagtccgatttcgcctgcgccaacgccttcaacaacagcattatccccgaggacacattcttcccaagccccgagagcagctgcggtacccagagttttgggttgttggaccctaaattgtgctatctgttggacggaatcctgttcatttacggagtgatcctgaccgcattgttcctgcgggttaagttttccagatccgcagacgcacccgcttaccaacaagggcagaaccaactctacaatgaacttaatttggggcggagggaagagtacgacgttctggacaaaaggaggggacgagatcccgagatgggcggaaagcctcagcgaaggaagaatccgcaagaggggctttataacgaactccagaaagataaaatggcagaagcctatagtgagattgggatgaagggagaaaggaggaggggtaaaggtcacgatgggttgtaccaaggattgagcacagccactaaagatacctatgatgcgctccacatgcaggccctgccgccaaga

SEQ ID NO: 8365 - DNA, 2352 bp, Artificial Sequence
  Synthetic Polynucloetide
atggccttaccagtgaccgccttgctcctgccgctggccttgctgctccacgccgccaggccggaagtgcagctggttgaatctggcggaggactggttcagcctggcggatctctgagactgtcttgtgccgccagcggcttcagcttcagcgacttttggatgagctgggtccgacaggcccctggcaaaggacttgaatgggtcgccacaatcagccaggccggcagcgagaaggactacgtggactctgtgaagggcagattcaccatcagccgggacaacgccaagaagtccctgtacctccagatgaacagcctgagagccgaggacaccgccgtgtactattgtgcctctggcgtgtacagcttcgactacagaggccagggcaccctggtcacagtctcttctggtaccggcggaggcggatctggcggcggaggtagcggtggcggaggatctgaattcagctacgtgctgacacagcctccatccgtgtctgtggctccaggacagaccgccagaatcacatgcggcggcaacaacatcggcggcaagagcgtgcactggtatcagcagccacctggacaggctccagtggtggtggtgtacgacgacagcgatagacctagcggcatccccgagagattcagcggcagcaattccggcaataccgccacactgaccatcagcagagtggaagctggcgacgaggccgtgtactactgccaagtgtgggacagcagcagcgatcacgtggtgtttggcggcggaacaaagctgacagtgcttctcgagggacagcctaaggccaatcctaccgtgacactgttccctccaagcagcgaagaactccaggccaacaaggccacacttgtgtgcctgatctccgacttctaccctggggctgtgacagtggcttggaaggccgatggatctcctgtgaaagccggcgtggaaaccaccaagccatccaagcagagcaacaacaaatacgccgccagctcctacctgagcctgacacctgagcagtggaagtcccacagatcctacagctgccaagtgacccacgaaggcagcaccgtggaaaagacagtggcccctacagagtgcagccccatcaagaccgatgtgattacaatggaccccaaggacaactgctccaaggacgccaacgataccctgctgctccagctgaccaacaccagcgcctactacatgtacttgttgctgctgctgaagtccgtggtgtacttcgccatcatcacatgctgcctgctgcggagaaccgccttctgctgcaacggcgagaagtctagggccaagcgatctggatctggagcaacaaacttctcactactcaaacaagcaggtgacgtggaggagaatcccgggcctactagtatggactggatttggcgcatccttttccttgtcggcgctgctaccggcgcgcattccttcgaacaactccagctgcaagagtctggccctggcctggtcaagcctagcgaaacactgagcctgacctgtaccgtgtctggcggctctatcagctccagcagctatttctggggctggatcagacaacctcctggcaaaggactggaatggatcggctccatctactacagcggcatcacctactacaaccccagcctgaagtccagagtgaccatctccgtggacaccagcaagaaccagttctccctgaagctgagcagcgtgacagccgccgataccgccgtgtattattgtgccagacatgacggcgctgtggccggcctgtttgattattggggacagggcaccctggtcaccgtgtcatctgctacgcgtgcctctacaaagggaccctccgtgtttcctctggctcccagcagcaagtctacaagcggaggaacagccgctctgggctgcctggtcaaggattactttcccgagcctgtgaccgtgtcctggaatagcggagcactgacaagcggcgtgcacacctttccagccgtgctgcaaagcagcggcctgtactctctgagcagcgtggtcacagtgcctagctctagcctgggcacccagacctacatctgcaatgtgaaccacaagcctagcaacaccaaggtggacaagagagtggaacccaagagctgtgaagtgaaaaccgactccaccgaccacgtgaagcccaaagagacagagaacaccaagcagcccagcaagagctgccacaagcccaaggccatcgtgcacaccgagaaagtgaacatgatgagcctgaccgtgctgggcctgcggatgctgttcgccaaaaccgtggccgtgaacttcctgctgaccgccaagctgttcttcctc

SEQ ID NO: 8366 - DNA, 2295 bp, Artificial Sequence
  Synthetic Polynucloetide
atggccttaccagtgaccgccttgctcctgccgctggccttgctgctccacgccgccaggccggaagtgcagctggttgaatctggcggaggactggttcagcctggcggatctctgagactgtcttgtgccgccagcggcttcagcttcagcgacttttggatgagctgggtccgacaggcccctggcaaaggacttgaatgggtcgccacaatcagccaggccggcagcgagaaggactacgtggactctgtgaagggcagattcaccatcagccgggacaacgccaagaagtccctgtacctccagatgaacagcctgagagccgaggacaccgccgtgtactattgtgcctctggcgtgtacagcttcgactacagaggccagggcaccctggtcacagtctcttctggtaccggcggaggcggatctggcggcggaggtagcggtggcggaggatctgaattcagctacgtgctgacacagcctccatccgtgtctgtggctccaggacagaccgccagaatcacatgcggcggcaacaacatcggcggcaagagcgtgcactggtatcagcagccacctggacaggctccagtggtggtggtgtacgacgacagcgatagacctagcggcatccccgagagattcagcggcagcaattccggcaataccgccacactgaccatcagcagagtggaagctggcgacgaggccgtgtactactgccaagtgtgggacagcagcagcgatcacgtggtgtttggcggcggaacaaagctgacagtgcttctcgagggacagcctaaggccaatcctaccgtgacactgttccctccaagcagcgaagaactccaggccaacaaggccacacttgtgtgcctgatctccgacttctaccctggggctgtgacagtggcttggaaggccgatggatctcctgtgaaagccggcgtggaaaccaccaagccatccaagcagagcaacaacaaatacgccgccagctcctacctgagcctgacacctgagcagtggaagtcccacagatcctacagctgccaagtgacccacgaaggcagcaccgtggaaaagacagtggcccctacagagtgcagcggcagagccgattgcggctttaccagcgagagctaccagcagggcgtgctgagcgccaccatcctgtacgagatcctgctgggcaaggccaccctgtacgccgtgctggtgtctgccctggtgctgatggctatggtcaagcggaaggacagccggggacgcgccaagagaagcggatctggcgtgaagcagaccctgaatttcgacctgctgaagctggctggcgacgtggaatccaacccaggccctactagtatggactggatttggcgcatccttttccttgtcggcgctgctaccggcgcgcattccttcgaacaactccagctgcaagagtctggccctggcctggtcaagcctagcgaaacactgagcctgacctgtaccgtgtctggcggctctatcagctccagcagctatttctggggctggatcagacaacctcctggcaaaggactggaatggatcggctccatctactacagcggcatcacctactacaaccccagcctgaagtccagagtgaccatctccgtggacaccagcaagaaccagttctccctgaagctgagcagcgtgacagccgccgataccgccgtgtattattgtgccagacatgacggcgctgtggccggcctgtttgattattggggacagggcaccctggtcaccgtgtcatctgctacgcgtgcctctacaaagggaccctccgtgtttcctctggctcccagcagcaagtctacaagcggaggaacagccgctctgggctgcctggtcaaggattactttcccgagcctgtgaccgtgtcctggaatagcggagcactgacaagcggcgtgcacacctttccagccgtgctgcaaagcagcggcctgtactctctgagcagcgtggtcacagtgcctagctctagcctgggcacccagacctacatctgcaatgtgaaccacaagcctagcaacaccaaggtggacaagagagtggaacccaagagctgtatccccgaggacacattcttcccaagccccgagagcagctgcgacgtgaagctggtggaaaagagcttcgagacagacaccaacctgaacttccagaacctgagcgtgatcggcttcagaatcctgctgctgaaagtggccggctttaacctgctgatgaccctgcggctgtggtccagc

SEQ ID NO: 8367 - DNA, 2697 bp, Artificial Sequence
  Synthetic Polynucloetide
atggccttaccagtgaccgccttgctcctgccgctggccttgctgctccacgccgccaggccggaagtgcagctggttgaatctggcggaggactggttcagcctggcggatctctgagactgtcttgtgccgccagcggcttcagcttcagcgacttttggatgagctgggtccgacaggcccctggcaaaggacttgaatgggtcgccacaatcagccaggccggcagcgagaaggactacgtggactctgtgaagggcagattcaccatcagccgggacaacgccaagaagtccctgtacctccagatgaacagcctgagagccgaggacaccgccgtgtactattgtgcctctggcgtgtacagcttcgactacagaggccagggcaccctggtcacagtctcttctggtaccggcggaggcggatctggcggcggaggtagcggtggcggaggatctgaattcagctacgtgctgacacagcctccatccgtgtctgtggctccaggacagaccgccagaatcacatgcggcggcaacaacatcggcggcaagagcgtgcactggtatcagcagccacctggacaggctccagtggtggtggtgtacgacgacagcgatagacctagcggcatccccgagagattcagcggcagcaattccggcaataccgccacactgaccatcagcagagtggaagctggcgacgaggccgtgtactactgccaagtgtgggacagcagcagcgatcacgtggtgtttggcggcggaacaaagctgacagtgcttctcgagatccagaaccctgatcctgccgtgtaccagctgcgggatagcaagagcagcgacaagagcgtgtgtctgttcaccgacttcgacagccagaccaacgtgtcccagagcaaggactccgacgtgtacatcaccgataagtgcgtgctggacatgcggagcatggacttcaagagcaactccgccgtggcctggtccaacaagtccgatttcgcctgcgccaacgccttcaacaacagcattatccccgaggacacattcttcccaagccccgagagcagctgcgacgtgaagctggtggaaaagagcttcgagacagacaccaacctgaacttccagaacctgagcgtgatcggcttcagaatcctgctgctgaaagtggccggctttaacctgctgatgaccctgcggctgtggtccagccgcgccaagagaagcggatctggcgtgaagcagaccctgaatttcgacctgctgaagctggctggcgacgtggaatccaacccaggccctactagtatggactggatttggcgcatccttttccttgtcggcgctgctaccggcgcgcattccgggccccagctccagctgcaagagtctggacctggcctggtcaagcctagcgagacactgagcctgacctgtaccgtgtccggcgatagcatcagcagcggcgattactactggggctggatcagacagcctcctggcaaaggactggaatggatcggccacatctactacagcggcgtgacctactacaaccccagcctgaagtccagagtgaccatcagcgtggacaccagccggaaccagttctccctgaagctgtctagcgtgacagccgccgataccgccgtgtactactgcaccagagaggacagcagcaactggcggagtagaggccagggaacactggtcacagttagctctggatccggcggaggcggaagtggaggcggaggatctggcggcggaggctctttcgaacaactccagctgcaagagtctggccctggcctggtcaagcctagcgaaacactgagcctgacctgtaccgtgtctggcggctctatcagctccagcagctatttctggggctggatcagacaacctcctggcaaaggactggaatggatcggctccatctactacagcggcatcacctactacaaccccagcctgaagtccagagtgaccatctccgtggacaccagcaagaaccagttctccctgaagctgagcagcgtgacagccgccgataccgccgtgtattattgtgccagacatgacggcgctgtggccggcctgtttgattattggggacagggcaccctggtcaccgtgtcatctgctacgcgtgaggacctgaagaacgtgttcccacctgaggtggccgtgttcgagcctagcgaggccgagatcagccacacccagaaagccaccctcgtgtgcctggctaccggcttctaccccgaccatgtggaactgtcttggtgggtcaacggcaaagaggtgcacagcggcgtgtgtaccgacccccagccactgaaagaacagcccgccctgaacgacagccggtactgcctgagcagcagactgagagtgtccgccaccttctggcagaacccccggaaccacttcagatgccaggtgcagttctacggcctgagcgagaacgacgagtggacccaggacagagccaagcccgtgacccagatcgtgtctgccgaagcctggggcagagccgattgcggctttaccagcgagagctaccagcagggcgtgctgagcgccaccatcctgtacgagatcctgctgggcaaggccaccctgtacgccgtgctggtgtctgccctggtgctgatggctatggtcaagcggaaggacagccgggga

SEQ ID NO: 8368 - DNA, 3273 bp, Artificial Sequence
  Synthetic Polynucloetide
atggccttaccagtgaccgccttgctcctgccgctggccttgctgctccacgccgccaggccggaagtgcagctggttgaatctggcggaggactggttcagcctggcggatctctgagactgtcttgtgccgccagcggcttcagcttcagcgacttttggatgagctgggtccgacaggcccctggcaaaggacttgaatgggtcgccacaatcagccaggccggcagcgagaaggactacgtggactctgtgaagggcagattcaccatcagccgggacaacgccaagaagtccctgtacctccagatgaacagcctgagagccgaggacaccgccgtgtactattgtgcctctggcgtgtacagcttcgactacagaggccagggcaccctggtcacagtctcttctggtaccggcggaggcggatctggcggcggaggtagcggtggcggaggatctgaattcagctacgtgctgacacagcctccatccgtgtctgtggctccaggacagaccgccagaatcacatgcggcggcaacaacatcggcggcaagagcgtgcactggtatcagcagccacctggacaggctccagtggtggtggtgtacgacgacagcgatagacctagcggcatccccgagagattcagcggcagcaattccggcaataccgccacactgaccatcagcagagtggaagctggcgacgaggccgtgtactactgccaagtgtgggacagcagcagcgatcacgtggtgtttggcggcggaacaaagctgacagtgcttctcgaggacctgaagaacgtgttcccacctgaggtggccgtgttcgagcctagcgaggccgagatcagccacacccagaaagccaccctcgtgtgcctggctaccggcttctaccccgaccatgtggaactgtcttggtgggtcaacggcaaagaggtgcacagcggcgtgtctaccgacccccagccactgaaagaacagcccgccctgaacgacagccggtactgcctgagcagcagactgagagtgtccgccaccttctggcagaacccccggaaccacttcagatgccaggtgcagttctacggcctgagcgagaacgacgagtggacccaggacagagccaagcccgtgacccagatcgtgtctgccgaagcctggggcagagccgattgcggatcccagagcttcggcctgctggaccccaagctgtgctacctgctggatggcatcctgttcatctacggcgtgatcctgaccgccctgttcctgagagtgaagttcagcagaagcgccgacgcccctgcctaccagcagggacagaaccaactgtacaacgagctgaacctgggcagacgggaagagtacgacgtgctggacaagcggagaggcagggaccctgagatgggcggaaagccccagcggagaaagaacccccaggaaggactgtataacgaactccagaaagacaagatggccgaagcctacagcgagatcggcatgaagggcgagcggagaagaggcaagggccacgatggcctgtaccagggcctgagcaccgccaccaaggacacctatgacgccctgcacatgcaggccctgcctccaagaagggccaagcgatctggatctggagcaacaaacttctcactactcaaacaagcaggtgacgtggaggagaatcccgggcctactagtatggactggatttggcgcatccttttccttgtcggcgctgctaccggcgcgcattccgggccccagctccagctgcaagagtctggacctggcctggtcaagcctagcgagacactgagcctgacctgtaccgtgtccggcgatagcatcagcagcggcgattactactggggctggatcagacagcctcctggcaaaggactggaatggatcggccacatctactacagcggcgtgacctactacaaccccagcctgaagtccagagtgaccatcagcgtggacaccagccggaaccagttctccctgaagctgtctagcgtgacagccgccgataccgccgtgtactactgcaccagagaggacagcagcaactggcggagtagaggccagggaacactggtcacagttagctctggatccggcggaggcggaagtggaggcggaggatctggcggcggaggctctttcgaacaactccagctgcaagagtctggccctggcctggtcaagcctagcgaaacactgagcctgacctgtaccgtgtctggcggctctatcagctccagcagctatttctggggctggatcagacaacctcctggcaaaggactggaatggatcggctccatctactacagcggcatcacctactacaaccccagcctgaagtccagagtgaccatctccgtggacaccagcaagaaccagttctccctgaagctgagcagcgtgacagccgccgataccgccgtgtattattgtgccagacatgacggcgctgtggccggcctgtttgattattggggacagggcaccctggtcaccgtgtcatctgctacgcgtatccagaaccctgatcctgccgtgtaccagctgcgggatagcaagagcagcgacaagagcgtgtgtctgttcaccgacttcgacagccagaccaacgtgtcccagagcaaggactccgacgtgtacatcaccgataagaccgtgctggacatgcggagcatggacttcaagagcaactccgccgtggcctggtccaacaagtccgatttcgcctgcgccaacgccttcaacaacagcattatccccgaggacacattcttcccaagccccgagagcagctgcggtacccagagttttgggttgttggaccctaaattgtgctatctgttggacggaatcctgttcatttacggagtgatcctgaccgcattgttcctgcgggttaagttttccagatccgcagacgcacccgcttaccaacaagggcagaaccaactctacaatgaacttaatttggggcggagggaagagtacgacgttctggacaaaaggaggggacgagatcccgagatgggcggaaagcctcagcgaaggaagaatccgcaagaggggctttataacgaactccagaaagataaaatggcagaagcctatagtgagattgggatgaagggagaaaggaggaggggtaaaggtcacgatgggttgtaccaaggattgagcacagccactaaagatacctatgatgcgctccacatgcaggccctgccgccaaga

SEQ ID NO: 8369 - DNA, 2763 bp, Artificial Sequence
  Synthetic Polynucloetide
atggccttaccagtgaccgccttgctcctgccgctggccttgctgctccacgccgccaggccggaagtgcagctggttgaatctggcggaggactggttcagcctggcggatctctgagactgtcttgtgccgccagcggcttcagcttcagcgacttttggatgagctgggtccgacaggcccctggcaaaggacttgaatgggtcgccacaatcagccaggccggcagcgagaaggactacgtggactctgtgaagggcagattcaccatcagccgggacaacgccaagaagtccctgtacctccagatgaacagcctgagagccgaggacaccgccgtgtactattgtgcctctggcgtgtacagcttcgactacagaggccagggcaccctggtcacagtctcttctggtaccggcggaggcggatctggcggcggaggtagcggtggcggaggatctgaattcagctacgtgctgacacagcctccatccgtgtctgtggctccaggacagaccgccagaatcacatgcggcggcaacaacatcggcggcaagagcgtgcactggtatcagcagccacctggacaggctccagtggtggtggtgtacgacgacagcgatagacctagcggcatccccgagagattcagcggcagcaattccggcaataccgccacactgaccatcagcagagtggaagctggcgacgaggccgtgtactactgccaagtgtgggacagcagcagcgatcacgtggtgtttggcggcggaacaaagctgacagtgcttctcgagggacagcctaaggccaatcctaccgtgacactgttccctccaagcagcgaagaactccaggccaacaaggccacacttgtgtgcctgatctccgacttctaccctggggctgtgacagtggcttggaaggccgatggatctcctgtgaaagccggcgtggaaaccaccaagccatccaagcagagcaacaacaaatacgccgccagctcctacctgagcctgacacctgagcagtggaagtcccacagatcctacagctgccaagtgacccacgaaggcagcaccgtggaaaagacagtggcccctacagagtgcagccccatcaagaccgatgtgattacaatggaccccaaggacaactgctccaaggacgccaacgataccctgctgctccagctgaccaacaccagcgcctactacatgtacttgttgctgctgctgaagtccgtggtgtacttcgccatcatcacatgctgcctgctgcggagaaccgccttctgctgcaacggcgagaagtctagggccaagcgatctggatctggagcaacaaacttctcactactcaaacaagcaggtgacgtggaggagaatcccgggcctactagtatggactggatttggcgcatccttttccttgtcggcgctgctaccggcgcgcattccgggccccagctccagctgcaagagtctggacctggcctggtcaagcctagcgagacactgagcctgacctgtaccgtgtccggcgatagcatcagcagcggcgattactactggggctggatcagacagcctcctggcaaaggactggaatggatcggccacatctactacagcggcgtgacctactacaaccccagcctgaagtccagagtgaccatcagcgtggacaccagccggaaccagttctccctgaagctgtctagcgtgacagccgccgataccgccgtgtactactgcaccagagaggacagcagcaactggcggagtagaggccagggaacactggtcacagttagctctggatccggcggaggcggaagtggaggcggaggatctggcggcggaggctctttcgaacaactccagctgcaagagtctggccctggcctggtcaagcctagcgaaacactgagcctgacctgtaccgtgtctggcggctctatcagctccagcagctatttctggggctggatcagacaacctcctggcaaaggactggaatggatcggctccatctactacagcggcatcacctactacaaccccagcctgaagtccagagtgaccatctccgtggacaccagcaagaaccagttctccctgaagctgagcagcgtgacagccgccgataccgccgtgtattattgtgccagacatgacggcgctgtggccggcctgtttgattattggggacagggcaccctggtcaccgtgtcatctgctacgcgtgcctctacaaagggaccctccgtgtttcctctggctcccagcagcaagtctacaagcggaggaacagccgctctgggctgcctggtcaaggattactttcccgagcctgtgaccgtgtcctggaatagcggagcactgacaagcggcgtgcacacctttccagccgtgctgcaaagcagcggcctgtactctctgagcagcgtggtcacagtgcctagctctagcctgggcacccagacctacatctgcaatgtgaaccacaagcctagcaacaccaaggtggacaagagagtggaacccaagagctgtgaagtgaaaaccgactccaccgaccacgtgaagcccaaagagacagagaacaccaagcagcccagcaagagctgccacaagcccaaggccatcgtgcacaccgagaaagtgaacatgatgagcctgaccgtgctgggcctgcggatgctgttcgccaaaaccgtggccgtgaacttcctgctgaccgccaagctgttcttcctc

SEQ ID NO: 8370 - DNA, 2706 bp, Artificial Sequence
  Synthetic Polynucloetide
atggccttaccagtgaccgccttgctcctgccgctggccttgctgctccacgccgccaggccggaagtgcagctggttgaatctggcggaggactggttcagcctggcggatctctgagactgtcttgtgccgccagcggcttcagcttcagcgacttttggatgagctgggtccgacaggcccctggcaaaggacttgaatgggtcgccacaatcagccaggccggcagcgagaaggactacgtggactctgtgaagggcagattcaccatcagccgggacaacgccaagaagtccctgtacctccagatgaacagcctgagagccgaggacaccgccgtgtactattgtgcctctggcgtgtacagcttcgactacagaggccagggcaccctggtcacagtctcttctggtaccggcggaggcggatctggcggcggaggtagcggtggcggaggatctgaattcagctacgtgctgacacagcctccatccgtgtctgtggctccaggacagaccgccagaatcacatgcggcggcaacaacatcggcggcaagagcgtgcactggtatcagcagccacctggacaggctccagtggtggtggtgtacgacgacagcgatagacctagcggcatccccgagagattcagcggcagcaattccggcaataccgccacactgaccatcagcagagtggaagctggcgacgaggccgtgtactactgccaagtgtgggacagcagcagcgatcacgtggtgtttggcggcggaacaaagctgacagtgcttctcgagggacagcctaaggccaatcctaccgtgacactgttccctccaagcagcgaagaactccaggccaacaaggccacacttgtgtgcctgatctccgacttctaccctggggctgtgacagtggcttggaaggccgatggatctcctgtgaaagccggcgtggaaaccaccaagccatccaagcagagcaacaacaaatacgccgccagctcctacctgagcctgacacctgagcagtggaagtcccacagatcctacagctgccaagtgacccacgaaggcagcaccgtggaaaagacagtggcccctacagagtgcagcggcagagccgattgcggctttaccagcgagagctaccagcagggcgtgctgagcgccaccatcctgtacgagatcctgctgggcaaggccaccctgtacgccgtgctggtgtctgccctggtgctgatggctatggtcaagcggaaggacagccggggacgcgccaagagaagcggatctggcgtgaagcagaccctgaatttcgacctgctgaagctggctggcgacgtggaatccaacccaggccctactagtatggactggatttggcgcatccttttccttgtcggcgctgctaccggcgcgcattccgggccccagctccagctgcaagagtctggacctggcctggtcaagcctagcgagacactgagcctgacctgtaccgtgtccggcgatagcatcagcagcggcgattactactggggctggatcagacagcctcctggcaaaggactggaatggatcggccacatctactacagcggcgtgacctactacaaccccagcctgaagtccagagtgaccatcagcgtggacaccagccggaaccagttctccctgaagctgtctagcgtgacagccgccgataccgccgtgtactactgcaccagagaggacagcagcaactggcggagtagaggccagggaacactggtcacagttagctctggatccggcggaggcggaagtggaggcggaggatctggcggcggaggctctttcgaacaactccagctgcaagagtctggccctggcctggtcaagcctagcgaaacactgagcctgacctgtaccgtgtctggcggctctatcagctccagcagctatttctggggctggatcagacaacctcctggcaaaggactggaatggatcggctccatctactacagcggcatcacctactacaaccccagcctgaagtccagagtgaccatctccgtggacaccagcaagaaccagttctccctgaagctgagcagcgtgacagccgccgataccgccgtgtattattgtgccagacatgacggcgctgtggccggcctgtttgattattggggacagggcaccctggtcaccgtgtcatctgctacgcgtgcctctacaaagggaccctccgtgtttcctctggctcccagcagcaagtctacaagcggaggaacagccgctctgggctgcctggtcaaggattactttcccgagcctgtgaccgtgtcctggaatagcggagcactgacaagcggcgtgcacacctttccagccgtgctgcaaagcagcggcctgtactctctgagcagcgtggtcacagtgcctagctctagcctgggcacccagacctacatctgcaatgtgaaccacaagcctagcaacaccaaggtggacaagagagtggaacccaagagctgtatccccgaggacacattcttcccaagccccgagagcagctgcgacgtgaagctggtggaaaagagcttcgagacagacaccaacctgaacttccagaacctgagcgtgatcggcttcagaatcctgctgctgaaagtggccggctttaacctgctgatgaccctgcggctgtggtccagc

SEQ ID NO: 8371 - DNA, 2277 bp, Artificial Sequence
  Synthetic Polynucloetide
atggccttaccagtgaccgccttgctcctgccgctggccttgctgctccacgccgccaggccggaagtgcaggttttggagtctggcggaggactggttcagcctggcggatctctgagactgtcttgtgccgccagcggcttcaccttcagcaactttgccatgagctgggtccgacaggcccctggcaaaggacttgaatgggtgtccacaatcagcggcagcgccggcacaacagattacgccgattctgtgaagggcagattcaccatcagccgggacaacagcaagaaaaccctgtacctccagatgaacagcctgcgcgtggaagataccgccgtgtactactgtgccgatggcagaggccccttcttcgattatcgcggccagggcacactggtcaccgtttcttctggtaccggcggaggcggatctggcggcggaggtagcggtggcggaggatctgaattcagctacgtgctgacacagcctccatccgtgtctgtggctccaggacagaccgccagaatcacatgcggcggcaacaacatcggcggcaagagcgtgcactggtatcagcagccacctggacaggctccagtggtggtggtgtacgacgacagcgatagacctagcggcatccccgagagattcagcggcagcaattccggcaataccgccacactgaccatcagcagagtggaagctggcgacgaggccgtgtactactgccaagtgtgggacagcagcagcgatcacgtggtgtttggcggcggaacaaagctgacagtgcttctcgaggacctgaagaacgtgttcccacctgaggtggccgtgttcgagcctagcgaggccgagatcagccacacccagaaagccaccctcgtgtgcctggctaccggcttctaccccgaccatgtggaactgtcttggtgggtcaacggcaaagaggtgcacagcggcgtgtgtaccgacccccagccactgaaagaacagcccgccctgaacgacagccggtactgcctgagcagcagactgagagtgtccgccaccttctggcagaacccccggaaccacttcagatgccaggtgcagttctacggcctgagcgagaacgacgagtggacccaggacagagccaagcccgtgacccagatcgtgtctgccgaagcctggggcagagccgattgcggctttaccagcgagagctaccagcagggcgtgctgagcgccaccatcctgtacgagatcctgctgggcaaggccaccctgtacgccgtgctggtgtctgccctggtgctgatggctatggtcaagcggaaggacagccggggaagggccaagcgatctggatctggagcaacaaacttctcactactcaaacaagcaggtgacgtggaggagaatcccgggcctactagtatggactggatttggcgcatccttttccttgtcggcgctgctaccggcgcgcattccttcgaacaactccagctgcaagagtctggccctggcctggtcaagcctagcgaaacactgagcctgacctgtaccgtgtctggcggctctatcagctccagcagctatttctggggctggatcagacaacctcctggcaaaggactggaatggatcggctccatctactacagcggcatcacctactacaaccccagcctgaagtccagagtgaccatctccgtggacaccagcaagaaccagttctccctgaagctgagcagcgtgacagccgccgataccgccgtgtattattgtgccagacatgacggcgctgtggccggcctgtttgattattggggacagggcaccctggtcaccgtgtcatctgctacgcgtatccagaaccctgatcctgccgtgtaccagctgcgggatagcaagagcagcgacaagagcgtgtgtctgttcaccgacttcgacagccagaccaacgtgtcccagagcaaggactccgacgtgtacatcaccgataagtgcgtgctggacatgcggagcatggacttcaagagcaactccgccgtggcctggtccaacaagtccgatttcgcctgcgccaacgccttcaacaacagcattatccccgaggacacattcttcccaagccccgagagcagctgcgacgtgaagctggtggaaaagagcttcgagacagacaccaacctgaacttccagaacctgagcgtgatcggcttcagaatcctgctgctgaaagtggccggctttaacctgctgatgaccctgcggctgtggtccagc

SEQ ID NO: 8372 - DNA, 2280 bp, Artificial Sequence
  Synthetic Polynucloetide
atggccttaccagtgaccgccttgctcctgccgctggccttgctgctccacgccgccaggccgagctacgtgctgacacagcctccatccgtgtctgtggctccaggacagaccgccagaatcacatgcggcggcaacaacatcggcggcaagagcgtgcactggtatcagcagccacctggacaggctccagtggtggtggtgtacgacgacagcgatagacctagcggcatccccgagagattcagcggcagcaattccggcaataccgccacactgaccatcagcagagtggaagctggcgacgaggccgtgtactactgccaagtgtgggacagcagcagcgatcacgtggtgtttggcggcggaacaaagctgacagtgcttctcgaggacctgaagaacgtgttcccacctgaggtggccgtgttcgagcctagcgaggccgagatcagccacacccagaaagccaccctcgtgtgcctggctaccggcttctaccccgaccatgtggaactgtcttggtgggtcaacggcaaagaggtgcacagcggcgtgtgtaccgacccccagccactgaaagaacagcccgccctgaacgacagccggtactgcctgagcagcagactgagagtgtccgccaccttctggcagaacccccggaaccacttcagatgccaggtgcagttctacggcctgagcgagaacgacgagtggacccaggacagagccaagcccgtgacccagatcgtgtctgccgaagcctggggcagagccgattgcggctttaccagcgagagctaccagcagggcgtgctgagcgccaccatcctgtacgagatcctgctgggcaaggccaccctgtacgccgtgctggtgtctgccctggtgctgatggctatggtcaagcggaaggacagccggggaagggccaagcgatctggatctggagcaacaaacttctcactactcaaacaagcaggtgacgtggaggagaatcccgggcctactagtatggactggatttggcgcatccttttccttgtcggcgctgctaccggcgcccattccgggcccgaagtgcagctggttgaatctggcggaggactggttcaggctggcggatctctgagactgtcttgtgccgccagcggcagaacctttagcatgggctggtttagacaggcccctggcaaagagagagagttcgtcgccgccatcacatactctggcggcagcccttactacgccgactctgtgaagggcagattcaccatcagccgggacaacgccaagaacaccgtgtacctccagatgaacagcctgaagcctgaggacaccgccgtgtactactgcgccgccaatccaacatacggcagcgactggaacgccgagaattggggccagggaacccaagtgacagtgtctagcggatccggcggcggaggatctggcggaggcggatctgggggcggaggctctttcgaacaactccagctgcaagagtctggccctggcctggtcaagcctagcgaaacactgagcctgacctgtaccgtgtctggcggctctatcagctccagcagctatttctggggctggatcagacaacctcctggcaaaggactggaatggatcggctccatctactacagcggcatcacctactacaaccccagcctgaagtccagagtgaccatctccgtggacaccagcaagaaccagttctccctgaagctgagcagcgtgacagccgccgataccgccgtgtattattgtgccagacatgacggcgctgtggccggcctgtttgattattggggacagggcaccctggtcaccgtgtcatctgctacgcgtatccagaaccctgatcctgccgtgtaccagctgcgggatagcaagagcagcgacaagagcgtgtgtctgttcaccgacttcgacagccagaccaacgtgtcccagagcaaggactccgacgtgtacatcaccgataagtgcgtgctggacatgcggagcatggacttcaagagcaactccgccgtggcctggtccaacaagtccgatttcgcctgcgccaacgccttcaacaacagcattatccccgaggacacattcttcccaagccccgagagcagctgcgacgtgaagctggtggaaaagagcttcgagacagacaccaacctgaacttccagaacctgagcgtgatcggcttcagaatcctgctgctgaaagtggccggctttaacctgctgatgaccctgcggctgtggtccagc

SEQ ID NO: 8373 - DNA, 2661 bp, Artificial Sequence
  Synthetic Polynucloetide
atggccttaccagtgaccgccttgctcctgccgctggccttgctgctccacgccgccaggccgagctacgtgctgacacagcctccatccgtgtctgtggctccaggacagaccgccagaatcacatgcggcggcaacaacatcggcggcaagagcgtgcactggtatcagcagccacctggacaggctccagtggtggtggtgtacgacgacagcgatagacctagcggcatccccgagagattcagcggcagcaattccggcaataccgccacactgaccatcagcagagtggaagctggcgacgaggccgtgtactactgccaagtgtgggacagcagcagcgatcacgtggtgtttggcggcggaacaaagctgacagtgcttctcgaggacctgaagaacgtgttcccacctgaggtggccgtgttcgagcctagcgaggccgagatcagccacacccagaaagccaccctcgtgtgcctggctaccggcttctaccccgaccatgtggaactgtcttggtgggtcaacggcaaagaggtgcacagcggcgtgtgtaccgacccccagccactgaaagaacagcccgccctgaacgacagccggtactgcctgagcagcagactgagagtgtccgccaccttctggcagaacccccggaaccacttcagatgccaggtgcagttctacggcctgagcgagaacgacgagtggacccaggacagagccaagcccgtgacccagatcgtgtctgccgaagcctggggcagagccgattgcggctttaccagcgagagctaccagcagggcgtgctgagcgccaccatcctgtacgagatcctgctgggcaaggccaccctgtacgccgtgctggtgtctgccctggtgctgatggctatggtcaagcggaaggacagccggggaagggccaagcgatctggatctggagcaacaaacttctcactactcaaacaagcaggtgacgtggaggagaatcccgggcctactagtatggactggatttggcgcatccttttccttgtcggcgctgctaccggcgcccattcccaactgcaactgcaagagtctggccctggcctggtcaagccttctgaaaccctgagcctgacctgtaccgtgtccggcggctctatcagcagcggcgattactactggggctggatcagacagcctccaggcaagggactcgaatggatcggcagcatcagctacagcggctccacctactacaacccaagcctgaagtccagagtgaccatcagcgtggacaccagcagaaaccagttctccctgaagctgagcagcgtgacagccgccgatacagccgtgtattattgcaccagagaggacagcagcaactggcggagtagaggacagggcacactggtcacagtgtcctcttctggaggcggtggaagcggtggaggaggatctgaagtgcagctggttgaatctggcggaggactggttcaggctggcggatctctgagactgtcttgtgccgccagcggcagaacctttagcatgggctggtttagacaggcccctggcaaagagagagagttcgtcgccgccatcacatactctggcggcagcccttactacgccgactctgtgaagggcagattcaccatcagccgggacaacgccaagaacaccgtgtacctccagatgaacagcctgaagcctgaggacaccgccgtgtactactgcgccgccaatccaacatacggcagcgactggaacgccgagaattggggccagggaacccaagtgacagtgtctagcggatccggcggcggaggatctggcggaggcggatctgggggcggaggctctttcgaacaactccagctgcaagagtctggccctggcctggtcaagcctagcgaaacactgagcctgacctgtaccgtgtctggcggctctatcagctccagcagctatttctggggctggatcagacaacctcctggcaaaggactggaatggatcggctccatctactacagcggcatcacctactacaaccccagcctgaagtccagagtgaccatctccgtggacaccagcaagaaccagttctccctgaagctgagcagcgtgacagccgccgataccgccgtgtattattgtgccagacatgacggcgctgtggccggcctgtttgattattggggacagggcaccctggtcaccgtgtcatctgctacgcgtatccagaaccctgatcctgccgtgtaccagctgcgggatagcaagagcagcgacaagagcgtgtgtctgttcaccgacttcgacagccagaccaacgtgtcccagagcaaggactccgacgtgtacatcaccgataagtgcgtgctggacatgcggagcatggacttcaagagcaactccgccgtggcctggtccaacaagtccgatttcgcctgcgccaacgccttcaacaacagcattatccccgaggacacattcttcccaagccccgagagcagctgcgacgtgaagctggtggaaaagagcttcgagacagacaccaacctgaacttccagaacctgagcgtgatcggcttcagaatcctgctgctgaaagtggccggctttaacctgctgatgaccctgcggctgtggtccagc

SEQ ID NO: 8374 - DNA, 2688 bp, Artificial Sequence
  Synthetic Polynucloetide
atggccttaccagtgaccgccttgctcctgccgctggccttgctgctccacgccgccaggccggaagtgcaggttttggagtctggcggaggactggttcagcctggcggatctctgagactgtcttgtgccgccagcggcttcaccttcagcaactttgccatgagctgggtccgacaggcccctggcaaaggacttgaatgggtgtccacaatcagcggcagcgccggcacaacagattacgccgattctgtgaagggcagattcaccatcagccgggacaacagcaagaaaaccctgtacctccagatgaacagcctgcgcgtggaagataccgccgtgtactactgtgccgatggcagaggccccttcttcgattatcgcggccagggcacactggtcaccgtttcttctggtaccggcggaggcggatctggcggcggaggtagcggtggcggaggatctgaattcagctacgtgctgacacagcctccatccgtgtctgtggctccaggacagaccgccagaatcacatgcggcggcaacaacatcggcggcaagagcgtgcactggtatcagcagccacctggacaggctccagtggtggtggtgtacgacgacagcgatagacctagcggcatccccgagagattcagcggcagcaattccggcaataccgccacactgaccatcagcagagtggaagctggcgacgaggccgtgtactactgccaagtgtgggacagcagcagcgatcacgtggtgtttggcggcggaacaaagctgacagtgcttctcgaggacctgaagaacgtgttcccacctgaggtggccgtgttcgagcctagcgaggccgagatcagccacacccagaaagccaccctcgtgtgcctggctaccggcttctaccccgaccatgtggaactgtcttggtgggtcaacggcaaagaggtgcacagcggcgtgtgtaccgacccccagccactgaaagaacagcccgccctgaacgacagccggtactgcctgagcagcagactgagagtgtccgccaccttctggcagaacccccggaaccacttcagatgccaggtgcagttctacggcctgagcgagaacgacgagtggacccaggacagagccaagcccgtgacccagatcgtgtctgccgaagcctggggcagagccgattgcggctttaccagcgagagctaccagcagggcgtgctgagcgccaccatcctgtacgagatcctgctgggcaaggccaccctgtacgccgtgctggtgtctgccctggtgctgatggctatggtcaagcggaaggacagccggggaagggccaagcgatctggatctggagcaacaaacttctcactactcaaacaagcaggtgacgtggaggagaatcccgggcctactagtatggactggatttggcgcatccttttccttgtcggcgctgctaccggcgcccattccgggcccgaagtgcagctggttgaatctggcggaggactggttcaggctggcggatctctgagactgtcttgtgccgccagcggcagaacctttagcatgggctggtttagacaggcccctggcaaagagagagagttcgtcgccgccatcacatacagcggcggcagcccttactacgcctcttctgtcagaggccggttcaccatcagccgggacaacgccaagaacaccgtgtacctccagatgaacagcctgaagccagaggacaccgccgtgtactactgtgccgccaatccaacctacggcagcgactggaatgccgagaattggggccagggcacccaagtgacagtgtctagtggatccggcggcggaggatctggcggaggcggatctgggggcggaggctctttcgaacaactccagctgcaagagtctggccctggcctggtcaagcctagcgaaacactgagcctgacctgtaccgtgtctggcggctctatcagctccagcagctatttctggggctggatcagacaacctcctggcaaaggactggaatggatcggctccatctactacagcggcatcacctactacaaccccagcctgaagtccagagtgaccatctccgtggacaccagcaagaaccagttctccctgaagctgagcagcgtgacagccgccgataccgccgtgtattattgtgccagacatgacggcgctgtggccggcctgtttgattattggggacagggcaccctggtcaccgtgtcatctgctacgcgtatccagaaccctgatcctgccgtgtaccagctgcgggatagcaagagcagcgacaagagcgtgtgtctgttcaccgacttcgacagccagaccaacgtgtcccagagcaaggactccgacgtgtacatcaccgataagtgcgtgctggacatgcggagcatggacttcaagagcaactccgccgtggcctggtccaacaagtccgatttcgcctgcgccaacgccttcaacaacagcattatccccgaggacacattcttcccaagccccgagagcagctgcgacgtgaagctggtggaaaagagcttcgagacagacaccaacctgaacttccagaacctgagcgtgatcggcttcagaatcctgctgctgaaagtggccggctttaacctgctgatgaccctgcggctgtggtccagc

SEQ ID NO: 8375 - DNA, 2175 bp, Artificial Sequence
  Synthetic Polynucloetide
atggccttaccagtgaccgccttgctcctgccgctggccttgctgctccacgccgccaggccggagatcgtgctgacacagtctcccgccacactgtcactgtctccaggcgaaagagccacactgagctgtagagccagccagagcgtgtcctcttacctggcctggtatcagcagaagcctggacaggctccccggctgctgatctacgatgccagcaatagagccacaggcatccccgccagattttctggctctggcagcggcaccgatttcaccctgaccataagcagcctggaacctgaggacttcgccgtgtactactgccagcagagaagcaactggcccctgacctttggacagggcaccaaggtggaaatcaaaggcggaggcggaagtggaggcggaggatctggcggcggaggctctcaagttcagctggttcagagcggagccgaagtgaagaaacctggcagcagcgtgaaggtgtcctgcaaagcaagcggcggcacctttagcacctacgccatccactgggttcgacaggcaccaggacaaggactggaatggatgggcagaatcatccccatcgagggcagagcctactacgcccagaaattccagggcagagtgaccatcaccgccgacgagtctacaagcaccgcctacatggaactgagcagcctgagaagcgaggataccgctgtgtactattgcgccagaggccggtacagctacagatattggttcgactactggggccagggcaccctggttacagtctcttctacgcgtgagcagaaactgatctcggaagaggatctggcgaagcccaccacgacgccagcgccgcgaccaccaacaccggcgcccaccatcgcgtcgcagcccctgtccctgcgcccagaggcgtgccggccagcggcggggggcgcagtgcacacgagggggctggacttcgcctgtgacatctacatctgggcgcccttggccgggacttgtggggtccttctcctgtcactggttatcaccctttactgcaaacggggcagaaagaaactcctgtatatattcaaacaaccatttatgagaccagtacaaactactcaagaggaagatggctgtagctgccgatttccagaagaagaagaaggaggatgtgaactgagagtgaagttcagcaggagcgcagacgcccccgcgtaccagcagggccagaaccagctctataacgagctgaatctaggacgaagagaggagtacgatgttttggacaagagacgtggccgggaccctgagatggggggaaagccgagaaggaagaaccctcaggaaggcctgtacaatgaactgcagaaagataagatggcggaggcctacagtgagattgggatgaaaggcgagcgccggaggggcaaggggcacgatggcctttaccagggtctcagtacagccaccaaggacacctacgacgcccttcacatgcaggccctgccccctcgctctagtggctccggcgagggcagaggaagtctactaacctgcggagatgtggaagaaaatcctggcccacatatgaccgagtacaagcccacggtgcgcctcgccacccgcgacgacgtccccagggccgtacgcaccctcgccgccgcgttcgccgactaccccgccacgcgccacaccgtcgatccggaccgccacatcgagcgggtcaccgagctgcaagaactcttcctcacgcgcgtcgggctcgacatcggcaaggtgtgggtcgcggacgacggcgccgcggtggcggtctggaccacgccggagagcgtcgaagcgggggcggtgttcgccgagatcggcccgcgcatggccgagttgagcggttcccggctggccgcgcagcaacagatggaaggcctcctggcgccgcaccggcccaaggagcccgcgtggttcctggccaccgtcggcgtctcgcccgaccaccagggcaagggtctgggcagcgccgtcgtgctccccggagtggaggcggccgagcgcgccggggtgcccgccttcctggagacctccgcgccccgcaacctccccttctacgagcggctcggcttcaccgtcaccgccgacgtcgaggtgcccgaaggaccgcgcacctggtgcatgacccgcaagcccggtgcctga

SEQ ID NO: 8376 - DNA, 2157 bp, Artificial Sequence
  Synthetic Polynucloetide
atggccttaccagtgaccgccttgctcctgccgctggccttgctgctccacgccgccaggccggagatcgtgctgacacagtctcccgccacactgtcactgtctccaggcgaaagagccacactgagctgtagagccagccagagcgtgtcctcttacctggcctggtatcagcagaagcctggacaggctccccggctgctgatctacgatgccagcaatagagccacaggcatccccgccagattttctggctctggcagcggcaccgatttcaccctgaccataagcagcctggaacctgaggacttcgccgtgtactactgccagcagagaagcaactggcccctgacctttggacagggcaccaaggtggaaatcaaaggcggaggcggaagtggaggcggaggatctggcggcggaggctctcaagttcagctggttcagagcggagccgaagtgaagaaacctggcagcagcgtgaaggtgtcctgcaaagcaagcggcggcacctttagcacctacgccatccactgggttcgacaggcaccaggacaaggactggaatggatgggcagaatcatccccatcgagggcagagcctactacgcccagaaattccagggcagagtgaccatcaccgccgacgagtctacaagcaccgcctacatggaactgagcagcctgagaagcgaggataccgctgtgtactattgcgccagaggccggtacagctacagatattggttcgactactggggccagggcaccctggttacagtctcttctacgcgtgagcagaaactgatctcggaagaggatctgaaaattgaagttatgtatcctcctccttacctagacaatgagaagagcaatggaaccattatccatgtgaaagggaaacacctttgtccaagtcccctatttcccggaccttctaagcccttttgggtgctggtggtggttgggggagtcctggcttgctatagcttgctagtaacagtggcctttattattttctgggtgaggagtaagaggagcaggctcctgcacagtgactacatgaacatgactccacgccgccccggacccacccgcaagcattaccagccctatgccccaccacgcgacttcgcagcctatcgctccagagtgaagttcagcaggagcgcagacgcccccgcgtaccagcagggccagaaccagctctataacgagctcaatctaggacgaagagaggagtacgatgttttggacaagagacgtggccgggaccctgagatggggggaaagccgagaaggaagaaccctcaggaaggcctgtacaatgaactgcagaaagataagatggcggaggcctacagtgagattgggatgaaaggcgagcgccggaggggcaaggggcacgatggcctttaccagggtctcagtacagccaccaaggacacctacgacgcccttcacatgcaggccctgccccctcgctctagtggctccggcgagggcagaggaagtctactaacctgcggagatgtggaagaaaatcctggcccacatatgaccgagtacaagcccacggtgcgcctcgccacccgcgacgacgtccccagggccgtacgcaccctcgccgccgcgttcgccgactaccccgccacgcgccacaccgtcgatccggaccgccacatcgagcgggtcaccgagctgcaagaactcttcctcacgcgcgtcgggctcgacatcggcaaggtgtgggtcgcggacgacggcgccgcggtggcggtctggaccacgccggagagcgtcgaagcgggggcggtgttcgccgagatcggcccgcgcatggccgagttgagcggttcccggctggccgcgcagcaacagatggaaggcctcctggcgccgcaccggcccaaggagcccgcgtggttcctggccaccgtcggcgtctcgcccgaccaccagggcaagggtctgggcagcgccgtcgtgctccccggagtggaggcggccgagcgcgccggggtgcccgccttcctggagacctccgcgccccgcaacctccccttctacgagcggctcggcttcaccgtcaccgccgacgtcgaggtgcccgaaggaccgcgcacctggtgcatgacccgcaagcccggtgcctga

SEQ ID NO: 8377 - DNA, 1485 bp, Artificial Sequence
  Synthetic Polynucloetide
atggccttaccagtgaccgccttgctcctgccgctggccttgctgctccacgccgccaggccggagatcgtgctgacacagtctcccgccacactgtcactgtctccaggcgaaagagccacactgagctgtagagccagccagagcgtgtcctcttacctggcctggtatcagcagaagcctggacaggctccccggctgctgatctacgatgccagcaatagagccacaggcatccccgccagattttctggctctggcagcggcaccgatttcaccctgaccataagcagcctggaacctgaggacttcgccgtgtactactgccagcagagaagcaactggcccctgacctttggacagggcaccaaggtggaaatcaaaggcggaggcggaagtggaggcggaggatctggcggcggaggctctcaagttcagctggttcagagcggagccgaagtgaagaaacctggcagcagcgtgaaggtgtcctgcaaagcaagcggcggcacctttagcacctacgccatccactgggttcgacaggcaccaggacaaggactggaatggatgggcagaatcatccccatcgagggcagagcctactacgcccagaaattccagggcagagtgaccatcaccgccgacgagtctacaagcaccgcctacatggaactgagcagcctgagaagcgaggataccgctgtgtactattgcgccagaggccggtacagctacagatattggttcgactactggggccagggcaccctggttacagtctcttctacgcgtgagcagaaactgatctcggaagaggatctgaaaattgaagttatgtatcctcctccttacctagacaatgagaagagcaatggaaccattatccatgtgaaagggaaacacctttgtccaagtcccctatttcccggaccttctaagcccttttgggtgctggtggtggttgggggagtcctggcttgctatagcttgctagtaacagtggcctttattattttctgggtgaggagtaagaggagcaggctcctgcacagtgactacatgaacatgactccacgccgccccggacccacccgcaagcattaccagccctatgccccaccacgcgacttcgcagcctatcgctccagagtgaagttcagcaggagcgcagacgcccccgcgtaccagcagggccagaaccagctctataacgagctcaatctaggacgaagagaggagtacgatgttttggacaagagacgtggccgggaccctgagatggggggaaagccgagaaggaagaaccctcaggaaggcctgtacaatgaactgcagaaagataagatggcggaggcctacagtgagattgggatgaaaggcgagcgccggaggggcaaggggcacgatggcctttaccagggtctcagtacagccaccaaggacacctacgacgcccttcacatgcaggccctgccccctcgc

SEQ ID NO: 8378 - DNA, 1506 bp, Artificial Sequence
  Synthetic Polynucloetide
atggccttaccagtgaccgccttgctcctgccgctggccttgctgctccacgccgccaggccggagatcgtgctgacacagtctcccgccacactgtcactgtctccaggcgaaagagccacactgagctgtagagccagccagagcgtgtcctcttacctggcctggtatcagcagaagcctggacaggctccccggctgctgatctacgatgccagcaatagagccacaggcatccccgccagattttctggctctggcagcggcaccgatttcaccctgaccataagcagcctggaacctgaggacttcgccgtgtactactgccagcagagaagcaactggcccctgacctttggacagggcaccaaggtggaaatcaaaggcggaggcggaagtggaggcggaggatctggcggcggaggctctcaagttcagctggttcagagcggagccgaagtgaagaaacctggcagcagcgtgaaggtgtcctgcaaagcaagcggcggcacctttagcacctacgccatccactgggttcgacaggcaccaggacaaggactggaatggatgggcagaatcatccccatcgagggcagagcctactacgcccagaaattccagggcagagtgaccatcaccgccgacgagtctacaagcaccgcctacatggaactgagcagcctgagaagcgaggataccgctgtgtactattgcgccagaggccggtacagctacagatattggttcgactactggggccagggcaccctggttacagtctcttctacgcgtgagcagaaactgatctcggaagaggatctggcgaagcccaccacgacgccagcgccgcgaccaccaacaccggcgcccaccatcgcgtcgcagcccctgtccctgcgcccagaggcgtgccggccagcggcggggggcgcagtgcacacgagggggctggacttcgcctgtgacatctacatctgggcgcccttggccgggacttgtggggtccttctcctgtcactggttatcaccctttactgcaaacggggcagaaagaaactcctgtatatattcaaacaaccatttatgagaccagtacaaactactcaagaggaagatggctgtagctgccgatttccagaagaagaagaaggaggatgtgaactgagagtgaagttcagcaggagcgcagacgcccccgcgtaccagcagggccagaaccagctctataacgagctgaatctaggacgaagagaggagtacgatgttttggacaagagacgtggccgggaccctgagatggggggaaagccgagaaggaagaaccctcaggaaggcctgtacaatgaactgcagaaagataagatggcggaggcctacagtgagattgggatgaaaggcgagcgccggaggggcaaggggcacgatggcctttaccagggtctcagtacagccaccaaggacacctacgacgcccttcacatgcaggccctgccccctcgctga

SEQ ID NO: 8379 - DNA, 1506 bp, Artificial Sequence
  Synthetic Polynucloetide
atggccttaccagtgaccgccttgctcctgccgctggccttgctgctccacgccgccaggccgcaagttcagctggttcagagcggagccgaagtgaagaaacctggcagcagcgtgaaggtgtcctgcaaagcaagcggcggcacctttagcacctacgccatccactgggttcgacaggcaccaggacaaggactggaatggatgggcagaatcatccccatcgagggcagagcctactacgcccagaaattccagggcagagtgaccatcaccgccgacgagtctacaagcaccgcctacatggaactgagcagcctgagaagcgaggataccgctgtgtactattgcgccagaggccggtacagctacagatattggttcgactactggggccagggcaccctggttacagtctcttctggcggaggcggaagtggaggcggaggatctggcggcggaggctctgagatcgtgctgacacagtctcccgccacactgtcactgtctccaggcgaaagagccacactgagctgtagagccagccagagcgtgtcctcttacctggcctggtatcagcagaagcctggacaggctccccggctgctgatctacgatgccagcaatagagccacaggcatccccgccagattttctggctctggcagcggcaccgatttcaccctgaccataagcagcctggaacctgaggacttcgccgtgtactactgccagcagagaagcaactggcccctgacctttggacagggcaccaaggtggaaatcaaaacgcgtgagcagaaactgatctcggaagaggatctggcgaagcccaccacgacgccagcgccgcgaccaccaacaccggcgcccaccatcgcgtcgcagcccctgtccctgcgcccagaggcgtgccggccagcggcggggggcgcagtgcacacgagggggctggacttcgcctgtgacatctacatctgggcgcccttggccgggacttgtggggtccttctcctgtcactggttatcaccctttactgcaaacggggcagaaagaaactcctgtatatattcaaacaaccatttatgagaccagtacaaactactcaagaggaagatggctgtagctgccgatttccagaagaagaagaaggaggatgtgaactgagagtgaagttcagcaggagcgcagacgcccccgcgtaccagcagggccagaaccagctctataacgagctgaatctaggacgaagagaggagtacgatgttttggacaagagacgtggccgggaccctgagatggggggaaagccgagaaggaagaaccctcaggaaggcctgtacaatgaactgcagaaagataagatggcggaggcctacagtgagattgggatgaaaggcgagcgccggaggggcaaggggcacgatggcctttaccagggtctcagtacagccaccaaggacacctacgacgcccttcacatgcaggccctgccccctcgctga

SEQ ID NO: 8380 - DNA, 2745 bp, Artificial Sequence
  Synthetic Polynucloetide
atggccttaccagtgaccgccttgctcctgccgctggccttgctgctccacgccgccaggccggagatcgtgctgacacagtctcccgccacactgtcactgtctccaggcgaaagagccacactgagctgtagagccagccagagcgtgtcctcttacctggcctggtatcagcagaagcctggacaggctccccggctgctgatctacgatgccagcaatagagccacaggcatccccgccagattttctggctctggcagcggcaccgatttcaccctgaccataagcagcctggaacctgaggacttcgccgtgtactactgccagcagagaagcaactggcccctgacctttggacagggcaccaaggtggaaatcaaaggcggaggcggaagtggaggcggaggatctggcggcggaggctctcaagttcagctggttcagagcggagccgaagtgaagaaacctggcagcagcgtgaaggtgtcctgcaaagcaagcggcggcacctttagcacctacgccatccactgggttcgacaggcaccaggacaaggactggaatggatgggcagaatcatccccatcgagggcagagcctactacgcccagaaattccagggcagagtgaccatcaccgccgacgagtctacaagcaccgcctacatggaactgagcagcctgagaagcgaggataccgctgtgtactattgcgccagaggccggtacagctacagatattggttcgactactggggccagggcaccctggttacagtctcttctacgcgtgagcagaaactgatctcggaagaggatctggcgaagcccaccacgacgccagcgccgcgaccaccaacaccggcgcccaccatcgcgtcgcagcccctgtccctgcgcccagaggcgtgccggccagcggcggggggcgcagtgcacacgagggggctggacttcgcctgtgacatctacatctgggcgcccttggccgggacttgtggggtccttctcctgtcactggttatcaccctttactgcgggcgcgccagagtgaagttcagcaggagcgcagacgcccccgcgtaccagcagggccagaaccagctctataacgagctgaatctaggacgaagagaggagtacgatgttttggacaagagacgtggccgggaccctgagatggggggaaagccgagaaggaagaaccctcaggaaggcctgtacaatgaactgcagaaagataagatggcggaggcctacagtgagattgggatgaaaggcgagcgccggaggggcaaggggcacgatggcctttaccagggtctcagtacagccaccaaggacacctacgacgcccttcacatgcaggccctgccccctcgctctagaggatctggagcaacaaacttctcactactcaaacaagcaggtgacgtggaggagaatcccgggcctgggatccacatggccacttacgaggttctctgtgaggtggcgcggaaactgggcacggatgacagggaagtggtattgttcctcctaaacgtgttcatacctcaacccacactggcccaattaattggagctcttagagctttaaaggaggagggcaggttaacgtttcccctgttagcggaatgtctgtttcgtgcaggtcgcagagacctcttgcgcgacctgcttcacttagacccgcgttttttagagcgccacctagcgggcacaatgagttatttcagcccttatcagctcactgttctccacgtagacggggagctgtgtgcgagggatattaggtctttgatatttttaagcaaggacactatagggtctcgcagcacaccacagacattcttacactgggtgtactgtatggaaaacttagacctactgggtcccactgacgtggatgccctaatgtcaatgcttagatctttgtcaagagtagacctacagcgccaagtgcaaaccctaatgggccttcacctttccggcccatcacactcccaacactatcgccatacaccactcgagaccgatttctacgactacaaggacgacgatgacaagactagtggctccggcgagggcagaggaagtctactaacctgcggagatgtggaagaaaatcctggcccacatatgaccgagtacaagcccacggtgcgcctcgccacccgcgacgacgtccccagggccgtacgcaccctcgccgccgcgttcgccgactaccccgccacgcgccacaccgtcgatccggaccgccacatcgagcgggtcaccgagctgcaagaactcttcctcacgcgcgtcgggctcgacatcggcaaggtgtgggtcgcggacgacggcgccgcggtggcggtctggaccacgccggagagcgtcgaagcgggggcggtgttcgccgagatcggcccgcgcatggccgagttgagcggttcccggctggccgcgcagcaacagatggaaggcctcctggcgccgcaccggcccaaggagcccgcgtggttcctggccaccgtcggcgtctcgcccgaccaccagggcaagggtctgggcagcgccgtcgtgctccccggagtggaggcggccgagcgcgccggggtgcccgccttcctggagacctccgcgccccgcaacctccccttctacgagcggctcggcttcaccgtcaccgccgacgtcgaggtgcccgaaggaccgcgcacctggtgcatgacccgcaagcccggtgcctga

SEQ ID NO: 8381 - DNA, 2565 bp, Artificial Sequence
  Synthetic Polynucloetide
atggccttaccagtgaccgccttgctcctgccgctggccttgctgctccacgccgccaggccggagatcgtgctgacacagtctcccgccacactgtcactgtctccaggcgaaagagccacactgagctgtagagccagccagagcgtgtcctcttacctggcctggtatcagcagaagcctggacaggctccccggctgctgatctacgatgccagcaatagagccacaggcatccccgccagattttctggctctggcagcggcaccgatttcaccctgaccataagcagcctggaacctgaggacttcgccgtgtactactgccagcagagaagcaactggcccctgacctttggacagggcaccaaggtggaaatcaaactcgagatccagaaccctgatcctgccgtgtaccagctgcgggatagcaagagcagcgacaagagcgtgtgtctgttcaccgacttcgacagccagaccaacgtgtcccagagcaaggactccgacgtgtacatcaccgataagtgcgtgctggacatgcggagcatggacttcaagagcaactccgccgtggcctggtccaacaagtccgatttcgcctgcgccaacgccttcaacaacagcattatccccgaggacacattcttcccaagcagcgacgtgccctgcgacgtgaagctggtggaaaagagcttcgagacagacaccaacctgaacttccagaacctgagcgtgatcggcttcagaatcctgctgctgaaagtggccggctttaacctgctgatgaccctgcggctgtggtccagccgcgccaagagaagcggatctggcgtgaagcagaccctgaatttcgacctgctgaagctggctggcgacgtggaatccaacccaggccctactagtatggactggatttggcgcatccttttccttgtcggcgctgctaccggcgcgcattccttcgaacaagttcagctggttcagagcggagccgaagtgaagaaacctggcagcagcgtgaaggtgtcctgcaaagcaagcggcggcacctttagcacctacgccatccactgggttcgacaggcaccaggacaaggactggaatggatgggcagaatcatccccatcgagggcagagcctactacgcccagaaattccagggcagagtgaccatcaccgccgacgagtctacaagcaccgcctacatggaactgagcagcctgagaagcgaggataccgctgtgtactattgcgccagaggccggtacagctacagatattggttcgactactggggccagggcaccctggttacagtctcttctacgcgtgaggacctgaagaacgtgttcccacctgaggtggccgtgttcgagcctagcaaggccgagatcgcccacacccagaaagccaccctcgtgtgcctggctaccggcttctaccccgaccatgtggaactgtcttggtgggtcaacggcaaagaggtgcacagcggcgtgtgtaccgacccccagccactgaaagaacagcccgccctgaacgacagccggtactgcctgagcagcagactgagagtgtccgccaccttctggcagaacccccggaaccacttcagatgccaggtgcagttctacggcctgagcgagaacgacgagtggacccaggacagagccaagcccgtgacccagatcgtgtctgccgaagcctggggcagagccgattgcggcatcaccagcgccagctaccaccagggcgtgctgagcgccaccatcctgtacgagatcctgctgggcaaggccaccctgtacgccgtgctggtgtctgccctggtgctgatggctatggtcaagcggaaggacagccggggaagggccaagcgatctggatctggagcaacaaacttctcactactcaaacaagcaggtgacgtggaggagaatcccgggccttctagaggccatatgaccgagtacaagcccacggtgcgcctcgccacccgcgacgacgtccccagggccgtacgcaccctcgccgccgcgttcgccgactaccccgccacgcgccacaccgtcgatccggaccgccacatcgagcgggtcaccgagctgcaagaactcttcctcacgcgcgtcgggctcgacatcggcaaggtgtgggtcgcggacgacggcgccgcggtggcggtctggaccacgccggagagcgtcgaagcgggggcggtgttcgccgagatcggcccgcgcatggccgagttgagcggttcccggctggccgcgcagcaacagatggaaggcctcctggcgccgcaccggcccaaggagcccgcgtggttcctggccaccgtcggcgtctcgcccgaccaccagggcaagggtctgggcagcgccgtcgtgctccccggagtggaggcggccgagcgcgccggggtgcccgccttcctggagacctccgcgccccgcaacctccccttctacgagcggctcggcttcaccgtcaccgccgacgtcgaggtgcccgaaggaccgcgcacctggtgcatgacccgcaagcccggtgcctga

SEQ ID NO: 8382 - DNA, 2562 bp, Artificial Sequence
  Synthetic Polynucloetide
atggccttaccagtgaccgccttgctcctgccgctggccttgctgctccacgccgccaggccggagatcgtgctgacacagtctcccgccacactgtcactgtctccaggcgaaagagccacactgagctgtagagccagccagagcgtgtcctcttacctggcctggtatcagcagaagcctggacaggctccccggctgctgatctacgatgccagcaatagagccacaggcatccccgccagattttctggctctggcagcggcaccgatttcaccctgaccataagcagcctggaacctgaggacttcgccgtgtactactgccagcagagaagcaactggcccctgacctttggacagggcaccaaggtggaaatcaaactcgaggacctgaagaacgtgttcccacctgaggtggccgtgttcgagcctagcaaggccgagatcgcccacacccagaaagccaccctcgtgtgcctggctaccggcttctaccccgaccatgtggaactgtcttggtgggtcaacggcaaagaggtgcacagcggcgtgtgtaccgacccccagccactgaaagaacagcccgccctgaacgacagccggtactgcctgagcagcagactgagagtgtccgccaccttctggcagaacccccggaaccacttcagatgccaggtgcagttctacggcctgagcgagaacgacgagtggacccaggacagagccaagcccgtgacccagatcgtgtctgccgaagcctggggcagagccgattgcggcatcaccagcgccagctaccaccagggcgtgctgagcgccaccatcctgtacgagatcctgctgggcaaggccaccctgtacgccgtgctggtgtctgccctggtgctgatggctatggtcaagcggaaggacagccggggaagggccaagcgatctggatctggagcaacaaacttctcactactcaaacaagcaggtgacgtggaggagaatcccgggcctactagtatggactggatttggcgcatccttttccttgtcggcgctgctaccggcgcgcattccttcgaacaagttcagctggttcagagcggagccgaagtgaagaaacctggcagcagcgtgaaggtgtcctgcaaagcaagcggcggcacctttagcacctacgccatccactgggttcgacaggcaccaggacaaggactggaatggatgggcagaatcatccccatcgagggcagagcctactacgcccagaaattccagggcagagtgaccatcaccgccgacgagtctacaagcaccgcctacatggaactgagcagcctgagaagcgaggataccgctgtgtactattgcgccagaggccggtacagctacagatattggttcgactactggggccagggcaccctggttacagtctcttctacgcgtatccagaaccctgatcctgccgtgtaccagctgcgggatagcaagagcagcgacaagagcgtgtgtctgttcaccgacttcgacagccagaccaacgtgtcccagagcaaggactccgacgtgtacatcaccgataagtgcgtgctggacatgcggagcatggacttcaagagcaactccgccgtggcctggtccaacaagtccgatttcgcctgcgccaacgccttcaacaacagcattatccccgaggacacattcttcccaagcagcgacgtgccctgcgacgtgaagctggtggaaaagagcttcgagacagacaccaacctgaacttccagaacctgagcgtgatcggcttcagaatcctgctgctgaaagtggccggctttaacctgctgatgaccctgcggctgtggtccagccgcgccaagagaagcggatctggcgtgaagcagaccctgaatttcgacctgctgaagctggctggcgacgtggaatccaacccaggcccttctagaggccatatgaccgagtacaagcccacggtgcgcctcgccacccgcgacgacgtccccagggccgtacgcaccctcgccgccgcgttcgccgactaccccgccacgcgccacaccgtcgatccggaccgccacatcgagcgggtcaccgagctgcaagaactcttcctcacgcgcgtcgggctcgacatcggcaaggtgtgggtcgcggacgacggcgccgcggtggcggtctggaccacgccggagagcgtcgaagcgggggcggtgttcgccgagatcggcccgcgcatggccgagttgagcggttcccggctggccgcgcagcaacagatggaaggcctcctggcgccgcaccggcccaaggagcccgcgtggttcctggccaccgtcggcgtctcgcccgaccaccagggcaagggtctgggcagcgccgtcgtgctccccggagtggaggcggccgagcgcgccggggtgcccgccttcctggagacctccgcgccccgcaacctccccttctacgagcggctcggcttcaccgtcaccgccgacgtcgaggtgcccgaaggaccgcgcacctggtgcatgacccgcaagcccggtgcctga

SEQ ID NO: 8383 - DNA, 1860 bp, Artificial Sequence
  Synthetic Polynucloetide
atggccttaccagtgaccgccttgctcctgccgctggccttgctgctccacgccgccaggccggagatcgtgctgacacagtctcccgccacactgtcactgtctccaggcgaaagagccacactgagctgtagagccagccagagcgtgtcctcttacctggcctggtatcagcagaagcctggacaggctccccggctgctgatctacgatgccagcaatagagccacaggcatccccgccagattttctggctctggcagcggcaccgatttcaccctgaccataagcagcctggaacctgaggacttcgccgtgtactactgccagcagagaagcaactggcccctgacctttggacagggcaccaaggtggaaatcaaactcgaggacctgaagaacgtgttcccacctgaggtggccgtgttcgagcctagcgaggccgagatcagccacacccagaaagccaccctcgtgtgcctggctaccggcttctaccccgaccatgtggaactgtcttggtgggtcaacggcaaagaggtgcacagcggcgtgtgtaccgacccccagccactgaaagaacagcccgccctgaacgacagccggtactgcctgagcagcagactgagagtgtccgccaccttctggcagaacccccggaaccacttcagatgccaggtgcagttctacggcctgagcgagaacgacgagtggacccaggacagagccaagcccgtgacccagatcgtgtctgccgaagcctggggcagagccgattgcggctttaccagcgagagctaccagcagggcgtgctgagcgccaccatcctgtacgagatcctgctgggcaaggccaccctgtacgccgtgctggtgtctgccctggtgctgatggctatggtcaagcggaaggacagccggggaagggccaagcgatctggatctggagcaacaaacttctcactactcaaacaagcaggtgacgtggaggagaatcccgggcctactagtatggactggatttggcgcatccttttccttgtcggcgctgctaccggcgcgcattccttcgaacaagttcagctggttcagagcggagccgaagtgaagaaacctggcagcagcgtgaaggtgtcctgcaaagcaagcggcggcacctttagcacctacgccatccactgggttcgacaggcaccaggacaaggactggaatggatgggcagaatcatccccatcgagggcagagcctactacgcccagaaattccagggcagagtgaccatcaccgccgacgagtctacaagcaccgcctacatggaactgagcagcctgagaagcgaggataccgctgtgtactattgcgccagaggccggtacagctacagatattggttcgactactggggccagggcaccctggttacagtctcttctacgcgtatccagaaccctgatcctgccgtgtaccagctgcgggatagcaagagcagcgacaagagcgtgtgtctgttcaccgacttcgacagccagaccaacgtgtcccagagcaaggactccgacgtgtacatcaccgataagtgcgtgctggacatgcggagcatggacttcaagagcaactccgccgtggcctggtccaacaagtccgatttcgcctgcgccaacgccttcaacaacagcattatccccgaggacacattcttcccaagccccgagagcagctgcgacgtgaagctggtggaaaagagcttcgagacagacaccaacctgaacttccagaacctgagcgtgatcggcttcagaatcctgctgctgaaagtggccggctttaacctgctgatgaccctgcggctgtggtccagc

SEQ ID NO: 8384 - DNA, 2535 bp, Artificial Sequence
  Synthetic Polynucloetide
atggccttaccagtgaccgccttgctcctgccgctggccttgctgctccacgccgccaggccggagatcgtgctgacacagtctcccgccacactgtcactgtctccaggcgaaagagccacactgagctgtagagccagccagagcgtgtcctcttacctggcctggtatcagcagaagcctggacaggctccccggctgctgatctacgatgccagcaatagagccacaggcatccccgccagattttctggctctggcagcggcaccgatttcaccctgaccataagcagcctggaacctgaggacttcgccgtgtactactgccagcagagaagcaactggcccctgacctttggacagggcaccaaggtggaaatcaaactcgaggacctgaagaacgtgttcccacctgaggtggccgtgttcgagcctagcgaggccgagatcagccacacccagaaagccaccctcgtgtgcctggctaccggcttctaccccgaccatgtggaactgtcttggtgggtcaacggcaaagaggtgcacagcggcgtgtgtaccgacccccagccactgaaagaacagcccgccctgaacgacagccggtactgcctgagcagcagactgagagtgtccgccaccttctggcagaacccccggaaccacttcagatgccaggtgcagttctacggcctgagcgagaacgacgagtggacccaggacagagccaagcccgtgacccagatcgtgtctgccgaagcctggggcagagccgattgcggctttaccagcgagagctaccagcagggcgtgctgagcgccaccatcctgtacgagatcctgctgggcaaggccaccctgtacgccgtgctggtgtctgccctggtgctgatggctatggtcaagcggaaggacagccggggaagggccaagcgatctggatctggagcaacaaacttctcactactcaaacaagcaggtgacgtggaggagaatcccgggcctactagtatggactggatttggcgcatccttttccttgtcggcgctgctaccggcgcgcattccttcgaacaagttcagctggttcagagcggagccgaagtgaagaaacctggcagcagcgtgaaggtgtcctgcaaagcaagcggcggcacctttagcacctacgccatccactgggttcgacaggcaccaggacaaggactggaatggatgggcagaatcatccccatcgagggcagagcctactacgcccagaaattccagggcagagtgaccatcaccgccgacgagtctacaagcaccgcctacatggaactgagcagcctgagaagcgaggataccgctgtgtactattgcgccagaggccggtacagctacagatattggttcgactactggggccagggcaccctggttacagtctcttctacgcgtatccagaaccctgatcctgccgtgtaccagctgcgggatagcaagagcagcgacaagagcgtgtgtctgttcaccgacttcgacagccagaccaacgtgtcccagagcaaggactccgacgtgtacatcaccgataagtgcgtgctggacatgcggagcatggacttcaagagcaactccgccgtggcctggtccaacaagtccgatttcgcctgcgccaacgccttcaacaacagcattatccccgaggacacattcttcccaagccccgagagcagctgcgacgtgaagctggtggaaaagagcttcgagacagacaccaacctgaacttccagaacctgagcgtgatcggcttcagaatcctgctgctgaaagtggccggctttaacctgctgatgaccctgcggctgtggtccagccgcgccaagagaagcggatctggcgtgaagcagaccctgaatttcgacctgctgaagctggctggcgacgtggaatccaacccaggcccttctagaggcgggatccacaccatggctacctacgaggtgctgtgcgaggtggcaagaaagctgggcaccgacgacagagaagtggtgctgttcctgctgaacgtgttcatccctcagcctacactggcccagctgatcggtgcactgagagccctgaaagaggaaggccggctgacctttcctctgctggccgaatgcctgttcagagccggaagaagggatctgctgcgggacctgctgcatctggaccccagatttctggaaagacacctggccggcaccatgagctacttcagcccttaccagctgaccgtgctgcacgttgacggcgaactgtgcgccagagatattcggagcctgatcttcctgagcaaggacaccatcggcagccggtctacccctcagacatttctgcactgggtgtactgcatggaaaacctggacctgctcggccccacagatgtggatgccctgatgtccatgctgagaagcctgagcagagtggacctccagagacaggtgcagacactgatgggactgcacctgagcggacctagccacagccagcactacagacacacccct

SEQ ID NO: 8385 - DNA, 1872 bp, Artificial Sequence
  Synthetic Polynucloetide
atggccttaccagtgaccgccttgctcctgccgctggccttgctgctccacgccgccaggccggagatcgtgctgacacagtctcccgccacactgtcactgtctccaggcgaaagagccacactgagctgtagagccagccagagcgtgtcctcttacctggcctggtatcagcagaagcctggacaggctccccggctgctgatctacgatgccagcaatagagccacaggcatccccgccagattttctggctctggcagcggcaccgatttcaccctgaccataagcagcctggaacctgaggacttcgccgtgtactactgccagcagagaagcaactggcccctgacctttggacagggcaccaaggtggaaatcaaactcgagatccagaaccctgatcctgccgtgtaccagctgcgggatagcaagagcagcgacaagagcgtgtgtctgttcaccgacttcgacagccagaccaacgtgtcccagagcaaggactccgacgtgtacatcaccgataagtgcgtgctggacatgcggagcatggacttcaagagcaactccgccgtggcctggtccaacaagtccgatttcgcctgcgccaacgccttcaacaacagcattatccccgaggacacattcttcccaagccccgagagcagctgcgacgtgaagctggtggaaaagagcttcgagacagacaccaacctgaacttccagaacctgagcgtgatcggcttcagaatcctgctgctgaaagtggccggctttaacctgctgatgaccctgcggctgtggtccagccgcgccaagagaagcggatctggcgtgaagcagaccctgaatttcgacctgctgaagctggctggcgacgtggaatccaacccaggccctactagtatggactggatttggcgcatccttttccttgtcggcgctgctaccggcgcgcattccttcgaacaagttcagctggttcagagcggagccgaagtgaagaaacctggcagcagcgtgaaggtgtcctgcaaagcaagcggcggcacctttagcacctacgccatccactgggttcgacaggcaccaggacaaggactggaatggatgggcagaatcatccccatcgagggcagagcctactacgcccagaaattccagggcagagtgaccatcaccgccgacgagtctacaagcaccgcctacatggaactgagcagcctgagaagcgaggataccgctgtgtactattgcgccagaggccggtacagctacagatattggttcgactactggggccagggcaccctggttacagtctcttctacgcgtgaggacctgaagaacgtgttcccacctgaggtggccgtgttcgagcctagcgaggccgagatcagccacacccagaaagccaccctcgtgtgcctggctaccggcttctaccccgaccatgtggaactgtcttggtgggtcaacggcaaagaggtgcacagcggcgtgtgtaccgacccccagccactgaaagaacagcccgccctgaacgacagccggtactgcctgagcagcagactgagagtgtccgccaccttctggcagaacccccggaaccacttcagatgccaggtgcagttctacggcctgagcgagaacgacgagtggacccaggacagagccaagcccgtgacccagatcgtgtctgccgaagcctggggcagagccgattgcggctttaccagcgagagctaccagcagggcgtgctgagcgccaccatcctgtacgagatcctgctgggcaaggccaccctgtacgccgtgctggtgtctgccctggtgctgatggctatggtcaagcggaaggacagccgggga

SEQ ID NO: 8386 - DNA, 2538 bp, Artificial Sequence
  Synthetic Polynucloetide
atggccttaccagtgaccgccttgctcctgccgctggccttgctgctccacgccgccaggccggagatcgtgctgacacagtctcccgccacactgtcactgtctccaggcgaaagagccacactgagctgtagagccagccagagcgtgtcctcttacctggcctggtatcagcagaagcctggacaggctccccggctgctgatctacgatgccagcaatagagccacaggcatccccgccagattttctggctctggcagcggcaccgatttcaccctgaccataagcagcctggaacctgaggacttcgccgtgtactactgccagcagagaagcaactggcccctgacctttggacagggcaccaaggtggaaatcaaactcgagatccagaaccctgatcctgccgtgtaccagctgcgggatagcaagagcagcgacaagagcgtgtgtctgttcaccgacttcgacagccagaccaacgtgtcccagagcaaggactccgacgtgtacatcaccgataagtgcgtgctggacatgcggagcatggacttcaagagcaactccgccgtggcctggtccaacaagtccgatttcgcctgcgccaacgccttcaacaacagcattatccccgaggacacattcttcccaagccccgagagcagctgcgacgtgaagctggtggaaaagagcttcgagacagacaccaacctgaacttccagaacctgagcgtgatcggcttcagaatcctgctgctgaaagtggccggctttaacctgctgatgaccctgcggctgtggtccagccgcgccaagagaagcggatctggcgtgaagcagaccctgaatttcgacctgctgaagctggctggcgacgtggaatccaacccaggccctactagtatggactggatttggcgcatccttttccttgtcggcgctgctaccggcgcgcattccttcgaacaagttcagctggttcagagcggagccgaagtgaagaaacctggcagcagcgtgaaggtgtcctgcaaagcaagcggcggcacctttagcacctacgccatccactgggttcgacaggcaccaggacaaggactggaatggatgggcagaatcatccccatcgagggcagagcctactacgcccagaaattccagggcagagtgaccatcaccgccgacgagtctacaagcaccgcctacatggaactgagcagcctgagaagcgaggataccgctgtgtactattgcgccagaggccggtacagctacagatattggttcgactactggggccagggcaccctggttacagtctcttctacgcgtgaggacctgaagaacgtgttcccacctgaggtggccgtgttcgagcctagcgaggccgagatcagccacacccagaaagccaccctcgtgtgcctggctaccggcttctaccccgaccatgtggaactgtcttggtgggtcaacggcaaagaggtgcacagcggcgtgtgtaccgacccccagccactgaaagaacagcccgccctgaacgacagccggtactgcctgagcagcagactgagagtgtccgccaccttctggcagaacccccggaaccacttcagatgccaggtgcagttctacggcctgagcgagaacgacgagtggacccaggacagagccaagcccgtgacccagatcgtgtctgccgaagcctggggcagagccgattgcggctttaccagcgagagctaccagcagggcgtgctgagcgccaccatcctgtacgagatcctgctgggcaaggccaccctgtacgccgtgctggtgtctgccctggtgctgatggctatggtcaagcggaaggacagccggggaagggccaagcgatctggatctggagcaacaaacttctcactactcaaacaagcaggtgacgtggaggagaatcccgggccttctagaggcgggatccacaccatggctacctacgaggtgctgtgcgaggtggcaagaaagctgggcaccgacgacagagaagtggtgctgttcctgctgaacgtgttcatccctcagcctacactggcccagctgatcggtgcactgagagccctgaaagaggaaggccggctgacctttcctctgctggccgaatgcctgttcagagccggaagaagggatctgctgcgggacctgctgcatctggaccccagatttctggaaagacacctggccggcaccatgagctacttcagcccttaccagctgaccgtgctgcacgttgacggcgaactgtgcgccagagatattcggagcctgatcttcctgagcaaggacaccatcggcagccggtctacccctcagacatttctgcactgggtgtactgcatggaaaacctggacctgctcggccccacagatgtggatgccctgatgtccatgctgagaagcctgagcagagtggacctccagagacaggtgcagacactgatgggactgcacctgagcggacctagccacagccagcactacagacacacccct

SEQ ID NO: 8387 - DNA, 2697 bp, Artificial Sequence
  Synthetic Polynucloetide
atggccttaccagtgaccgccttgctcctgccgctggccttgctgctccacgccgccaggccgctcgaggggaaaccaattcccaaccctcttctgggactggattcaaccggcagcggcgaggacctgaagaacgtgttcccacctgaggtggccgtgttcgagcctagcaaggccgagatcgcccacacccagaaagccaccctcgtgtgcctggctaccggcttctaccccgaccatgtggaactgtcttggtgggtcaacggcaaagaggtgcacagcggcgtgtgtaccgacccccagccactgaaagaacagcccgccctgaacgacagccggtactgcctgagcagcagactgagagtgtccgccaccttctggcagaacccccggaaccacttcagatgccaggtgcagttctacggcctgagcgagaacgacgagtggacccaggacagagccaagcccgtgacccagatcgtgtctgccgaagcctggggcagagccgattgcggcatcaccagcgccagctaccaccagggcgtgctgagcgccaccatcctgtacgagatcctgctgggcaaggccaccctgtacgccgtgctggtgtctgccctggtgctgatggctatggtcaagcggaaggacagccggggaagggccaagcgatctggatctggagcaacaaacttctcactactcaaacaagcaggtgacgtggaggagaatcccgggcctactagcatggccttaccagtgaccgccttgctcctgccgctggccttgctgctccacgccgccaggccggagatcgtgctgacacagtctcccgccacactgtcactgtctccaggcgaaagagccacactgagctgtagagccagccagagcgtgtcctcttacctggcctggtatcagcagaagcctggacaggctccccggctgctgatctacgatgccagcaatagagccacaggcatccccgccagattttctggctctggcagcggcaccgatttcaccctgaccataagcagcctggaacctgaggacttcgccgtgtactactgccagcagagaagcaactggcccctgacctttggacagggcaccaaggtggaaatcaaaggcggaggcggaagtggaggcggaggatctggcggcggaggctctcaagttcagctggttcagagcggagccgaagtgaagaaacctggcagcagcgtgaaggtgtcctgcaaagcaagcggcggcacctttagcacctacgccatccactgggttcgacaggcaccaggacaaggactggaatggatgggcagaatcatccccatcgagggcagagcctactacgcccagaaattccagggcagagtgaccatcaccgccgacgagtctacaagcaccgcctacatggaactgagcagcctgagaagcgaggataccgctgtgtactattgcgccagaggccggtacagctacagatattggttcgactactggggccagggcaccctggttacagtctcttctacgcgtgagcagaaactgatctcggaagaggatgggagcggcatccagaaccctgatcctgccgtgtaccagctgcgggatagcaagagcagcgacaagagcgtgtgtctgttcaccgacttcgacagccagaccaacgtgtcccagagcaaggactccgacgtgtacatcaccgataagtgcgtgctggacatgcggagcatggacttcaagagcaactccgccgtggcctggtccaacaagtccgatttcgcctgcgccaacgccttcaacaacagcattatccccgaggacacattcttcccaagcagcgacgtgccctgcgacgtgaagctggtggaaaagagcttcgagacagacaccaacctgaacttccagaacctgagcgtgatcggcttcagaatcctgctgctgaaagtggccggctttaacctgctgatgaccctgcggctgtggtccagccgcgccaagagaagcggatctggcgtgaagcagaccctgaatttcgacctgctgaagctggctggcgacgtggaatccaacccaggcccttctagaggccatatgaccgagtacaagcccacggtgcgcctcgccacccgcgacgacgtccccagggccgtacgcaccctcgccgccgcgttcgccgactaccccgccacgcgccacaccgtcgatccggaccgccacatcgagcgggtcaccgagctgcaagaactcttcctcacgcgcgtcgggctcgacatcggcaaggtgtgggtcgcggacgacggcgccgcggtggcggtctggaccacgccggagagcgtcgaagcgggggcggtgttcgccgagatcggcccgcgcatggccgagttgagcggttcccggctggccgcgcagcaacagatggaaggcctcctggcgccgcaccggcccaaggagcccgcgtggttcctggccaccgtcggcgtctcgcccgaccaccagggcaagggtctgggcagcgccgtcgtgctccccggagtggaggcggccgagcgcgccggggtgcccgccttcctggagacctccgcgccccgcaacctccccttctacgagcggctcggcttcaccgtcaccgccgacgtcgaggtgcccgaaggaccgcgcacctggtgcatgacccgcaagcccggtgcctga

SEQ ID NO: 8388 - DNA, 2700 bp, Artificial Sequence
  Synthetic Polynucloetide
atggccttaccagtgaccgccttgctcctgccgctggccttgctgctccacgccgccaggccgctcgagcagaaactgatctcggaagaggatctgggctccggcgatcgccctgatcctgccgtgtaccagctgcgggatagcaagagcagcgacaagagcgtgtgtctgttcaccgacttcgacagccagaccaacgtgtcccagagcaaggactccgacgtgtacatcaccgataagtgcgtgctggacatgcggagcatggacttcaagagcaactccgccgtggcctggtccaacaagtccgatttcgcctgcgccaacgccttcaacaacagcattatccccgaggacacattcttcccaagccccgagagcagctgcgacgtgaagctggtggaaaagagcttcgagacagacaccaacctgaacttccagaacctgagcgtgatcggcttcagaatcctgctgctgaaagtggccggctttaacctgctgatgaccctgcggctgtggtccagctctagtcgcgccaagagaagcggatctggcgtgaagcagaccctgaatttcgacctgctgaagctggctggcgacgtggaatccaacccaggccccactagcatggccttaccagtgaccgccttgctcctgccgctggccttgctgctccacgccgccaggccggagatcgtgctgacacagtctcccgccacactgtcactgtctccaggcgaaagagccacactgagctgtagagccagccagagcgtgtcctcttacctggcctggtatcagcagaagcctggacaggctccccggctgctgatctacgatgccagcaatagagccacaggcatccccgccagattttctggctctggcagcggcaccgatttcaccctgaccataagcagcctggaacctgaggacttcgccgtgtactactgccagcagagaagcaactggcccctgacctttggacagggcaccaaggtggaaatcaaaggcggaggcggaagtggaggcggaggatctggcggcggaggctctcaagttcagctggttcagagcggagccgaagtgaagaaacctggcagcagcgtgaaggtgtcctgcaaagcaagcggcggcacctttagcacctacgccatccactgggttcgacaggcaccaggacaaggactggaatggatgggcagaatcatccccatcgagggcagagcctactacgcccagaaattccagggcagagtgaccatcaccgccgacgagtctacaagcaccgcctacatggaactgagcagcctgagaagcgaggataccgctgtgtactattgcgccagaggccggtacagctacagatattggttcgactactggggccagggcaccctggttacagtctcttctacgcgtgggaaaccaattcccaaccctcttctgggactggattcaaccggcagcggcgaggacctgaagaacgtgttcccacctgaggtggccgtgttcgagcctagcgaggccgagatcagccacacccagaaagccaccctcgtgtgcctggctaccggcttctaccccgaccatgtggaactgtcttggtgggtcaacggcaaagaggtgcacagcggcgtgtgtaccgacccccagccactgaaagaacagcccgccctgaacgacagccggtactgcctgagcagcagactgagagtgtccgccaccttctggcagaacccccggaaccacttcagatgccaggtgcagttctacggcctgagcgagaacgacgagtggacccaggacagagccaagcccgtgacccagatcgtgtctgccgaagcctggggcagagccgattgcggctttaccagcgagagctaccagcagggcgtgctgagcgccaccatcctgtacgagatcctgctgggcaaggccaccctgtacgccgtgctggtgtctgccctggtgctgatggctatggtcaagcggaaggacagccggggaagggccaagcgatctggatctggagcaacaaacttctcactactcaaacaagcaggtgacgtggaggagaatcccgggccttctagaggccatatgaccgagtacaagcccacggtgcgcctcgccacccgcgacgacgtccccagggccgtacgcaccctcgccgccgcgttcgccgactaccccgccacgcgccacaccgtcgatccggaccgccacatcgagcgggtcaccgagctgcaagaactcttcctcacgcgcgtcgggctcgacatcggcaaggtgtgggtcgcggacgacggcgccgcggtggcggtctggaccacgccggagagcgtcgaagcgggggcggtgttcgccgagatcggcccgcgcatggccgagttgagcggttcccggctggccgcgcagcaacagatggaaggcctcctggcgccgcaccggcccaaggagcccgcgtggttcctggccaccgtcggcgtctcgcccgaccaccagggcaagggtctgggcagcgccgtcgtgctccccggagtggaggcggccgagcgcgccggggtgcccgccttcctggagacctccgcgccccgcaacctccccttctacgagcggctcggcttcaccgtcaccgccgacgtcgaggtgcccgaaggaccgcgcacctggtgcatgacccgcaagcccggtgcctga

SEQ ID NO: 8389 - DNA, 2562 bp, Artificial Sequence
  Synthetic Polynucloetide
atggccttaccagtgaccgccttgctcctgccgctggccttgctgctccacgccgccaggccggagatcgtgctgacacagtctcccgccacactgtcactgtctccaggcgaaagagccacactgagctgtagagccagccagagcgtgtcctcttacctggcctggtatcagcagaagcctggacaggctccccggctgctgatctacgatgccagcaatagagccacaggcatccccgccagattttctggctctggcagcggcaccgatttcaccctgaccataagcagcctggaacctgaggacttcgccgtgtactactgccagcagagaagcaactggcccctgacctttggacagggcaccaaggtggaaatcaaactcgaggacctgaagaacgtgttcccacctgaggtggccgtgttcgagcctagcgaggccgagatcagccacacccagaaagccaccctcgtgtgcctggctaccggcttctaccccgaccatgtggaactgtcttggtgggtcaacggcaaagaggtgcacagcggcgtgtctaccgacccccagccactgaaagaacagcccgccctgaacgacagccggtactgcctgagcagcagactgagagtgtccgccaccttctggcagaacccccggaaccacttcagatgccaggtgcagttctacggcctgagcgagaacgacgagtggacccaggacagagccaagcccgtgacccagatcgtgtctgccgaagcctggggcagagccgattgcggctttaccagcgagagctaccagcagggcgtgctgagcgccaccatcctgtacgagatcctgctgggcaaggccaccctgtacgccgtgctggtgtctgccctggtgctgatggctatggtcaagcggaaggacagccggggaagggccaagcgatctggatctggagcaacaaacttctcactactcaaacaagcaggtgacgtggaggagaatcccgggcctactagtatggactggatttggcgcatccttttccttgtcggcgctgctaccggcgcgcattccttcgaacaagttcagctggttcagagcggagccgaagtgaagaaacctggcagcagcgtgaaggtgtcctgcaaagcaagcggcggcacctttagcacctacgccatccactgggttcgacaggcaccaggacaaggactggaatggatgggcagaatcatccccatcgagggcagagcctactacgcccagaaattccagggcagagtgaccatcaccgccgacgagtctacaagcaccgcctacatggaactgagcagcctgagaagcgaggataccgctgtgtactattgcgccagaggccggtacagctacagatattggttcgactactggggccagggcaccctggttacagtctcttctacgcgtatccagaaccctgatcctgccgtgtaccagctgcgggatagcaagagcagcgacaagagcgtgtgtctgttcaccgacttcgacagccagaccaacgtgtcccagagcaaggactccgacgtgtacatcaccgataagaccgtgctggacatgcggagcatggacttcaagagcaactccgccgtggcctggtccaacaagtccgatttcgcctgcgccaacgccttcaacaacagcattatccccgaggacacattcttcccaagccccgagagcagctgcgacgtgaagctggtggaaaagagcttcgagacagacaccaacctgaacttccagaacctgagcgtgatcggcttcagaatcctgctgctgaaagtggccggctttaacctgctgatgaccctgcggctgtggtccagccgcgccaagagaagcggatctggcgtgaagcagaccctgaatttcgacctgctgaagctggctggcgacgtggaatccaacccaggcccttctagaggccatatgaccgagtacaagcccacggtgcgcctcgccacccgcgacgacgtccccagggccgtacgcaccctcgccgccgcgttcgccgactaccccgccacgcgccacaccgtcgatccggaccgccacatcgagcgggtcaccgagctgcaagaactcttcctcacgcgcgtcgggctcgacatcggcaaggtgtgggtcgcggacgacggcgccgcggtggcggtctggaccacgccggagagcgtcgaagcgggggcggtgttcgccgagatcggcccgcgcatggccgagttgagcggttcccggctggccgcgcagcaacagatggaaggcctcctggcgccgcaccggcccaaggagcccgcgtggttcctggccaccgtcggcgtctcgcccgaccaccagggcaagggtctgggcagcgccgtcgtgctccccggagtggaggcggccgagcgcgccggggtgcccgccttcctggagacctccgcgccccgcaacctccccttctacgagcggctcggcttcaccgtcaccgccgacgtcgaggtgcccgaaggaccgcgcacctggtgcatgacccgcaagcccggtgcctga

SEQ ID NO: 8390 - DNA, 2808 bp, Artificial Sequence
  Synthetic Polynucloetide
atggccttaccagtgaccgccttgctcctgccgctggccttgctgctccacgccgccaggccggagatcgtgctgacacagtctcccgccacactgtcactgtctccaggcgaaagagccacactgagctgtagagccagccagagcgtgtcctcttacctggcctggtatcagcagaagcctggacaggctccccggctgctgatctacgatgccagcaatagagccacaggcatccccgccagattttctggctctggcagcggcaccgatttcaccctgaccataagcagcctggaacctgaggacttcgccgtgtactactgccagcagagaagcaactggcccctgacctttggacagggcaccaaggtggaaatcaaactcgaggacctgaagaacgtgttcccacctgaggtggccgtgttcgagcctagcgaggccgagatcagccacacccagaaagccaccctcgtgtgcctggctaccggcttctaccccgaccatgtggaactgtcttggtgggtcaacggcaaagaggtgcacagcggcgtgtctaccgacccccagccactgaaagaacagcccgccctgaacgacagccggtactgcctgagcagcagactgagagtgtccgccaccttctggcagaacccccggaaccacttcagatgccaggtgcagttctacggcctgagcgagaacgacgagtggacccaggacagagccaagcccgtgacccagatcgtgtctgccgaagcctggggcagagccgattgcggctttaccagcgagagctaccagcagggcgtgctgagcgccaccatcctgtacgagatcctgctgggcaaggccaccctgtacgccgtgctggtgtctgccctggtgctgatggctatggtcaagcggaaggacagccggggaagggccaagcgatctggatctggagcaacaaacttctcactactcaaacaagcaggtgacgtggaggagaatcccgggcctactagtatggactggatttggcgcatccttttccttgtcggcgctgctaccggcgcgcattccttcgaacaagttcagctggttcagagcggagccgaagtgaagaaacctggcagcagcgtgaaggtgtcctgcaaagcaagcggcggcacctttagcacctacgccatccactgggttcgacaggcaccaggacaaggactggaatggatgggcagaatcatccccatcgagggcagagcctactacgcccagaaattccagggcagagtgaccatcaccgccgacgagtctacaagcaccgcctacatggaactgagcagcctgagaagcgaggataccgctgtgtactattgcgccagaggccggtacagctacagatattggttcgactactggggccagggcaccctggttacagtctcttctacgcgtgagcagaaactgatctcggaagaggatgggagcggcaccccattcccttctctggcccctcccatcatgctgctggtggacggcaagcagcagatggtggtcgtgtgcctggtgctggatgtggccccacctggactggacagccccatctggtttagcgccggcaatggctctgccctggacgcctttacctacggcccaagccctgccaccgatggcacctggacaaatctggcccacctgagcctgcccagcgaggaactggcttcttgggagcctctcgtgtgccacacaggacctggcgctgagggacacagcagatccacccagcctatgcacctgtctggcgaggccagcaccgccagaacctgtcctcaggaacctctgagaggcacccctggcggagcactgtggctgggagtgctgagactgctgctgttcaagctgctgctgtttgacctgctgctgacctgctcctgtctgtgcgatcctgccggccctctgccttctcctgccaccaccacaagactgagagccctgggcagccacagactgcaccctgccacagagacaggcggcagagaggccacaagcagccctagaccccagcccagagacagaagatggggcgataccccccctggcagaaagcctggatctccagtccgcgccaagagaagcggatctggcgtgaagcagaccctgaatttcgacctgctgaagctggctggcgacgtggaatccaacccaggcccttctagaggccatatgaccgagtacaagcccacggtgcgcctcgccacccgcgacgacgtccccagggccgtacgcaccctcgccgccgcgttcgccgactaccccgccacgcgccacaccgtcgatccggaccgccacatcgagcgggtcaccgagctgcaagaactcttcctcacgcgcgtcgggctcgacatcggcaaggtgtgggtcgcggacgacggcgccgcggtggcggtctggaccacgccggagagcgtcgaagcgggggcggtgttcgccgagatcggcccgcgcatggccgagttgagcggttcccggctggccgcgcagcaacagatggaaggcctcctggcgccgcaccggcccaaggagcccgcgtggttcctggccaccgtcggcgtctcgcccgaccaccagggcaagggtctgggcagcgccgtcgtgctccccggagtggaggcggccgagcgcgccggggtgcccgccttcctggagacctccgcgccccgcaacctccccttctacgagcggctcggcttcaccgtcaccgccgacgtcgaggtgcccgaaggaccgcgcacctggtgcatgacccgcaagcccggtgcctga

SEQ ID NO: 8391 - DNA, 2862 bp, Artificial Sequence
  Synthetic Polynucloetide
atggccttaccagtgaccgccttgctcctgccgctggccttgctgctccacgccgccaggccgctcgaggacctgaagaacgtgttcccacctgaggtggccgtgttcgagcctagcgaggccgagatcagccacacccagaaagccaccctcgtgtgcctggctaccggcttctaccccgaccatgtggaactgtcttggtgggtcaacggcaaagaggtgcacagcggcgtgtctaccgacccccagccactgaaagaacagcccgccctgaacgacagccggtactgcctgagcagcagactgagagtgtccgccaccttctggcagaacccccggaaccacttcagatgccaggtgcagttctacggcctgagcgagaacgacgagtggacccaggacagagccaagcccgtgacccagatcgtgtctgccgaagcctggggcagagccgattgcggctttaccagcgagagctaccagcagggcgtgctgagcgccaccatcctgtacgagatcctgctgggcaaggccaccctgtacgccgtgctggtgtctgccctggtgctgatggctatggtcaagcggaaggacagccggggaagggccaagcgatctggatctggagcaacaaacttctcactactcaaacaagcaggtgacgtggaggagaatcccgggcctactagcatggccttaccagtgaccgccttgctcctgccgctggccttgctgctccacgccgccaggccggagatcgtgctgacacagtctcccgccacactgtcactgtctccaggcgaaagagccacactgagctgtagagccagccagagcgtgtcctcttacctggcctggtatcagcagaagcctggacaggctccccggctgctgatctacgatgccagcaatagagccacaggcatccccgccagattttctggctctggcagcggcaccgatttcaccctgaccataagcagcctggaacctgaggacttcgccgtgtactactgccagcagagaagcaactggcccctgacctttggacagggcaccaaggtggaaatcaaaggcggaggcggaagtggaggcggaggatctggcggcggaggctctcaagttcagctggttcagagcggagccgaagtgaagaaacctggcagcagcgtgaaggtgtcctgcaaagcaagcggcggcacctttagcacctacgccatccactgggttcgacaggcaccaggacaaggactggaatggatgggcagaatcatccccatcgagggcagagcctactacgcccagaaattccagggcagagtgaccatcaccgccgacgagtctacaagcaccgcctacatggaactgagcagcctgagaagcgaggataccgctgtgtactattgcgccagaggccggtacagctacagatattggttcgactactggggccagggcaccctggttacagtctcttctacgcgtgagcagaaactgatctcggaagaggatctggggagcggcaccccattcccttctctggcccctcccatcatgctgctggtggacggcaagcagcagatggtggtcgtgtgcctggtgctggatgtggccccacctggactggacagccccatctggtttagcgccggcaatggctctgccctggacgcctttacctacggcccaagccctgccaccgatggcacctggacaaatctggcccacctgagcctgcccagcgaggaactggcttcttgggagcctctcgtgtgccacacaggacctggcgctgagggacacagcagatccacccagcctatgcacctgtctggcgaggccagcaccgccagaacctgtcctcaggaacctctgagaggcacccctggcggagcactgtggctgggagtgctgagactgctgctgttcaagctgctgctgtttgacctgctgctgacctgctcctgtctgtgcgatcctgccggccctctgccttctcctgccaccaccacaagactgagagccctgggcagccacagactgcaccctgccacagagacaggcggcagagaggccacaagcagccctagaccccagcccagagacagaagatggggcgataccccccctggcagaaagcctggatctccagtccgcgccaagagaagcggatctggcgtgaagcagaccctgaatttcgacctgctgaagctggctggcgacgtggaatccaacccaggcccttctagatctagaggccatatgaccgagtacaagcccacggtgcgcctcgccacccgcgacgacgtccccagggccgtacgcaccctcgccgccgcgttcgccgactaccccgccacgcgccacaccgtcgatccggaccgccacatcgagcgggtcaccgagctgcaagaactcttcctcacgcgcgtcgggctcgacatcggcaaggtgtgggtcgcggacgacggcgccgcggtggcggtctggaccacgccggagagcgtcgaagcgggggcggtgttcgccgagatcggcccgcgcatggccgagttgagcggttcccggctggccgcgcagcaacagatggaaggcctcctggcgccgcaccggcccaaggagcccgcgtggttcctggccaccgtcggcgtctcgcccgaccaccagggcaagggtctgggcagcgccgtcgtgctccccggagtggaggcggccgagcgcgccggggtgcccgccttcctggagacctccgcgccccgcaacctccccttctacgagcggctcggcttcaccgtcaccgccgacgtcgaggtgcccgaaggaccgcgcacctggtgcatgacccgcaagcccggtgcctga

SEQ ID NO: 8392 - DNA, 2673 bp, Artificial Sequence
  Synthetic Polynucloetide
atggccttaccagtgaccgccttgctcctgccgctggccttgctgctccacgccgccaggccggagatcgtgctgacacagtctcccgccacactgtcactgtctccaggcgaaagagccacactgagctgtagagccagccagagcgtgtcctcttacctggcctggtatcagcagaagcctggacaggctccccggctgctgatctacgatgccagcaatagagccacaggcatccccgccagattttctggctctggcagcggcaccgatttcaccctgaccataagcagcctggaacctgaggacttcgccgtgtactactgccagcagagaagcaactggcccctgacctttggacagggcaccaaggtggaaatcaaactcgaggggaaaccaattcccaaccctcttctgggactggattcaaccggcagcggcgacaagcagctggacgccgacgtgtcccccaagcctaccatcttcctgccctctatcgccgagacaaagctccagaaggccggcacctacctgtgcctgctggaaaagttcttcccagatgtgattaagatccactggcaggaaaagaagtccaacaccatcctgggcagccaggaaggcaacaccatgaagaccaacgacacctacatgaagttcagctggctgaccgtgcccgagaagtccctggacaaagaacacagatgcatcgtgcggcacgaaaacaacaagaacggcgtggaccaggaaatcatcttcccacccatcaagaccgatgtgattacaatggaccccaaggacaactgctccaaggacgccaacgataccctgctgctccagctgaccaacaccagcgcctactacatgtacttgttgctgctgctgaagtccgtggtgtacttcgccatcatcacatgctgcctgctgcggagaaccgccttctgctgcaacggcgagaagtctagggccaagcgatctggatctggagcaacaaacttctcactactcaaacaagcaggtgacgtggaggagaatcccgggcctactagtatggactggatttggcgcatccttttccttgtcggcgctgctaccggcgcgcattccttcgaacaagttcagctggttcagagcggagccgaagtgaagaaacctggcagcagcgtgaaggtgtcctgcaaagcaagcggcggcacctttagcacctacgccatccactgggttcgacaggcaccaggacaaggactggaatggatgggcagaatcatccccatcgagggcagagcctactacgcccagaaattccagggcagagtgaccatcaccgccgacgagtctacaagcaccgcctacatggaactgagcagcctgagaagcgaggataccgctgtgtactattgcgccagaggccggtacagctacagatattggttcgactactggggccagggcaccctggttacagtctcttctacgcgtgagcagaaactgatctcggaagaggatgggagcggcagccagcctcacaccaagcccagcgtgttcgtgatgaagaacggcaccaacgtggcctgcctcgtgaaagagttctaccccaaggacatcaggatcaacctggtgtccagcaagaagatcaccgagttcgaccccgccatcgtgatctcccccagcggcaagtacaacgccgtgaagctggggaagtacgaggacagcaacagcgtgacctgctccgtgcagcacgacaacaagaccgtgcacagcaccgactttgaagtgaaaaccgactccaccgaccacgtgaagcccaaagagacagagaacaccaagcagcccagcaagagctgccacaagcccaaggccatcgtgcacaccgagaaagtgaacatgatgagcctgaccgtgctgggcctgcggatgctgttcgccaaaaccgtggccgtgaacttcctgctgaccgccaagctgttcttcctccgcgccaagagaagcggatctggcgtgaagcagaccctgaatttcgacctgctgaagctggctggcgacgtggaatccaacccaggcccttctagaggccatatgaccgagtacaagcccacggtgcgcctcgccacccgcgacgacgtccccagggccgtacgcaccctcgccgccgcgttcgccgactaccccgccacgcgccacaccgtcgatccggaccgccacatcgagcgggtcaccgagctgcaagaactcttcctcacgcgcgtcgggctcgacatcggcaaggtgtgggtcgcggacgacggcgccgcggtggcggtctggaccacgccggagagcgtcgaagcgggggcggtgttcgccgagatcggcccgcgcatggccgagttgagcggttcccggctggccgcgcagcaacagatggaaggcctcctggcgccgcaccggcccaaggagcccgcgtggttcctggccaccgtcggcgtctcgcccgaccaccagggcaagggtctgggcagcgccgtcgtgctccccggagtggaggcggccgagcgcgccggggtgcccgccttcctggagacctccgcgccccgcaacctccccttctacgagcggctcggcttcaccgtcaccgccgacgtcgaggtgcccgaaggaccgcgcacctggtgcatgacccgcaagcccggtgcctga

SEQ ID NO: 8393 - DNA, 1884 bp, Artificial Sequence
  Synthetic Polynucloetide
atggccttaccagtgaccgccttgctcctgccgctggccttgctgctccacgccgccaggccggagatcgtgctgacacagtctcccgccacactgtcactgtctccaggcgaaagagccacactgagctgtagagccagccagagcgtgtcctcttacctggcctggtatcagcagaagcctggacaggctccccggctgctgatctacgatgccagcaatagagccacaggcatccccgccagattttctggctctggcagcggcaccgatttcaccctgaccataagcagcctggaacctgaggacttcgccgtgtactactgccagcagagaagcaactggcccctgacctttggacagggcaccaaggtggaaatcaaactcgagagccagcctcacaccaagcccagcgtgttcgtgatgaagaacggcaccaacgtggcctgcctcgtgaaagagttctaccccaaggacatcaggatcaacctggtgtccagcaagaagatcaccgagttcgaccccgccatcgtgatctcccccagcggcaagtacaacgccgtgaagctggggaagtacgaggacagcaacagcgtgacctgctccgtgcagcacgacaacaagaccgtgcacagcaccgactttgaagtgaaaaccgactccaccgaccacgtgaagcccaaagagacagagaacaccaagcagcccagcaagagctgccacaagcccaaggccatcgtgcacaccgagaaagtgaacatgatgagcctgaccgtgctgggcctgcggatgctgttcgccaaaaccgtggccgtgaacttcctgctgaccgccaagctgttcttcctcagggccaagcgatctggatctggagcaacaaacttctcactactcaaacaagcaggtgacgtggaggagaatcccgggcctactagtatggactggatttggcgcatccttttccttgtcggcgctgctaccggcgcgcattccttcgaacaagttcagctggttcagagcggagccgaagtgaagaaacctggcagcagcgtgaaggtgtcctgcaaagcaagcggcggcacctttagcacctacgccatccactgggttcgacaggcaccaggacaaggactggaatggatgggcagaatcatccccatcgagggcagagcctactacgcccagaaattccagggcagagtgaccatcaccgccgacgagtctacaagcaccgcctacatggaactgagcagcctgagaagcgaggataccgctgtgtactattgcgccagaggccggtacagctacagatattggttcgactactggggccagggcaccctggttacagtctcttctacgcgtgacaagcagctggacgccgacgtgtcccccaagcctaccatcttcctgccctctatcgccgagacaaagctccagaaggccggcacctacctgtgcctgctggaaaagttcttcccagatgtgattaagatccactggcaggaaaagaagtccaacaccatcctgggcagccaggaaggcaacaccatgaagaccaacgacacctacatgaagttcagctggctgaccgtgcccgagaagtccctggacaaagaacacagatgcatcgtgcggcacgaaaacaacaagaacggcgtggaccaggaaatcatcttcccacccatcaagaccgatgtgattacaatggaccccaaggacaactgctccaaggacgccaacgataccctgctgctccagctgaccaacaccagcgcctactacatgtacttgttgctgctgctgaagtccgtggtgtacttcgccatcatcacatgctgcctgctgcggagaaccgccttctgctgcaacggcgagaagtct

SEQ ID NO: 8394 - DNA, 2718 bp, Artificial Sequence
  Synthetic Polynucloetide
atggccttaccagtgaccgccttgctcctgccgctggccttgctgctccacgccgccaggccgctcgaggggaaaccaattcccaaccctcttctgggactggattcaaccggcagcggcgacaagcagctggacgccgacgtgtcccccaagcctaccatcttcctgccctctatcgccgagacaaagctccagaaggccggcacctacctgtgcctgctggaaaagttcttcccagatgtgattaagatccactggcaggaaaagaagtccaacaccatcctgggcagccaggaaggcaacaccatgaagaccaacgacacctacatgaagttcagctggctgaccgtgcccgagaagtccctggacaaagaacacagatgcatcgtgcggcacgaaaacaacaagaacggcgtggaccaggaaatcatcttcccacccatcaagaccgatgtgattacaatggaccccaaggacaactgctccaaggacgccaacgataccctgctgctccagctgaccaacaccagcgcctactacatgtacttgttgctgctgctgaagtccgtggtgtacttcgccatcatcacatgctgcctgctgcggagaaccgccttctgctgcaacggcgagaagtctagggccaagcgatctggatctggagcaacaaacttctcactactcaaacaagcaggtgacgtggaggagaatcccgggcctactagcatggccttaccagtgaccgccttgctcctgccgctggccttgctgctccacgccgccaggccggagatcgtgctgacacagtctcccgccacactgtcactgtctccaggcgaaagagccacactgagctgtagagccagccagagcgtgtcctcttacctggcctggtatcagcagaagcctggacaggctccccggctgctgatctacgatgccagcaatagagccacaggcatccccgccagattttctggctctggcagcggcaccgatttcaccctgaccataagcagcctggaacctgaggacttcgccgtgtactactgccagcagagaagcaactggcccctgacctttggacagggcaccaaggtggaaatcaaaggcggaggcggaagtggaggcggaggatctggcggcggaggctctcaagttcagctggttcagagcggagccgaagtgaagaaacctggcagcagcgtgaaggtgtcctgcaaagcaagcggcggcacctttagcacctacgccatccactgggttcgacaggcaccaggacaaggactggaatggatgggcagaatcatccccatcgagggcagagcctactacgcccagaaattccagggcagagtgaccatcaccgccgacgagtctacaagcaccgcctacatggaactgagcagcctgagaagcgaggataccgctgtgtactattgcgccagaggccggtacagctacagatattggttcgactactggggccagggcaccctggttacagtctcttctacgcgtgagcagaaactgatctcggaagaggatgggagcggcagccagcctcacaccaagcccagcgtgttcgtgatgaagaacggcaccaacgtggcctgcctcgtgaaagagttctaccccaaggacatcaggatcaacctggtgtccagcaagaagatcaccgagttcgaccccgccatcgtgatctcccccagcggcaagtacaacgccgtgaagctggggaagtacgaggacagcaacagcgtgacctgctccgtgcagcacgacaacaagaccgtgcacagcaccgactttgaagtgaaaaccgactccaccgaccacgtgaagcccaaagagacagagaacaccaagcagcccagcaagagctgccacaagcccaaggccatcgtgcacaccgagaaagtgaacatgatgagcctgaccgtgctgggcctgcggatgctgttcgccaaaaccgtggccgtgaacttcctgctgaccgccaagctgttcttcctccgcgccaagagaagcggatctggcgtgaagcagaccctgaatttcgacctgctgaagctggctggcgacgtggaatccaacccaggcccttctagaggccatatgaccgagtacaagcccacggtgcgcctcgccacccgcgacgacgtccccagggccgtacgcaccctcgccgccgcgttcgccgactaccccgccacgcgccacaccgtcgatccggaccgccacatcgagcgggtcaccgagctgcaagaactcttcctcacgcgcgtcgggctcgacatcggcaaggtgtgggtcgcggacgacggcgccgcggtggcggtctggaccacgccggagagcgtcgaagcgggggcggtgttcgccgagatcggcccgcgcatggccgagttgagcggttcccggctggccgcgcagcaacagatggaaggcctcctggcgccgcaccggcccaaggagcccgcgtggttcctggccaccgtcggcgtctcgcccgaccaccagggcaagggtctgggcagcgccgtcgtgctccccggagtggaggcggccgagcgcgccggggtgcccgccttcctggagacctccgcgccccgcaacctccccttctacgagcggctcggcttcaccgtcaccgccgacgtcgaggtgcccgaaggaccgcgcacctggtgcatgacccgcaagcccggtgcctga

SEQ ID NO: 8395 - DNA, 3093 bp, Artificial Sequence
  Synthetic Polynucloetide
atggccttaccagtgaccgccttgctcctgccgctggccttgctgctccacgccgccaggccggagatcgtgctgacacagtctcccgccacactgtcactgtctccaggcgaaagagccacactgagctgtagagccagccagagcgtgtcctcttacctggcctggtatcagcagaagcctggacaggctccccggctgctgatctacgatgccagcaatagagccacaggcatccccgccagattttctggctctggcagcggcaccgatttcaccctgaccataagcagcctggaacctgaggacttcgccgtgtactactgccagcagagaagcaactggcccctgacctttggacagggcaccaaggtggaaatcaaaggacagcctaaggccaatcctaccgtgacactgttccctccaagcagcgaagaactccaggccaacaaggccacacttgtgtgcctgatctccgacttctaccctggggctgtgacagtggcttggaaggccgatggatctcctgtgaaagccggcgtggaaaccaccaagccatccaagcagagcaacaacaaatacgccgccagctcctacctgagcctgacacctgagcagtggaagtcccacagatcctacagctgccaagtgacccacgaaggcagcaccgtggaaaagacagtggcccctacagagtgcagcggatcccagagcttcggcctgctggaccccaagctgtgctacctgctggatggcatcctgttcatctacggcgtgatcctgaccgccctgttcctgagagtgaagttcagcagaagcgccgacgcccctgcctaccagcagggacagaaccaactgtacaacgagctgaacctgggcagacgggaagagtacgacgtgctggacaagcggagaggcagggaccctgagatgggcggaaagccccagcggagaaagaacccccaggaaggactgtataacgaactccagaaagacaagatggccgaagcctacagcgagatcggcatgaagggcgagcggagaagaggcaagggccacgatggcctgtaccagggcctgagcaccgccaccaaggacacctatgacgccctgcacatgcaggccctgcctccaagaagggccaagcgatctggatctggagcaacaaacttctcactactcaaacaagcaggtgacgtggaggagaatcccgggcctactagtatggactggatttggcgcatccttttccttgtcggcgctgctaccggcgcgcattccttcgaacaagttcagctggttcagagcggagccgaagtgaagaaacctggcagcagcgtgaaggtgtcctgcaaagcaagcggcggcacctttagcacctacgccatccactgggttcgacaggcaccaggacaaggactggaatggatgggcagaatcatccccatcgagggcagagcctactacgcccagaaattccagggcagagtgaccatcaccgccgacgagtctacaagcaccgcctacatggaactgagcagcctgagaagcgaggataccgctgtgtactattgcgccagaggccggtacagctacagatattggttcgactactggggccagggcaccctggttacagtctcttctgcctctacaaagggaccctccgtgtttcctctggctcccagcagcaagtctacaagcggaggaacagccgctctgggctgcctggtcaaggattactttcccgagcctgtgaccgtgtcctggaatagcggagcactgacaagcggcgtgcacacctttccagccgtgctgcaaagcagcggcctgtactctctgagcagcgtggtcacagtgcctagctctagcctgggcacccagacctacatctgcaatgtgaaccacaagcctagcaacaccaaggtggacaagagagtggaacccaagagctgtggtacccagagttttgggttgttggaccctaaattgtgctatctgttggacggaatcctgttcatttacggagtgatcctgaccgcattgttcctgcgggttaagttttccagatccgcagacgcacccgcttaccaacaagggcagaaccaactctacaatgaacttaatttggggcggagggaagagtacgacgttctggacaaaaggaggggacgagatcccgagatgggcggaaagcctcagcgaaggaagaatccgcaagaggggctttataacgaactccagaaagataaaatggcagaagcctatagtgagattgggatgaagggagaaaggaggaggggtaaaggtcacgatgggttgtaccaaggattgagcacagccactaaagatacctatgatgcgctccacatgcaggccctgccgccaagacgcgccaagagaagcggatctggcgtgaagcagaccctgaatttcgacctgctgaagctggctggcgacgtggaatccaacccaggcccttctagaggccatatgaccgagtacaagcccacggtgcgcctcgccacccgcgacgacgtccccagggccgtacgcaccctcgccgccgcgttcgccgactaccccgccacgcgccacaccgtcgatccggaccgccacatcgagcgggtcaccgagctgcaagaactcttcctcacgcgcgtcgggctcgacatcggcaaggtgtgggtcgcggacgacggcgccgcggtggcggtctggaccacgccggagagcgtcgaagcgggggcggtgttcgccgagatcggcccgcgcatggccgagttgagcggttcccggctggccgcgcagcaacagatggaaggcctcctggcgccgcaccggcccaaggagcccgcgtggttcctggccaccgtcggcgtctcgcccgaccaccagggcaagggtctgggcagcgccgtcgtgctccccggagtggaggcggccgagcgcgccggggtgcccgccttcctggagacctccgcgccccgcaacctccccttctacgagcggctcggcttcaccgtcaccgccgacgtcgaggtgcccgaaggaccgcgcacctggtgcatgacccgcaagcccggtgcctga

SEQ ID NO: 8396 - DNA, 2448 bp, Artificial Sequence
  Synthetic Polynucloetide
atggccttaccagtgaccgccttgctcctgccgctggccttgctgctccacgccgccaggccggagatcgtgctgacacagtctcccgccacactgtcactgtctccaggcgaaagagccacactgagctgtagagccagccagagcgtgtcctcttacctggcctggtatcagcagaagcctggacaggctccccggctgctgatctacgatgccagcaatagagccacaggcatccccgccagattttctggctctggcagcggcaccgatttcaccctgaccataagcagcctggaacctgaggacttcgccgtgtactactgccagcagagaagcaactggcccctgacctttggacagggcaccaaggtggaaatcaaactcgaggacctgaagaacgtgttcccacctgaggtggccgtgttcgagcctagcgaggccgagatcagccacacccagaaagccaccctcgtgtgcctggctaccggcttctaccccgaccatgtggaactgtcttggtgggtcaacggcaaagaggtgcacagcggcgtgtctaccgacccccagccactgaaagaacagcccgccctgaacgacagccggtactgcctgagcagcagactgagagtgtccgccaccttctggcagaacccccggaaccacttcagatgccaggtgcagttctacggcctgagcgagaacgacgagtggacccaggacagagccaagcccgtgacccagatcgtgtctgccgaagcctggggcagagccgattgcggatcccagagcttcggcctgctggaccccaagctgtgctacctgctggatggcatcctgttcatctacggcgtgatcctgaccgccctgttcctgagagtgaagttcagcagaagcgccgacgcccctgcctaccagcagggacagaaccaactgtacaacgagctgaacctgggcagacgggaagagtacgacgtgctggacaagcggagaggcagggaccctgagatgggcggaaagccccagcggagaaagaacccccaggaaggactgtataacgaactccagaaagacaagatggccgaagcctacagcgagatcggcatgaagggcgagcggagaagaggcaagggccacgatggcctgtaccagggcctgagcaccgccaccaaggacacctatgacgccctgcacatgcaggccctgcctccaagaagggccaagcgatctggatctggagcaacaaacttctcactactcaaacaagcaggtgacgtggaggagaatcccgggcctactagtatggactggatttggcgcatccttttccttgtcggcgctgctaccggcgcgcattccttcgaacaagttcagctggttcagagcggagccgaagtgaagaaacctggcagcagcgtgaaggtgtcctgcaaagcaagcggcggcacctttagcacctacgccatccactgggttcgacaggcaccaggacaaggactggaatggatgggcagaatcatccccatcgagggcagagcctactacgcccagaaattccagggcagagtgaccatcaccgccgacgagtctacaagcaccgcctacatggaactgagcagcctgagaagcgaggataccgctgtgtactattgcgccagaggccggtacagctacagatattggttcgactactggggccagggcaccctggttacagtctcttctacgcgtatccagaaccctgatcctgccgtgtaccagctgcgggatagcaagagcagcgacaagagcgtgtgtctgttcaccgacttcgacagccagaccaacgtgtcccagagcaaggactccgacgtgtacatcaccgataagaccgtgctggacatgcggagcatggacttcaagagcaactccgccgtggcctggtccaacaagtccgatttcgcctgcgccaacgccttcaacaacagcattatccccgaggacacattcttcccaagccccgagagcagctgcggtacccagagttttgggttgttggaccctaaattgtgctatctgttggacggaatcctgttcatttacggagtgatcctgaccgcattgttcctgcgggttaagttttccagatccgcagacgcacccgcttaccaacaagggcagaaccaactctacaatgaacttaatttggggcggagggaagagtacgacgttctggacaaaaggaggggacgagatcccgagatgggcggaaagcctcagcgaaggaagaatccgcaagaggggctttataacgaactccagaaagataaaatggcagaagcctatagtgagattgggatgaagggagaaaggaggaggggtaaaggtcacgatgggttgtaccaaggattgagcacagccactaaagatacctatgatgcgctccacatgcaggccctgccgccaaga

SEQ ID NO: 8397 - DNA, 2448 bp, Artificial Sequence
  Synthetic Polynucloetide
atggccttaccagtgaccgccttgctcctgccgctggccttgctgctccacgccgccaggccggagatcgtgctgacacagtctcccgccacactgtcactgtctccaggcgaaagagccacactgagctgtagagccagccagagcgtgtcctcttacctggcctggtatcagcagaagcctggacaggctccccggctgctgatctacgatgccagcaatagagccacaggcatccccgccagattttctggctctggcagcggcaccgatttcaccctgaccataagcagcctggaacctgaggacttcgccgtgtactactgccagcagagaagcaactggcccctgacctttggacagggcaccaaggtggaaatcaaactcgaggacctgaagaacgtgttcccacctgaggtggccgtgttcgagcctagcaaggccgagatcgcccacacccagaaagccaccctcgtgtgcctggctaccggcttctaccccgaccatgtggaactgtcttggtgggtcaacggcaaagaggtgcacagcggcgtgtgtaccgacccccagccactgaaagaacagcccgccctgaacgacagccggtactgcctgagcagcagactgagagtgtccgccaccttctggcagaacccccggaaccacttcagatgccaggtgcagttctacggcctgagcgagaacgacgagtggacccaggacagagccaagcccgtgacccagatcgtgtctgccgaagcctggggcagagccgattgcggatcccagagcttcggcctgctggaccccaagctgtgctacctgctggatggcatcctgttcatctacggcgtgatcctgaccgccctgttcctgagagtgaagttcagcagaagcgccgacgcccctgcctaccagcagggacagaaccaactgtacaacgagctgaacctgggcagacgggaagagtacgacgtgctggacaagcggagaggcagggaccctgagatgggcggaaagccccagcggagaaagaacccccaggaaggactgtataacgaactccagaaagacaagatggccgaagcctacagcgagatcggcatgaagggcgagcggagaagaggcaagggccacgatggcctgtaccagggcctgagcaccgccaccaaggacacctatgacgccctgcacatgcaggccctgcctccaagaagggccaagcgatctggatctggagcaacaaacttctcactactcaaacaagcaggtgacgtggaggagaatcccgggcctactagtatggactggatttggcgcatccttttccttgtcggcgctgctaccggcgcgcattccttcgaacaagttcagctggttcagagcggagccgaagtgaagaaacctggcagcagcgtgaaggtgtcctgcaaagcaagcggcggcacctttagcacctacgccatccactgggttcgacaggcaccaggacaaggactggaatggatgggcagaatcatccccatcgagggcagagcctactacgcccagaaattccagggcagagtgaccatcaccgccgacgagtctacaagcaccgcctacatggaactgagcagcctgagaagcgaggataccgctgtgtactattgcgccagaggccggtacagctacagatattggttcgactactggggccagggcaccctggttacagtctcttctacgcgtatccagaaccctgatcctgccgtgtaccagctgcgggatagcaagagcagcgacaagagcgtgtgtctgttcaccgacttcgacagccagaccaacgtgtcccagagcaaggactccgacgtgtacatcaccgataagtgcgtgctggacatgcggagcatggacttcaagagcaactccgccgtggcctggtccaacaagtccgatttcgcctgcgccaacgccttcaacaacagcattatccccgaggacacattcttcccaagcagcgacgtgccctgcggtacccagagttttgggttgttggaccctaaattgtgctatctgttggacggaatcctgttcatttacggagtgatcctgaccgcattgttcctgcgggttaagttttccagatccgcagacgcacccgcttaccaacaagggcagaaccaactctacaatgaacttaatttggggcggagggaagagtacgacgttctggacaaaaggaggggacgagatcccgagatgggcggaaagcctcagcgaaggaagaatccgcaagaggggctttataacgaactccagaaagataaaatggcagaagcctatagtgagattgggatgaagggagaaaggaggaggggtaaaggtcacgatgggttgtaccaaggattgagcacagccactaaagatacctatgatgcgctccacatgcaggccctgccgccaaga

SEQ ID NO: 8398 - DNA, 2661 bp, Artificial Sequence
  Synthetic Polynucloetide
atggccttaccagtgaccgccttgctcctgccgctggccttgctgctccacgccgccaggccggagatcgtgctgacacagtctcccgccacactgtcactgtctccaggcgaaagagccacactgagctgtagagccagccagagcgtgtcctcttacctggcctggtatcagcagaagcctggacaggctccccggctgctgatctacgatgccagcaatagagccacaggcatccccgccagattttctggctctggcagcggcaccgatttcaccctgaccataagcagcctggaacctgaggacttcgccgtgtactactgccagcagagaagcaactggcccctgacctttggacagggcaccaaggtggaaatcaaactcgaggggaaaccaattcccaaccctcttctgggactggattcaaccggcagcggcgaggacctgaagaacgtgttcccacctgaggtggccgtgttcgagcctagcgaggccgagatcagccacacccagaaagccaccctcgtgtgcctggctaccggcttctaccccgaccatgtggaactgtcttggtgggtcaacggcaaagaggtgcacagcggcgtgtctaccgacccccagccactgaaagaacagcccgccctgaacgacagccggtactgcctgagcagcagactgagagtgtccgccaccttctggcagaacccccggaaccacttcagatgccaggtgcagttctacggcctgagcgagaacgacgagtggacccaggacagagccaagcccgtgacccagatcgtgtctgccgaagcctggggcagagccgattgcggatcccagagcttcggcctgctggaccccaagctgtgctacctgctggatggcatcctgttcatctacggcgtgatcctgaccgccctgttcctgagagtgaagttcagcagaagcgccgacgcccctgcctaccagcagggacagaaccaactgtacaacgagctgaacctgggcagacgggaagagtacgacgtgctggacaagcggagaggcagggaccctgagatgggcggaaagccccagcggagaaagaacccccaggaaggactgtataacgaactccagaaagacaagatggccgaagcctacagcgagatcggcatgaagggcgagcggagaagaggcaagggccacgatggcctgtaccagggcctgagcaccgccaccaaggacacctatgacgccctgcacatgcaggccctgcctccaagaagggccaagcgatctggatctggagcaacaaacttctcactactcaaacaagcaggtgacgtggaggagaatcccgggcctactagtatggactggatttggcgcatccttttccttgtcggcgctgctaccggcgcgcattccttcgaacaagttcagctggttcagagcggagccgaagtgaagaaacctggcagcagcgtgaaggtgtcctgcaaagcaagcggcggcacctttagcacctacgccatccactgggttcgacaggcaccaggacaaggactggaatggatgggcagaatcatccccatcgagggcagagcctactacgcccagaaattccagggcagagtgaccatcaccgccgacgagtctacaagcaccgcctacatggaactgagcagcctgagaagcgaggataccgctgtgtactattgcgccagaggccggtacagctacagatattggttcgactactggggccagggcaccctggttacagtctcttctacgcgtgagcagaaactgatctcggaagaggatgggagcggcatccagaaccctgatcctgccgtgtaccagctgcgggatagcaagagcagcgacaagagcgtgtgtctgttcaccgacttcgacagccagaccaacgtgtcccagagcaaggactccgacgtgtacatcaccgataagaccgtgctggacatgcggagcatggacttcaagagcaactccgccgtggcctggtccaacaagtccgatttcgcctgcgccaacgccttcaacaacagcattatccccgaggacacattcttcccaagccccgagagcagctgcggtacccagagttttgggttgttggaccctaaattgtgctatctgttggacggaatcctgttcatttacggagtgatcctgaccgcattgttcctgaggagcaagcggtcacggctgctccacagcgattacatgaatatgacaccacgaagaccgggtcctactcgcaaacactaccaaccctacgcacctccccgcgactttgcagcgtaccgatctcgggttaagttttccagatccgcagacgcacccgcttaccaacaagggcagaaccaactctacaatgaacttaatttggggcggagggaagagtacgacgttctggacaaaaggaggggacgagatcccgagatgggcggaaagcctcagcgaaggaagaatccgcaagaggggctttataacgaactccagaaagataaaatggcagaagcctatagtgagattgggatgaagggagaaaggaggaggggtaaaggtcacgatgggttgtaccaaggattgagcacagccactaaagatacctatgatgcgctccacatgcaggccctgccgccaaga

SEQ ID NO: 8399 - DNA, 2784 bp, Artificial Sequence
  Synthetic Polynucloetide
atggccttaccagtgaccgccttgctcctgccgctggccttgctgctccacgccgccaggccggagatcgtgctgacacagtctcccgccacactgtcactgtctccaggcgaaagagccacactgagctgtagagccagccagagcgtgtcctcttacctggcctggtatcagcagaagcctggacaggctccccggctgctgatctacgatgccagcaatagagccacaggcatccccgccagattttctggctctggcagcggcaccgatttcaccctgaccataagcagcctggaacctgaggacttcgccgtgtactactgccagcagagaagcaactggcccctgacctttggacagggcaccaaggtggaaatcaaactcgaggggaaaccaattcccaaccctcttctgggactggattcaaccggcagcggcgaggacctgaagaacgtgttcccacctgaggtggccgtgttcgagcctagcgaggccgagatcagccacacccagaaagccaccctcgtgtgcctggctaccggcttctaccccgaccatgtggaactgtcttggtgggtcaacggcaaagaggtgcacagcggcgtgtctaccgacccccagccactgaaagaacagcccgccctgaacgacagccggtactgcctgagcagcagactgagagtgtccgccaccttctggcagaacccccggaaccacttcagatgccaggtgcagttctacggcctgagcgagaacgacgagtggacccaggacagagccaagcccgtgacccagatcgtgtctgccgaagcctggggcagagccgattgcggatcccagagcttcggcctgctggaccccaagctgtgctacctgctggatggcatcctgttcatctacggcgtgatcctgaccgccctgttcctgaggagtaagaggagcaggctcctgcacagtgactacatgaacatgactccacgccgccccggacccacccgcaagcattaccagccctatgccccaccacgcgacttcgcagcctatcgctccagagtgaagttcagcagaagcgccgacgcccctgcctaccagcagggacagaaccaactgtacaacgagctgaacctgggcagacgggaagagtacgacgtgctggacaagcggagaggcagggaccctgagatgggcggaaagccccagcggagaaagaacccccaggaaggactgtataacgaactccagaaagacaagatggccgaagcctacagcgagatcggcatgaagggcgagcggagaagaggcaagggccacgatggcctgtaccagggcctgagcaccgccaccaaggacacctatgacgccctgcacatgcaggccctgcctccaagaagggccaagcgatctggatctggagcaacaaacttctcactactcaaacaagcaggtgacgtggaggagaatcccgggcctactagtatggactggatttggcgcatccttttccttgtcggcgctgctaccggcgcgcattccttcgaacaagttcagctggttcagagcggagccgaagtgaagaaacctggcagcagcgtgaaggtgtcctgcaaagcaagcggcggcacctttagcacctacgccatccactgggttcgacaggcaccaggacaaggactggaatggatgggcagaatcatccccatcgagggcagagcctactacgcccagaaattccagggcagagtgaccatcaccgccgacgagtctacaagcaccgcctacatggaactgagcagcctgagaagcgaggataccgctgtgtactattgcgccagaggccggtacagctacagatattggttcgactactggggccagggcaccctggttacagtctcttctacgcgtgagcagaaactgatctcggaagaggatgggagcggcatccagaaccctgatcctgccgtgtaccagctgcgggatagcaagagcagcgacaagagcgtgtgtctgttcaccgacttcgacagccagaccaacgtgtcccagagcaaggactccgacgtgtacatcaccgataagaccgtgctggacatgcggagcatggacttcaagagcaactccgccgtggcctggtccaacaagtccgatttcgcctgcgccaacgccttcaacaacagcattatccccgaggacacattcttcccaagccccgagagcagctgcggtacccagagttttgggttgttggaccctaaattgtgctatctgttggacggaatcctgttcatttacggagtgatcctgaccgcattgttcctgaggagcaagcggtcacggctgctccacagcgattacatgaatatgacaccacgaagaccgggtcctactcgcaaacactaccaaccctacgcacctccccgcgactttgcagcgtaccgatctcgggttaagttttccagatccgcagacgcacccgcttaccaacaagggcagaaccaactctacaatgaacttaatttggggcggagggaagagtacgacgttctggacaaaaggaggggacgagatcccgagatgggcggaaagcctcagcgaaggaagaatccgcaagaggggctttataacgaactccagaaagataaaatggcagaagcctatagtgagattgggatgaagggagaaaggaggaggggtaaaggtcacgatgggttgtaccaaggattgagcacagccactaaagatacctatgatgcgctccacatgcaggccctgccgccaaga

SEQ ID NO: 8400 - DNA, 2667 bp, Artificial Sequence
  Synthetic Polynucloetide
atggccttaccagtgaccgccttgctcctgccgctggccttgctgctccacgccgccaggccggagatcgtgctgacacagtctcccgccacactgtcactgtctccaggcgaaagagccacactgagctgtagagccagccagagcgtgtcctcttacctggcctggtatcagcagaagcctggacaggctccccggctgctgatctacgatgccagcaatagagccacaggcatccccgccagattttctggctctggcagcggcaccgatttcaccctgaccataagcagcctggaacctgaggacttcgccgtgtactactgccagcagagaagcaactggcccctgacctttggacagggcaccaaggtggaaatcaaactcgaggggaaaccaattcccaaccctcttctgggactggattcaaccggcagcggcgaggacctgaagaacgtgttcccacctgaggtggccgtgttcgagcctagcgaggccgagatcagccacacccagaaagccaccctcgtgtgcctggctaccggcttctaccccgaccatgtggaactgtcttggtgggtcaacggcaaagaggtgcacagcggcgtgtctaccgacccccagccactgaaagaacagcccgccctgaacgacagccggtactgcctgagcagcagactgagagtgtccgccaccttctggcagaacccccggaaccacttcagatgccaggtgcagttctacggcctgagcgagaacgacgagtggacccaggacagagccaagcccgtgacccagatcgtgtctgccgaagcctggggcagagccgattgcggatcccagagcttcggcctgctggaccccaagctgtgctacctgctggatggcatcctgttcatctacggcgtgatcctgaccgccctgttcctgagagtgaagttcagcagaagcgccgacgcccctgcctaccagcagggacagaaccaactgtacaacgagctgaacctgggcagacgggaagagtacgacgtgctggacaagcggagaggcagggaccctgagatgggcggaaagccccagcggagaaagaacccccaggaaggactgtataacgaactccagaaagacaagatggccgaagcctacagcgagatcggcatgaagggcgagcggagaagaggcaagggccacgatggcctgtaccagggcctgagcaccgccaccaaggacacctatgacgccctgcacatgcaggccctgcctccaagaagggccaagcgatctggatctggagcaacaaacttctcactactcaaacaagcaggtgacgtggaggagaatcccgggcctactagtatggactggatttggcgcatccttttccttgtcggcgctgctaccggcgcgcattccttcgaacaagttcagctggttcagagcggagccgaagtgaagaaacctggcagcagcgtgaaggtgtcctgcaaagcaagcggcggcacctttagcacctacgccatccactgggttcgacaggcaccaggacaaggactggaatggatgggcagaatcatccccatcgagggcagagcctactacgcccagaaattccagggcagagtgaccatcaccgccgacgagtctacaagcaccgcctacatggaactgagcagcctgagaagcgaggataccgctgtgtactattgcgccagaggccggtacagctacagatattggttcgactactggggccagggcaccctggttacagtctcttctacgcgtgagcagaaactgatctcggaagaggatctggggagcggcatccagaaccctgatcctgccgtgtaccagctgcgggatagcaagagcagcgacaagagcgtgtgtctgttcaccgacttcgacagccagaccaacgtgtcccagagcaaggactccgacgtgtacatcaccgataagaccgtgctggacatgcggagcatggacttcaagagcaactccgccgtggcctggtccaacaagtccgatttcgcctgcgccaacgccttcaacaacagcattatccccgaggacacattcttcccaagccccgagagcagctgcggtacccagagttttgggttgttggaccctaaattgtgctatctgttggacggaatcctgttcatttacggagtgatcctgaccgcattgttcctgaagagaggccggaagaagctgctgtacatcttcaagcagcctttcatgcggcccgtgcagaccacccaggaagaggacggctgctcctgccggttccccgaggaagaagaaggcggctgcgagctgcgggttaagttttccagatccgcagacgcacccgcttaccaacaagggcagaaccaactctacaatgaacttaatttggggcggagggaagagtacgacgttctggacaaaaggaggggacgagatcccgagatgggcggaaagcctcagcgaaggaagaatccgcaagaggggctttataacgaactccagaaagataaaatggcagaagcctatagtgagattgggatgaagggagaaaggaggaggggtaaaggtcacgatgggttgtaccaaggattgagcacagccactaaagatacctatgatgcgctccacatgcaggccctgccgccaaga

SEQ ID NO: 8401 - DNA, 2793 bp, Artificial Sequence
  Synthetic Polynucloetide
atggccttaccagtgaccgccttgctcctgccgctggccttgctgctccacgccgccaggccggagatcgtgctgacacagtctcccgccacactgtcactgtctccaggcgaaagagccacactgagctgtagagccagccagagcgtgtcctcttacctggcctggtatcagcagaagcctggacaggctccccggctgctgatctacgatgccagcaatagagccacaggcatccccgccagattttctggctctggcagcggcaccgatttcaccctgaccataagcagcctggaacctgaggacttcgccgtgtactactgccagcagagaagcaactggcccctgacctttggacagggcaccaaggtggaaatcaaactcgaggggaaaccaattcccaaccctcttctgggactggattcaaccggcagcggcgaggacctgaagaacgtgttcccacctgaggtggccgtgttcgagcctagcgaggccgagatcagccacacccagaaagccaccctcgtgtgcctggctaccggcttctaccccgaccatgtggaactgtcttggtgggtcaacggcaaagaggtgcacagcggcgtgtctaccgacccccagccactgaaagaacagcccgccctgaacgacagccggtactgcctgagcagcagactgagagtgtccgccaccttctggcagaacccccggaaccacttcagatgccaggtgcagttctacggcctgagcgagaacgacgagtggacccaggacagagccaagcccgtgacccagatcgtgtctgccgaagcctggggcagagccgattgcggatcccagagcttcggcctgctggaccccaagctgtgctacctgctggatggcatcctgttcatctacggcgtgatcctgaccgccctgttcctgaaacggggcagaaagaaactcctgtatatattcaaacaaccatttatgagaccagtacaaactactcaagaggaagatggctgtagctgccgatttccagaagaagaagaaggaggatgtgaactgagagtgaagttcagcagaagcgccgacgcccctgcctaccagcagggacagaaccaactgtacaacgagctgaacctgggcagacgggaagagtacgacgtgctggacaagcggagaggcagggaccctgagatgggcggaaagccccagcggagaaagaacccccaggaaggactgtataacgaactccagaaagacaagatggccgaagcctacagcgagatcggcatgaagggcgagcggagaagaggcaagggccacgatggcctgtaccagggcctgagcaccgccaccaaggacacctatgacgccctgcacatgcaggccctgcctccaagaagggccaagcgatctggatctggagcaacaaacttctcactactcaaacaagcaggtgacgtggaggagaatcccgggcctactagtatggactggatttggcgcatccttttccttgtcggcgctgctaccggcgcgcattccttcgaacaagttcagctggttcagagcggagccgaagtgaagaaacctggcagcagcgtgaaggtgtcctgcaaagcaagcggcggcacctttagcacctacgccatccactgggttcgacaggcaccaggacaaggactggaatggatgggcagaatcatccccatcgagggcagagcctactacgcccagaaattccagggcagagtgaccatcaccgccgacgagtctacaagcaccgcctacatggaactgagcagcctgagaagcgaggataccgctgtgtactattgcgccagaggccggtacagctacagatattggttcgactactggggccagggcaccctggttacagtctcttctacgcgtgagcagaaactgatctcggaagaggatctggggagcggcatccagaaccctgatcctgccgtgtaccagctgcgggatagcaagagcagcgacaagagcgtgtgtctgttcaccgacttcgacagccagaccaacgtgtcccagagcaaggactccgacgtgtacatcaccgataagaccgtgctggacatgcggagcatggacttcaagagcaactccgccgtggcctggtccaacaagtccgatttcgcctgcgccaacgccttcaacaacagcattatccccgaggacacattcttcccaagccccgagagcagctgcggtacccagagttttgggttgttggaccctaaattgtgctatctgttggacggaatcctgttcatttacggagtgatcctgaccgcattgttcctgaagagaggccggaagaagctgctgtacatcttcaagcagcctttcatgcggcccgtgcagaccacccaggaagaggacggctgctcctgccggttccccgaggaagaagaaggcggctgcgagctgcgggttaagttttccagatccgcagacgcacccgcttaccaacaagggcagaaccaactctacaatgaacttaatttggggcggagggaagagtacgacgttctggacaaaaggaggggacgagatcccgagatgggcggaaagcctcagcgaaggaagaatccgcaagaggggctttataacgaactccagaaagataaaatggcagaagcctatagtgagattgggatgaagggagaaaggaggaggggtaaaggtcacgatgggttgtaccaaggattgagcacagccactaaagatacctatgatgcgctccacatgcaggccctgccgccaaga

SEQ ID NO: 8402 - DNA, 2466 bp, Artificial Sequence
  Synthetic Polynucloetide
atggccttaccagtgaccgccttgctcctgccgctggccttgctgctccacgccgccaggccggagatcgtgctgacacagtctcccgccacactgtcactgtctccaggcgaaagagccacactgagctgtagagccagccagagcgtgtcctcttacctggcctggtatcagcagaagcctggacaggctccccggctgctgatctacgatgccagcaatagagccacaggcatccccgccagattttctggctctggcagcggcaccgatttcaccctgaccataagcagcctggaacctgaggacttcgccgtgtactactgccagcagagaagcaactggcccctgacctttggacagggcaccaaggtggaaatcaaactcgagcagagcttcggcctgctggaccccaagctgtgctacctgctggatggcatcctgttcatctacggcgtgatcctgaccgccctgttcctgagagtgaagttcagcagaagcgccgacgcccctgcctaccagcagggacagaaccaactgtacaacgagctgaacctgggcagacgggaagagtacgacgtgctggacaagcggagaggcagggaccctgagatgggcggaaagccccagcggagaaagaacccccaggaaggactgtataacgaactccagaaagacaagatggccgaagcctacagcgagatcggcatgaagggcgagcggagaagaggcaagggccacgatggcctgtaccagggcctgagcaccgccaccaaggacacctatgacgccctgcacatgcaggccctgcctccaagaagggccaagcgatctggatctggagcaacaaacttctcactactcaaacaagcaggtgacgtggaggagaatcccgggcctactagtatggactggatttggcgcatccttttccttgtcggcgctgctaccggcgcgcattccttcgaacaagttcagctggttcagagcggagccgaagtgaagaaacctggcagcagcgtgaaggtgtcctgcaaagcaagcggcggcacctttagcacctacgccatccactgggttcgacaggcaccaggacaaggactggaatggatgggcagaatcatccccatcgagggcagagcctactacgcccagaaattccagggcagagtgaccatcaccgccgacgagtctacaagcaccgcctacatggaactgagcagcctgagaagcgaggataccgctgtgtactattgcgccagaggccggtacagctacagatattggttcgactactggggccagggcaccctggttacagtctcttctacgcgtcagagttttgggttgttggaccctaaattgtgctatctgttggacggaatcctgttcatttacggagtgatcctgaccgcattgttcctgcgggttaagttttccagatccgcagacgcacccgcttaccaacaagggcagaaccaactctacaatgaacttaatttggggcggagggaagagtacgacgttctggacaaaaggaggggacgagatcccgagatgggcggaaagcctcagcgaaggaagaatccgcaagaggggctttataacgaactccagaaagataaaatggcagaagcctatagtgagattgggatgaagggagaaaggaggaggggtaaaggtcacgatgggttgtaccaaggattgagcacagccactaaagatacctatgatgcgctccacatgcaggccctgccgccaagacgcgccaagagaagcggatctggcgtgaagcagaccctgaatttcgacctgctgaagctggctggcgacgtggaatccaacccaggcccttctagaggccatatgaccgagtacaagcccacggtgcgcctcgccacccgcgacgacgtccccagggccgtacgcaccctcgccgccgcgttcgccgactaccccgccacgcgccacaccgtcgatccggaccgccacatcgagcgggtcaccgagctgcaagaactcttcctcacgcgcgtcgggctcgacatcggcaaggtgtgggtcgcggacgacggcgccgcggtggcggtctggaccacgccggagagcgtcgaagcgggggcggtgttcgccgagatcggcccgcgcatggccgagttgagcggttcccggctggccgcgcagcaacagatggaaggcctcctggcgccgcaccggcccaaggagcccgcgtggttcctggccaccgtcggcgtctcgcccgaccaccagggcaagggtctgggcagcgccgtcgtgctccccggagtggaggcggccgagcgcgccggggtgcccgccttcctggagacctccgcgccccgcaacctccccttctacgagcggctcggcttcaccgtcaccgccgacgtcgaggtgcccgaaggaccgcgcacctggtgcatgacccgcaagcccggtgcctga

SEQ ID NO: 8403 - DNA, 1938 bp, Artificial Sequence
  Synthetic Polynucloetide
atggccttaccagtgaccgccttgctcctgccgctggccttgctgctccacgccgccaggccggagatcgtgctgacacagtctcccgccacactgtcactgtctccaggcgaaagagccacactgagctgtagagccagccagagcgtgtcctcttacctggcctggtatcagcagaagcctggacaggctccccggctgctgatctacgatgccagcaatagagccacaggcatccccgccagattttctggctctggcagcggcaccgatttcaccctgaccataagcagcctggaacctgaggacttcgccgtgtactactgccagcagagaagcaactggcccctgacctttggacagggcaccaaggtggaaatcaaactcgagggacagcctaaggccaatcctaccgtgacactgttccctccaagcagcgaagaactccaggccaacaaggccacacttgtgtgcctgatctccgacttctaccctggggctgtgacagtggcttggaaggccgatggatctcctgtgaaagccggcgtggaaaccaccaagccatccaagcagagcaacaacaaatacgccgccagctcctacctgagcctgacacctgagcagtggaagtcccacagatcctacagctgccaagtgacccacgaaggcagcaccgtggaaaagacagtggcccctacagagtgcagccccatcaagaccgatgtgattacaatggaccccaaggacaactgctccaaggacgccaacgataccctgctgctccagctgaccaacaccagcgcctactacatgtacttgttgctgctgctgaagtccgtggtgtacttcgccatcatcacatgctgcctgctgcggagaaccgccttctgctgcaacggcgagaagtctagggccaagcgatctggatctggagcaacaaacttctcactactcaaacaagcaggtgacgtggaggagaatcccgggcctactagtatggactggatttggcgcatccttttccttgtcggcgctgctaccggcgcgcattccttcgaacaagttcagctggttcagagcggagccgaagtgaagaaacctggcagcagcgtgaaggtgtcctgcaaagcaagcggcggcacctttagcacctacgccatccactgggttcgacaggcaccaggacaaggactggaatggatgggcagaatcatccccatcgagggcagagcctactacgcccagaaattccagggcagagtgaccatcaccgccgacgagtctacaagcaccgcctacatggaactgagcagcctgagaagcgaggataccgctgtgtactattgcgccagaggccggtacagctacagatattggttcgactactggggccagggcaccctggttacagtctcttctacgcgtgcctctacaaagggaccctccgtgtttcctctggctcccagcagcaagtctacaagcggaggaacagccgctctgggctgcctggtcaaggattactttcccgagcctgtgaccgtgtcctggaatagcggagcactgacaagcggcgtgcacacctttccagccgtgctgcaaagcagcggcctgtactctctgagcagcgtggtcacagtgcctagctctagcctgggcacccagacctacatctgcaatgtgaaccacaagcctagcaacaccaaggtggacaagagagtggaacccaagagctgtgaagtgaaaaccgactccaccgaccacgtgaagcccaaagagacagagaacaccaagcagcccagcaagagctgccacaagcccaaggccatcgtgcacaccgagaaagtgaacatgatgagcctgaccgtgctgggcctgcggatgctgttcgccaaaaccgtggccgtgaacttcctgctgaccgccaagctgttcttcctc

SEQ ID NO: 8404 - DNA, 1872 bp, Artificial Sequence
  Synthetic Polynucloetide
atggccttaccagtgaccgccttgctcctgccgctggccttgctgctccacgccgccaggccggagatcgtgctgacacagtctcccgccacactgtcactgtctccaggcgaaagagccacactgagctgtagagccagccagagcgtgtcctcttacctggcctggtatcagcagaagcctggacaggctccccggctgctgatctacgatgccagcaatagagccacaggcatccccgccagattttctggctctggcagcggcaccgatttcaccctgaccataagcagcctggaacctgaggacttcgccgtgtactactgccagcagagaagcaactggcccctgacctttggacagggcaccaaggtggaaatcaaactcgagggacagcctaaggccaatcctaccgtgacactgttccctccaagcagcgaagaactccaggccaacaaggccacacttgtgtgcctgatctccgacttctaccctggggctgtgacagtggcttggaaggccgatggatctcctgtgaaagccggcgtggaaaccaccaagccatccaagcagagcaacaacaaatacgccgccagctcctacctgagcctgacacctgagcagtggaagtcccacagatcctacagctgccaagtgacccacgaaggcagcaccgtggaaaagacagtggcccctacagagtgcagcggcagagccgattgcggcatcaccagcgccagctaccaccagggcgtgctgagcgccaccatcctgtacgagatcctgctgggcaaggccaccctgtacgccgtgctggtgtctgccctggtgctgatggctatggtcaagcggaaggacagccggggaagggccaagcgatctggatctggagcaacaaacttctcactactcaaacaagcaggtgacgtggaggagaatcccgggcctactagtatggactggatttggcgcatccttttccttgtcggcgctgctaccggcgcgcattccttcgaacaagttcagctggttcagagcggagccgaagtgaagaaacctggcagcagcgtgaaggtgtcctgcaaagcaagcggcggcacctttagcacctacgccatccactgggttcgacaggcaccaggacaaggactggaatggatgggcagaatcatccccatcgagggcagagcctactacgcccagaaattccagggcagagtgaccatcaccgccgacgagtctacaagcaccgcctacatggaactgagcagcctgagaagcgaggataccgctgtgtactattgcgccagaggccggtacagctacagatattggttcgactactggggccagggcaccctggttacagtctcttctacgcgtgcctctacaaagggaccctccgtgtttcctctggctcccagcagcaagtctacaagcggaggaacagccgctctgggctgcctggtcaaggattactttcccgagcctgtgaccgtgtcctggaatagcggagcactgacaagcggcgtgcacacctttccagccgtgctgcaaagcagcggcctgtactctctgagcagcgtggtcacagtgcctagctctagcctgggcacccagacctacatctgcaatgtgaaccacaagcctagcaacaccaaggtggacaagagagtggaacccaagagctgtatccccgaggacacattcttcccaagcagcgacgtgccctgcgacgtgaagctggtggaaaagagcttcgagacagacaccaacctgaacttccagaacctgagcgtgatcggcttcagaatcctgctgctgaaagtggccggctttaacctgctgatgaccctgcggctgtggtccagc

SEQ ID NO: 8405 - DNA, 1872 bp, Artificial Sequence
  Synthetic Polynucloetide
atggccttaccagtgaccgccttgctcctgccgctggccttgctgctccacgccgccaggccggagatcgtgctgacacagtctcccgccacactgtcactgtctccaggcgaaagagccacactgagctgtagagccagccagagcgtgtcctcttacctggcctggtatcagcagaagcctggacaggctccccggctgctgatctacgatgccagcaatagagccacaggcatccccgccagattttctggctctggcagcggcaccgatttcaccctgaccataagcagcctggaacctgaggacttcgccgtgtactactgccagcagagaagcaactggcccctgacctttggacagggcaccaaggtggaaatcaaactcgagggacagcctaaggccaatcctaccgtgacactgttccctccaagcagcgaagaactccaggccaacaaggccacacttgtgtgcctgatctccgacttctaccctggggctgtgacagtggcttggaaggccgatggatctcctgtgaaagccggcgtggaaaccaccaagccatccaagcagagcaacaacaaatacgccgccagctcctacctgagcctgacacctgagcagtggaagtcccacagatcctacagctgccaagtgacccacgaaggcagcaccgtggaaaagacagtggcccctacagagtgcagcggcagagccgattgcggctttaccagcgagagctaccagcagggcgtgctgagcgccaccatcctgtacgagatcctgctgggcaaggccaccctgtacgccgtgctggtgtctgccctggtgctgatggctatggtcaagcggaaggacagccggggaagggccaagcgatctggatctggagcaacaaacttctcactactcaaacaagcaggtgacgtggaggagaatcccgggcctactagtatggactggatttggcgcatccttttccttgtcggcgctgctaccggcgcgcattccttcgaacaagttcagctggttcagagcggagccgaagtgaagaaacctggcagcagcgtgaaggtgtcctgcaaagcaagcggcggcacctttagcacctacgccatccactgggttcgacaggcaccaggacaaggactggaatggatgggcagaatcatccccatcgagggcagagcctactacgcccagaaattccagggcagagtgaccatcaccgccgacgagtctacaagcaccgcctacatggaactgagcagcctgagaagcgaggataccgctgtgtactattgcgccagaggccggtacagctacagatattggttcgactactggggccagggcaccctggttacagtctcttctacgcgtgcctctacaaagggaccctccgtgtttcctctggctcccagcagcaagtctacaagcggaggaacagccgctctgggctgcctggtcaaggattactttcccgagcctgtgaccgtgtcctggaatagcggagcactgacaagcggcgtgcacacctttccagccgtgctgcaaagcagcggcctgtactctctgagcagcgtggtcacagtgcctagctctagcctgggcacccagacctacatctgcaatgtgaaccacaagcctagcaacaccaaggtggacaagagagtggaacccaagagctgtatccccgaggacacattcttcccaagccccgagagcagctgcgacgtgaagctggtggaaaagagcttcgagacagacaccaacctgaacttccagaacctgagcgtgatcggcttcagaatcctgctgctgaaagtggccggctttaacctgctgatgaccctgcggctgtggtccagc

SEQ ID NO: 8406 - DNA, 1350 bp, Artificial Sequence
  Synthetic Polynucloetide
atggccttaccagtgaccgccttgctcctgccgctggccttgctgctccacgccgccaggccggagatcgtgctgacacagtctcccgccacactgtcactgtctccaggcgaaagagccacactgagctgtagagccagccagagcgtgtcctcttacctggcctggtatcagcagaagcctggacaggctccccggctgctgatctacgatgccagcaatagagccacaggcatccccgccagattttctggctctggcagcggcaccgatttcaccctgaccataagcagcctggaacctgaggacttcgccgtgtactactgccagcagagaagcaactggcccctgacctttggacagggcaccaaggtggaaatcaaaggcggaggcggaagtggaggcggaggatctggcggcggaggctctcaagttcagctggttcagagcggagccgaagtgaagaaacctggcagcagcgtgaaggtgtcctgcaaagcaagcggcggcacctttagcacctacgccatccactgggttcgacaggcaccaggacaaggactggaatggatgggcagaatcatccccatcgagggcagagcctactacgcccagaaattccagggcagagtgaccatcaccgccgacgagtctacaagcaccgcctacatggaactgagcagcctgagaagcgaggataccgctgtgtactattgcgccagaggccggtacagctacagatattggttcgactactggggccagggcaccctggttacagtctcttctacgcgtgacggtaacgaggagatgggaggaatcactcaaaccccttacaaagtctcaatttcaggaacaactgttatccttacatgtccccagtatcctggcagcgagatcctttggcagcataacgacaagaatatagggggagatgaagacgataagaatatcggatctgacgaggatcacttgagcctgaaagagttctccgagcttgaacaaagcggatattatgtgtgctatccgcgcgggtcaaagccggaagacgctaacttttacctttatctccgagccagagtgtgcgaaaattgcatggaaatggacgttatgtccgttgctacaatagttatcgtagatatatgcatcacgggtggactgcttctgctggtttattattggtccaagaatagaaaggccaaagctaaacccgtgaccagaggcgctggcgcaggcggaaggcaaaggggacaaaacaaagaacggccaccaccagtgccaaatccagattatgagcctattcggaaaggacagagggacctgtactctggcctgaatcagagaagaatc

SEQ ID NO: 8407 - DNA, 1245 bp, Artificial Sequence
  Synthetic Polynucloetide
atggccttaccagtgaccgccttgctcctgccgctggccttgctgctccacgccgccaggccggagatcgtgctgacacagtctcccgccacactgtcactgtctccaggcgaaagagccacactgagctgtagagccagccagagcgtgtcctcttacctggcctggtatcagcagaagcctggacaggctccccggctgctgatctacgatgccagcaatagagccacaggcatccccgccagattttctggctctggcagcggcaccgatttcaccctgaccataagcagcctggaacctgaggacttcgccgtgtactactgccagcagagaagcaactggcccctgacctttggacagggcaccaaggtggaaatcaaaggcggaggcggaagtggaggcggaggatctggcggcggaggctctcaagttcagctggttcagagcggagccgaagtgaagaaacctggcagcagcgtgaaggtgtcctgcaaagcaagcggcggcacctttagcacctacgccatccactgggttcgacaggcaccaggacaaggactggaatggatgggcagaatcatccccatcgagggcagagcctactacgcccagaaattccagggcagagtgaccatcaccgccgacgagtctacaagcaccgcctacatggaactgagcagcctgagaagcgaggataccgctgtgtactattgcgccagaggccggtacagctacagatattggttcgactactggggccagggcaccctggttacagtctcttctacgcgtttcaagatccccatcgaggaactggaagatcgggtgttcgtgaactgcaacacctctatcacctgggtggaaggcaccgtgggaacactgctgagcgacatcaccagactggacctcggcaagcggattctggaccctcggggcatctacagatgcaacggcaccgacatctacaaggacaaagaaagcaccgtgcaggtccactacagaatgtgccagtcctgcgtggaactggaccctgctacagtggccggcatcatcgtgaccgatgtgatcgctactctgctgctggctctgggagtgttctgcttcgccggacacgaaacaggcagactgtctggcgctgccgatacacaggccctgctgagaaacgaccaagtgtatcagcccctgcgcgacagagatgatgcccagtattctcacctcggcggcaactgggctagaaacaag

SEQ ID NO: 8408 - DNA, 1275 bp, Artificial Sequence
  Synthetic Polynucloetide
atggccttaccagtgaccgccttgctcctgccgctggccttgctgctccacgccgccaggccggagatcgtgctgacacagtctcccgccacactgtcactgtctccaggcgaaagagccacactgagctgtagagccagccagagcgtgtcctcttacctggcctggtatcagcagaagcctggacaggctccccggctgctgatctacgatgccagcaatagagccacaggcatccccgccagattttctggctctggcagcggcaccgatttcaccctgaccataagcagcctggaacctgaggacttcgccgtgtactactgccagcagagaagcaactggcccctgacctttggacagggcaccaaggtggaaatcaaaggcggaggcggaagtggaggcggaggatctggcggcggaggctctcaagttcagctggttcagagcggagccgaagtgaagaaacctggcagcagcgtgaaggtgtcctgcaaagcaagcggcggcacctttagcacctacgccatccactgggttcgacaggcaccaggacaaggactggaatggatgggcagaatcatccccatcgagggcagagcctactacgcccagaaattccagggcagagtgaccatcaccgccgacgagtctacaagcaccgcctacatggaactgagcagcctgagaagcgaggataccgctgtgtactattgcgccagaggccggtacagctacagatattggttcgactactggggccagggcaccctggttacagtctcttctacgcgtcagagcatcaagggcaaccacctggtcaaggtgtacgactaccaagaggacggcagcgtgctgctgacatgtgatgccgaggccaagaacatcacctggtttaaggacggcaagatgatcggcttcctgaccgaggacaagaagaagtggaacctgggcagcaacgctaaggaccccagaggcatgtatcagtgcaagggcagccagaacaagagcaagcccctccaggtgtactaccggatgtgccagaactgcatcgagctgaacgccgctaccatcagcggctttctgttcgccgagatcgtgtccatcttcgtgctggccgtgggcgtgtactttatcgctggacaggatggcgtgcggcagagcagagcttccgataagcaaaccctgctgcctaacgaccagctgtaccagcctctgaaggacagagaggacgaccagtacagccacctccagggcaatcagctgagaagaaac

SEQ ID NO: 8409 - DNA, 1224 bp, Artificial Sequence
  Synthetic Polynucloetide
atggccttaccagtgaccgccttgctcctgccgctggccttgctgctccacgccgccaggccggagatcgtgctgacacagtctcccgccacactgtcactgtctccaggcgaaagagccacactgagctgtagagccagccagagcgtgtcctcttacctggcctggtatcagcagaagcctggacaggctccccggctgctgatctacgatgccagcaatagagccacaggcatccccgccagattttctggctctggcagcggcaccgatttcaccctgaccataagcagcctggaacctgaggacttcgccgtgtactactgccagcagagaagcaactggcccctgacctttggacagggcaccaaggtggaaatcaaaggcggaggcggaagtggaggcggaggatctggcggcggaggctctcaagttcagctggttcagagcggagccgaagtgaagaaacctggcagcagcgtgaaggtgtcctgcaaagcaagcggcggcacctttagcacctacgccatccactgggttcgacaggcaccaggacaaggactggaatggatgggcagaatcatccccatcgagggcagagcctactacgcccagaaattccagggcagagtgaccatcaccgccgacgagtctacaagcaccgcctacatggaactgagcagcctgagaagcgaggataccgctgtgtactattgcgccagaggccggtacagctacagatattggttcgactactggggccagggcaccctggttacagtctcttctacgcgtcagagttttgggttgttggaccctaaattgtgctatctgttggacggaatcctgttcatttacggagtgatcctgaccgcattgttcctgcgggttaagttttccagatccgcagacgcacccgcttaccaacaagggcagaaccaactctacaatgaacttaatttggggcggagggaagagtacgacgttctggacaaaaggaggggacgagatcccgagatgggcggaaagcctcagcgaaggaagaatccgcaagaggggctttataacgaactccagaaagataaaatggcagaagcctatagtgagattgggatgaagggagaaaggaggaggggtaaaggtcacgatgggttgtaccaaggattgagcacagccactaaagatacctatgatgcgctccacatgcaggccctgccgccaaga

SEQ ID NO: 8410 - DNA, 1350 bp, Artificial Sequence
  Synthetic Polynucloetide
atggccttaccagtgaccgccttgctcctgccgctggccttgctgctccacgccgccaggccgcaagttcagctggttcagagcggagccgaagtgaagaaacctggcagcagcgtgaaggtgtcctgcaaagcaagcggcggcacctttagcacctacgccatccactgggttcgacaggcaccaggacaaggactggaatggatgggcagaatcatccccatcgagggcagagcctactacgcccagaaattccagggcagagtgaccatcaccgccgacgagtctacaagcaccgcctacatggaactgagcagcctgagaagcgaggataccgctgtgtactattgcgccagaggccggtacagctacagatattggttcgactactggggccagggcaccctggttacagtctcttctggcggaggcggaagtggaggcggaggatctggcggcggaggctctgagatcgtgctgacacagtctcccgccacactgtcactgtctccaggcgaaagagccacactgagctgtagagccagccagagcgtgtcctcttacctggcctggtatcagcagaagcctggacaggctccccggctgctgatctacgatgccagcaatagagccacaggcatccccgccagattttctggctctggcagcggcaccgatttcaccctgaccataagcagcctggaacctgaggacttcgccgtgtactactgccagcagagaagcaactggcccctgacctttggacagggcaccaaggtggaaatcaaaacgcgtgacggtaacgaggagatgggaggaatcactcaaaccccttacaaagtctcaatttcaggaacaactgttatccttacatgtccccagtatcctggcagcgagatcctttggcagcataacgacaagaatatagggggagatgaagacgataagaatatcggatctgacgaggatcacttgagcctgaaagagttctccgagcttgaacaaagcggatattatgtgtgctatccgcgcgggtcaaagccggaagacgctaacttttacctttatctccgagccagagtgtgcgaaaattgcatggaaatggacgttatgtccgttgctacaatagttatcgtagatatatgcatcacgggtggactgcttctgctggtttattattggtccaagaatagaaaggccaaagctaaacccgtgaccagaggcgctggcgcaggcggaaggcaaaggggacaaaacaaagaacggccaccaccagtgccaaatccagattatgagcctattcggaaaggacagagggacctgtactctggcctgaatcagagaagaatc

SEQ ID NO: 8411 - DNA, 1245 bp, Artificial Sequence
  Synthetic Polynucloetide
atggccttaccagtgaccgccttgctcctgccgctggccttgctgctccacgccgccaggccgcaagttcagctggttcagagcggagccgaagtgaagaaacctggcagcagcgtgaaggtgtcctgcaaagcaagcggcggcacctttagcacctacgccatccactgggttcgacaggcaccaggacaaggactggaatggatgggcagaatcatccccatcgagggcagagcctactacgcccagaaattccagggcagagtgaccatcaccgccgacgagtctacaagcaccgcctacatggaactgagcagcctgagaagcgaggataccgctgtgtactattgcgccagaggccggtacagctacagatattggttcgactactggggccagggcaccctggttacagtctcttctggcggaggcggaagtggaggcggaggatctggcggcggaggctctgagatcgtgctgacacagtctcccgccacactgtcactgtctccaggcgaaagagccacactgagctgtagagccagccagagcgtgtcctcttacctggcctggtatcagcagaagcctggacaggctccccggctgctgatctacgatgccagcaatagagccacaggcatccccgccagattttctggctctggcagcggcaccgatttcaccctgaccataagcagcctggaacctgaggacttcgccgtgtactactgccagcagagaagcaactggcccctgacctttggacagggcaccaaggtggaaatcaaaacgcgtttcaagatccccatcgaggaactggaagatcgggtgttcgtgaactgcaacacctctatcacctgggtggaaggcaccgtgggaacactgctgagcgacatcaccagactggacctcggcaagcggattctggaccctcggggcatctacagatgcaacggcaccgacatctacaaggacaaagaaagcaccgtgcaggtccactacagaatgtgccagtcctgcgtggaactggaccctgctacagtggccggcatcatcgtgaccgatgtgatcgctactctgctgctggctctgggagtgttctgcttcgccggacacgaaacaggcagactgtctggcgctgccgatacacaggccctgctgagaaacgaccaagtgtatcagcccctgcgcgacagagatgatgcccagtattctcacctcggcggcaactgggctagaaacaag

SEQ ID NO: 8412 - DNA, 1275 bp, Artificial Sequence
  Synthetic Polynucloetide
atggccttaccagtgaccgccttgctcctgccgctggccttgctgctccacgccgccaggccgcaagttcagctggttcagagcggagccgaagtgaagaaacctggcagcagcgtgaaggtgtcctgcaaagcaagcggcggcacctttagcacctacgccatccactgggttcgacaggcaccaggacaaggactggaatggatgggcagaatcatccccatcgagggcagagcctactacgcccagaaattccagggcagagtgaccatcaccgccgacgagtctacaagcaccgcctacatggaactgagcagcctgagaagcgaggataccgctgtgtactattgcgccagaggccggtacagctacagatattggttcgactactggggccagggcaccctggttacagtctcttctggcggaggcggaagtggaggcggaggatctggcggcggaggctctgagatcgtgctgacacagtctcccgccacactgtcactgtctccaggcgaaagagccacactgagctgtagagccagccagagcgtgtcctcttacctggcctggtatcagcagaagcctggacaggctccccggctgctgatctacgatgccagcaatagagccacaggcatccccgccagattttctggctctggcagcggcaccgatttcaccctgaccataagcagcctggaacctgaggacttcgccgtgtactactgccagcagagaagcaactggcccctgacctttggacagggcaccaaggtggaaatcaaaacgcgtcagagcatcaagggcaaccacctggtcaaggtgtacgactaccaagaggacggcagcgtgctgctgacatgtgatgccgaggccaagaacatcacctggtttaaggacggcaagatgatcggcttcctgaccgaggacaagaagaagtggaacctgggcagcaacgctaaggaccccagaggcatgtatcagtgcaagggcagccagaacaagagcaagcccctccaggtgtactaccggatgtgccagaactgcatcgagctgaacgccgctaccatcagcggctttctgttcgccgagatcgtgtccatcttcgtgctggccgtgggcgtgtactttatcgctggacaggatggcgtgcggcagagcagagcttccgataagcaaaccctgctgcctaacgaccagctgtaccagcctctgaaggacagagaggacgaccagtacagccacctccagggcaatcagctgagaagaaac

SEQ ID NO: 8413 - DNA, 1224 bp, Artificial Sequence
  Synthetic Polynucloetide
atggccttaccagtgaccgccttgctcctgccgctggccttgctgctccacgccgccaggccgcaagttcagctggttcagagcggagccgaagtgaagaaacctggcagcagcgtgaaggtgtcctgcaaagcaagcggcggcacctttagcacctacgccatccactgggttcgacaggcaccaggacaaggactggaatggatgggcagaatcatccccatcgagggcagagcctactacgcccagaaattccagggcagagtgaccatcaccgccgacgagtctacaagcaccgcctacatggaactgagcagcctgagaagcgaggataccgctgtgtactattgcgccagaggccggtacagctacagatattggttcgactactggggccagggcaccctggttacagtctcttctggcggaggcggaagtggaggcggaggatctggcggcggaggctctgagatcgtgctgacacagtctcccgccacactgtcactgtctccaggcgaaagagccacactgagctgtagagccagccagagcgtgtcctcttacctggcctggtatcagcagaagcctggacaggctccccggctgctgatctacgatgccagcaatagagccacaggcatccccgccagattttctggctctggcagcggcaccgatttcaccctgaccataagcagcctggaacctgaggacttcgccgtgtactactgccagcagagaagcaactggcccctgacctttggacagggcaccaaggtggaaatcaaaacgcgtcagagttttgggttgttggaccctaaattgtgctatctgttggacggaatcctgttcatttacggagtgatcctgaccgcattgttcctgcgggttaagttttccagatccgcagacgcacccgcttaccaacaagggcagaaccaactctacaatgaacttaatttggggcggagggaagagtacgacgttctggacaaaaggaggggacgagatcccgagatgggcggaaagcctcagcgaaggaagaatccgcaagaggggctttataacgaactccagaaagataaaatggcagaagcctatagtgagattgggatgaagggagaaaggaggaggggtaaaggtcacgatgggttgtaccaaggattgagcacagccactaaagatacctatgatgcgctccacatgcaggccctgccgccaaga

SEQ ID NO: 8414 - DNA, 1926 bp, Artificial Sequence
  Synthetic Polynucloetide
atggccttaccagtgaccgccttgctcctgccgctggccttgctgctccacgccgccaggccggagatcgtgctgacacagtctcccgccacactgtcactgtctccaggcgaaagagccacactgagctgtagagccagccagagcgtgtcctcttacctggcctggtatcagcagaagcctggacaggctccccggctgctgatctacgatgccagcaatagagccacaggcatccccgccagattttctggctctggcagcggcaccgatttcaccctgaccataagcagcctggaacctgaggacttcgccgtgtactactgccagcagagaagcaactggcccctgacctttggacagggcaccaaggtggaaatcaaaggcggaggcggaagtggaggcggaggatctggcggcggaggctctcaagttcagctggttcagagcggagccgaagtgaagaaacctggcagcagcgtgaaggtgtcctgcaaagcaagcggcggcacctttagcacctacgccatccactgggttcgacaggcaccaggacaaggactggaatggatgggcagaatcatccccatcgagggcagagcctactacgcccagaaattccagggcagagtgaccatcaccgccgacgagtctacaagcaccgcctacatggaactgagcagcctgagaagcgaggataccgctgtgtactattgcgccagaggccggtacagctacagatattggttcgactactggggccagggcaccctggttacagtctcttctacgcgtgggagcggcatccagaaccctgatcctgccgtgtaccagctgcgggatagcaagagcagcgacaagagcgtgtgtctgttcaccgacttcgacagccagaccaacgtgtcccagagcaaggactccgacgtgtacatcaccgataagaccgtgctggacatgcggagcatggacttcaagagcaactccgccgtggcctggtccaacaagtccgatttcgcctgcgccaacgccttcaacaacagcattatccccgaggacacattcttcccaagccccgagagcagctgcgacgtgaagctggtggaaaagagcttcgagacagacaccaacctgaacttccagaacctgagcgtgatcggcttcagaatcctgctgctgaaagtggccggctttaacctgctgatgaccctgcggctgtggtccagccgcgccaagagaagcggatctggcgtgaagcagaccctgaatttcgacctgctgaagctggctggcgacgtggaatccaacccaggcccttctagaggccatatgaccgagtacaagcccacggtgcgcctcgccacccgcgacgacgtccccagggccgtacgcaccctcgccgccgcgttcgccgactaccccgccacgcgccacaccgtcgatccggaccgccacatcgagcgggtcaccgagctgcaagaactcttcctcacgcgcgtcgggctcgacatcggcaaggtgtgggtcgcggacgacggcgccgcggtggcggtctggaccacgccggagagcgtcgaagcgggggcggtgttcgccgagatcggcccgcgcatggccgagttgagcggttcccggctggccgcgcagcaacagatggaaggcctcctggcgccgcaccggcccaaggagcccgcgtggttcctggccaccgtcggcgtctcgcccgaccaccagggcaagggtctgggcagcgccgtcgtgctccccggagtggaggcggccgagcgcgccggggtgcccgccttcctggagacctccgcgccccgcaacctccccttctacgagcggctcggcttcaccgtcaccgccgacgtcgaggtgcccgaaggaccgcgcacctggtgcatgacccgcaagcccggtgcctga

SEQ ID NO: 8415 - DNA, 2022 bp, Artificial Sequence
  Synthetic Polynucloetide
atggccttaccagtgaccgccttgctcctgccgctggccttgctgctccacgccgccaggccggagatcgtgctgacacagtctcccgccacactgtcactgtctccaggcgaaagagccacactgagctgtagagccagccagagcgtgtcctcttacctggcctggtatcagcagaagcctggacaggctccccggctgctgatctacgatgccagcaatagagccacaggcatccccgccagattttctggctctggcagcggcaccgatttcaccctgaccataagcagcctggaacctgaggacttcgccgtgtactactgccagcagagaagcaactggcccctgacctttggacagggcaccaaggtggaaatcaaaggcggaggcggaagtggaggcggaggatctggcggcggaggctctcaagttcagctggttcagagcggagccgaagtgaagaaacctggcagcagcgtgaaggtgtcctgcaaagcaagcggcggcacctttagcacctacgccatccactgggttcgacaggcaccaggacaaggactggaatggatgggcagaatcatccccatcgagggcagagcctactacgcccagaaattccagggcagagtgaccatcaccgccgacgagtctacaagcaccgcctacatggaactgagcagcctgagaagcgaggataccgctgtgtactattgcgccagaggccggtacagctacagatattggttcgactactggggccagggcaccctggttacagtctcttctctcgaggacctgaagaacgtgttcccacctgaggtggccgtgttcgagcctagcgaggccgagatcagccacacccagaaagccaccctcgtgtgcctggctaccggcttctaccccgaccatgtggaactgtcttggtgggtcaacggcaaagaggtgcacagcggcgtgtctaccgacccccagccactgaaagaacagcccgccctgaacgacagccggtactgcctgagcagcagactgagagtgtccgccaccttctggcagaacccccggaaccacttcagatgccaggtgcagttctacggcctgagcgagaacgacgagtggacccaggacagagccaagcccgtgacccagatcgtgtctgccgaagcctggggcagagccgattgcggctttaccagcgagagctaccagcagggcgtgctgagcgccaccatcctgtacgagatcctgctgggcaaggccaccctgtacgccgtgctggtgtctgccctggtgctgatggctatggtcaagcggaaggacagccggggaagggccaagcgatctggatctggagcaacaaacttctcactactcaaacaagcaggtgacgtggaggagaatcccgggcctactagaggccatatgaccgagtacaagcccacggtgcgcctcgccacccgcgacgacgtccccagggccgtacgcaccctcgccgccgcgttcgccgactaccccgccacgcgccacaccgtcgatccggaccgccacatcgagcgggtcaccgagctgcaagaactcttcctcacgcgcgtcgggctcgacatcggcaaggtgtgggtcgcggacgacggcgccgcggtggcggtctggaccacgccggagagcgtcgaagcgggggcggtgttcgccgagatcggcccgcgcatggccgagttgagcggttcccggctggccgcgcagcaacagatggaaggcctcctggcgccgcaccggcccaaggagcccgcgtggttcctggccaccgtcggcgtctcgcccgaccaccagggcaagggtctgggcagcgccgtcgtgctccccggagtggaggcggccgagcgcgccggggtgcccgccttcctggagacctccgcgccccgcaacctccccttctacgagcggctcggcttcaccgtcaccgccgacgtcgaggtgcccgaaggaccgcgcacctggtgcatgacccgcaagcccggtgcctga

SEQ ID NO: 8416 - DNA, 2172 bp, Artificial Sequence
  Synthetic Polynucloetide
atggccttaccagtgaccgccttgctcctgccgctggccttgctgctccacgccgccaggccggagatcgtgctgacacagtctcccgccacactgtcactgtctccaggcgaaagagccacactgagctgtagagccagccagagcgtgtcctcttacctggcctggtatcagcagaagcctggacaggctccccggctgctgatctacgatgccagcaatagagccacaggcatccccgccagattttctggctctggcagcggcaccgatttcaccctgaccataagcagcctggaacctgaggacttcgccgtgtactactgccagcagagaagcaactggcccctgacctttggacagggcaccaaggtggaaatcaaaggcggaggcggaagtggaggcggaggatctggcggcggaggctctcaagttcagctggttcagagcggagccgaagtgaagaaacctggcagcagcgtgaaggtgtcctgcaaagcaagcggcggcacctttagcacctacgccatccactgggttcgacaggcaccaggacaaggactggaatggatgggcagaatcatccccatcgagggcagagcctactacgcccagaaattccagggcagagtgaccatcaccgccgacgagtctacaagcaccgcctacatggaactgagcagcctgagaagcgaggataccgctgtgtactattgcgccagaggccggtacagctacagatattggttcgactactggggccagggcaccctggttacagtctcttctacgcgtgagcagaaactgatctcggaagaggatctggggagcggcaccccattcccttctctggcccctcccatcatgctgctggtggacggcaagcagcagatggtggtcgtgtgcctggtgctggatgtggccccacctggactggacagccccatctggtttagcgccggcaatggctctgccctggacgcctttacctacggcccaagccctgccaccgatggcacctggacaaatctggcccacctgagcctgcccagcgaggaactggcttcttgggagcctctcgtgtgccacacaggacctggcgctgagggacacagcagatccacccagcctatgcacctgtctggcgaggccagcaccgccagaacctgtcctcaggaacctctgagaggcacccctggcggagcactgtggctgggagtgctgagactgctgctgttcaagctgctgctgtttgacctgctgctgacctgctcctgtctgtgcgatcctgccggccctctgccttctcctgccaccaccacaagactgagagccctgggcagccacagactgcaccctgccacagagacaggcggcagagaggccacaagcagccctagaccccagcccagagacagaagatggggcgataccccccctggcagaaagcctggatctccagtccgcgccaagagaagcggatctggcgtgaagcagaccctgaatttcgacctgctgaagctggctggcgacgtggaatccaacccaggcccttctagatctagaggccatatgaccgagtacaagcccacggtgcgcctcgccacccgcgacgacgtccccagggccgtacgcaccctcgccgccgcgttcgccgactaccccgccacgcgccacaccgtcgatccggaccgccacatcgagcgggtcaccgagctgcaagaactcttcctcacgcgcgtcgggctcgacatcggcaaggtgtgggtcgcggacgacggcgccgcggtggcggtctggaccacgccggagagcgtcgaagcgggggcggtgttcgccgagatcggcccgcgcatggccgagttgagcggttcccggctggccgcgcagcaacagatggaaggcctcctggcgccgcaccggcccaaggagcccgcgtggttcctggccaccgtcggcgtctcgcccgaccaccagggcaagggtctgggcagcgccgtcgtgctccccggagtggaggcggccgagcgcgccggggtgcccgccttcctggagacctccgcgccccgcaacctccccttctacgagcggctcggcttcaccgtcaccgccgacgtcgaggtgcccgaaggaccgcgcacctggtgcatgacccgcaagcccggtgcctga

SEQ ID NO: 8417 - DNA, 1617 bp, Artificial Sequence
  Synthetic Polynucloetide
atggccttaccagtgaccgccttgctcctgccgctggccttgctgctccacgccgccaggccggagatcgtgctgacacagtctcccgccacactgtcactgtctccaggcgaaagagccacactgagctgtagagccagccagagcgtgtcctcttacctggcctggtatcagcagaagcctggacaggctccccggctgctgatctacgatgccagcaatagagccacaggcatccccgccagattttctggctctggcagcggcaccgatttcaccctgaccataagcagcctggaacctgaggacttcgccgtgtactactgccagcagagaagcaactggcccctgacctttggacagggcaccaaggtggaaatcaaactcgaggacctgaagaacgtgttcccacctgaggtggccgtgttcgagcctagcgaggccgagatcagccacacccagaaagccaccctcgtgtgcctggctaccggcttctaccccgaccatgtggaactgtcttggtgggtcaacggcaaagaggtgcacagcggcgtgtctaccgacccccagccactgaaagaacagcccgccctgaacgacagccggtactgcctgagcagcagactgagagtgtccgccaccttctggcagaacccccggaaccacttcagatgccaggtgcagttctacggcctgagcgagaacgacgagtggacccaggacagagccaagcccgtgacccagatcgtgtctgccgaagcctggggcagagccgattgcggctttaccagcgagagctaccagcagggcgtgctgagcgccaccatcctgtacgagatcctgctgggcaaggccaccctgtacgccgtgctggtgtctgccctggtgctgatggctatggtcaagcggaaggacagccggggaagggccaagcgatctggatctggagcaacaaacttctcactactcaaacaagcaggtgacgtggaggagaatcccgggcctactagaggccatatgaccgagtacaagcccacggtgcgcctcgccacccgcgacgacgtccccagggccgtacgcaccctcgccgccgcgttcgccgactaccccgccacgcgccacaccgtcgatccggaccgccacatcgagcgggtcaccgagctgcaagaactcttcctcacgcgcgtcgggctcgacatcggcaaggtgtgggtcgcggacgacggcgccgcggtggcggtctggaccacgccggagagcgtcgaagcgggggcggtgttcgccgagatcggcccgcgcatggccgagttgagcggttcccggctggccgcgcagcaacagatggaaggcctcctggcgccgcaccggcccaaggagcccgcgtggttcctggccaccgtcggcgtctcgcccgaccaccagggcaagggtctgggcagcgccgtcgtgctccccggagtggaggcggccgagcgcgccggggtgcccgccttcctggagacctccgcgccccgcaacctccccttctacgagcggctcggcttcaccgtcaccgccgacgtcgaggtgcccgaaggaccgcgcacctggtgcatgacccgcaagcccggtgcctga

SEQ ID NO: 8418 - DNA, 924 bp, Artificial Sequence
  Synthetic Polynucloetide
atggccttaccagtgaccgccttgctcctgccgctggccttgctgctccacgccgccaggccggagatcgtgctgacacagtctcccgccacactgtcactgtctccaggcgaaagagccacactgagctgtagagccagccagagcgtgtcctcttacctggcctggtatcagcagaagcctggacaggctccccggctgctgatctacgatgccagcaatagagccacaggcatccccgccagattttctggctctggcagcggcaccgatttcaccctgaccataagcagcctggaacctgaggacttcgccgtgtactactgccagcagagaagcaactggcccctgacctttggacagggcaccaaggtggaaatcaaactcgaggacctgaagaacgtgttcccacctgaggtggccgtgttcgagcctagcgaggccgagatcagccacacccagaaagccaccctcgtgtgcctggctaccggcttctaccccgaccatgtggaactgtcttggtgggtcaacggcaaagaggtgcacagcggcgtgtctaccgacccccagccactgaaagaacagcccgccctgaacgacagccggtactgcctgagcagcagactgagagtgtccgccaccttctggcagaacccccggaaccacttcagatgccaggtgcagttctacggcctgagcgagaacgacgagtggacccaggacagagccaagcccgtgacccagatcgtgtctgccgaagcctggggcagagccgattgcggctttaccagcgagagctaccagcagggcgtgctgagcgccaccatcctgtacgagatcctgctgggcaaggccaccctgtacgccgtgctggtgtctgccctggtgctgatggctatggtcaagcggaaggacagccgggga

SEQ ID NO: 8419 - DNA, 1350 bp, Artificial Sequence
  Synthetic Polynucloetide
atggactggatttggcgcatccttttccttgtcggcgctgctaccggcgcgcattccttcgaacaagttcagctggttcagagcggagccgaagtgaagaaacctggcagcagcgtgaaggtgtcctgcaaagcaagcggcggcacctttagcacctacgccatccactgggttcgacaggcaccaggacaaggactggaatggatgggcagaatcatccccatcgagggcagagcctactacgcccagaaattccagggcagagtgaccatcaccgccgacgagtctacaagcaccgcctacatggaactgagcagcctgagaagcgaggataccgctgtgtactattgcgccagaggccggtacagctacagatattggttcgactactggggccagggcaccctggttacagtctcttctacgcgtatccagaaccctgatcctgccgtgtaccagctgcgggatagcaagagcagcgacaagagcgtgtgtctgttcaccgacttcgacagccagaccaacgtgtcccagagcaaggactccgacgtgtacatcaccgataagaccgtgctggacatgcggagcatggacttcaagagcaactccgccgtggcctggtccaacaagtccgatttcgcctgcgccaacgccttcaacaacagcattatccccgaggacacattcttcccaagccccgagagcagctgcgacgtgaagctggtggaaaagagcttcgagacagacaccaacctgaacttccagaacctgagcgtgatcggcttcagaatcctgctgctgaaagtggccggctttaacctgctgatgaccctgcggctgtggtccagccgcgccaagagaagcggatctggcgtgaagcagaccctgaatttcgacctgctgaagctggctggcgacgtggaatccaacccaggcccttctagaggccatatggccaagcctttgtctcaagaagaatccaccctcattgaaagagcaacggctacaatcaacagcatccccatctctgaagactacagcgtcgccagcgcagctctctctagcgacggccgcatcttcactggtgtcaatgtatatcattttactgggggaccttgtgcagaactcgtggtgctgggcactgctgctgctgcggcagctggcaacctgacttgtatcgtcgcgatcggaaatgagaacaggggcatcttgagcccctgcggacggtgccgacaggtgcttctcgatctgcatcctgggatcaaagccatagtgaaggacagtgatggacagccgacggcagttgggattcgtgaattgctgccctctggttatgtgtgggagggctga

SEQ ID NO: 8420 - DNA, 849 bp, Artificial Sequence
  Synthetic Polynucloetide
atggactggatttggcgcatccttttccttgtcggcgctgctaccggcgcgcattccttcgaacaagttcagctggttcagagcggagccgaagtgaagaaacctggcagcagcgtgaaggtgtcctgcaaagcaagcggcggcacctttagcacctacgccatccactgggttcgacaggcaccaggacaaggactggaatggatgggcagaatcatccccatcgagggcagagcctactacgcccagaaattccagggcagagtgaccatcaccgccgacgagtctacaagcaccgcctacatggaactgagcagcctgagaagcgaggataccgctgtgtactattgcgccagaggccggtacagctacagatattggttcgactactggggccagggcaccctggttacagtctcttctacgcgtatccagaaccctgatcctgccgtgtaccagctgcgggatagcaagagcagcgacaagagcgtgtgtctgttcaccgacttcgacagccagaccaacgtgtcccagagcaaggactccgacgtgtacatcaccgataagaccgtgctggacatgcggagcatggacttcaagagcaactccgccgtggcctggtccaacaagtccgatttcgcctgcgccaacgccttcaacaacagcattatccccgaggacacattcttcccaagccccgagagcagctgcgacgtgaagctggtggaaaagagcttcgagacagacaccaacctgaacttccagaacctgagcgtgatcggcttcagaatcctgctgctgaaagtggccggctttaacctgctgatgaccctgcggctgtggtccagc

SEQ ID NO: 8421 - DNA, 1671 bp, Artificial Sequence
  Synthetic Polynucloetide
atggccttaccagtgaccgccttgctcctgccgctggccttgctgctccacgccgccaggccggagatcgtgctgacacagtctcccgccacactgtcactgtctccaggcgaaagagccacactgagctgtagagccagccagagcgtgtcctcttacctggcctggtatcagcagaagcctggacaggctccccggctgctgatctacgatgccagcaatagagccacaggcatccccgccagattttctggctctggcagcggcaccgatttcaccctgaccataagcagcctggaacctgaggacttcgccgtgtactactgccagcagagaagcaactggcccctgacctttggacagggcaccaaggtggaaatcaaactcgaggggaaaccaattcccaaccctcttctgggactggattcaaccggcagcggcgaggacctgaagaacgtgttcccacctgaggtggccgtgttcgagcctagcgaggccgagatcagccacacccagaaagccaccctcgtgtgcctggctaccggcttctaccccgaccatgtggaactgtcttggtgggtcaacggcaaagaggtgcacagcggcgtgtgtaccgacccccagccactgaaagaacagcccgccctgaacgacagccggtactgcctgagcagcagactgagagtgtccgccaccttctggcagaacccccggaaccacttcagatgccaggtgcagttctacggcctgagcgagaacgacgagtggacccaggacagagccaagcccgtgacccagatcgtgtctgccgaagcctggggcagagccgattgcggctttaccagcgagagctaccagcagggcgtgctgagcgccaccatcctgtacgagatcctgctgggcaaggccaccctgtacgccgtgctggtgtctgccctggtgctgatggctatggtcaagcggaaggacagccggggaagggccaagcgatctggatctggagcaacaaacttctcactactcaaacaagcaggtgacgtggaggagaatcccgggcctactagaggccatatgaccgagtacaagcccacggtgcgcctcgccacccgcgacgacgtccccagggccgtacgcaccctcgccgccgcgttcgccgactaccccgccacgcgccacaccgtcgatccggaccgccacatcgagcgggtcaccgagctgcaagaactcttcctcacgcgcgtcgggctcgacatcggcaaggtgtgggtcgcggacgacggcgccgcggtggcggtctggaccacgccggagagcgtcgaagcgggggcggtgttcgccgagatcggcccgcgcatggccgagttgagcggttcccggctggccgcgcagcaacagatggaaggcctcctggcgccgcaccggcccaaggagcccgcgtggttcctggccaccgtcggcgtctcgcccgaccaccagggcaagggtctgggcagcgccgtcgtgctccccggagtggaggcggccgagcgcgccggggtgcccgccttcctggagacctccgcgccccgcaacctccccttctacgagcggctcggcttcaccgtcaccgccgacgtcgaggtgcccgaaggaccgcgcacctggtgcatgacccgcaagcccggtgcctga

SEQ ID NO: 8422 - DNA, 981 bp, Artificial Sequence
  Synthetic Polynucloetide
atggccttaccagtgaccgccttgctcctgccgctggccttgctgctccacgccgccaggccggagatcgtgctgacacagtctcccgccacactgtcactgtctccaggcgaaagagccacactgagctgtagagccagccagagcgtgtcctcttacctggcctggtatcagcagaagcctggacaggctccccggctgctgatctacgatgccagcaatagagccacaggcatccccgccagattttctggctctggcagcggcaccgatttcaccctgaccataagcagcctggaacctgaggacttcgccgtgtactactgccagcagagaagcaactggcccctgacctttggacagggcaccaaggtggaaatcaaactcgaggggaaaccaattcccaaccctcttctgggactggattcaaccggcagcggcgaggacctgaagaacgtgttcccacctgaggtggccgtgttcgagcctagcgaggccgagatcagccacacccagaaagccaccctcgtgtgcctggctaccggcttctaccccgaccatgtggaactgtcttggtgggtcaacggcaaagaggtgcacagcggcgtgtgtaccgacccccagccactgaaagaacagcccgccctgaacgacagccggtactgcctgagcagcagactgagagtgtccgccaccttctggcagaacccccggaaccacttcagatgccaggtgcagttctacggcctgagcgagaacgacgagtggacccaggacagagccaagcccgtgacccagatcgtgtctgccgaagcctggggcagagccgattgcggctttaccagcgagagctaccagcagggcgtgctgagcgccaccatcctgtacgagatcctgctgggcaaggccaccctgtacgccgtgctggtgtctgccctggtgctgatggctatggtcaagcggaaggacagccggggatga

SEQ ID NO: 8423 - DNA, 1386 bp, Artificial Sequence
  Synthetic Polynucloetide
atggactggatttggcgcatccttttccttgtcggcgctgctaccggcgcgcattccttcgaacaagttcagctggttcagagcggagccgaagtgaagaaacctggcagcagcgtgaaggtgtcctgcaaagcaagcggcggcacctttagcacctacgccatccactgggttcgacaggcaccaggacaaggactggaatggatgggcagaatcatccccatcgagggcagagcctactacgcccagaaattccagggcagagtgaccatcaccgccgacgagtctacaagcaccgcctacatggaactgagcagcctgagaagcgaggataccgctgtgtactattgcgccagaggccggtacagctacagatattggttcgactactggggccagggcaccctggttacagtctcttctacgcgtgagcagaaactgatctcggaagaggatgggagcggcatccagaaccctgatcctgccgtgtaccagctgcgggatagcaagagcagcgacaagagcgtgtgtctgttcaccgacttcgacagccagaccaacgtgtcccagagcaaggactccgacgtgtacatcaccgataagtgcgtgctggacatgcggagcatggacttcaagagcaactccgccgtggcctggtccaacaagtccgatttcgcctgcgccaacgccttcaacaacagcattatccccgaggacacattcttcccaagccccgagagcagctgcgacgtgaagctggtggaaaagagcttcgagacagacaccaacctgaacttccagaacctgagcgtgatcggcttcagaatcctgctgctgaaagtggccggctttaacctgctgatgaccctgcggctgtggtccagccgcgccaagagaagcggatctggcgtgaagcagaccctgaatttcgacctgctgaagctggctggcgacgtggaatccaacccaggcccttctagaggccatatggccaagcctttgtctcaagaagaatccaccctcattgaaagagcaacggctacaatcaacagcatccccatctctgaagactacagcgtcgccagcgcagctctctctagcgacggccgcatcttcactggtgtcaatgtatatcattttactgggggaccttgtgcagaactcgtggtgctgggcactgctgctgctgcggcagctggcaacctgacttgtatcgtcgcgatcggaaatgagaacaggggcatcttgagcccctgcggacggtgccgacaggtgcttctcgatctgcatcctgggatcaaagccatagtgaaggacagtgatggacagccgacggcagttgggattcgtgaattgctgccctctggttatgtgtgggagggctga

SEQ ID NO: 8424 - DNA, 888 bp, Artificial Sequence
  Synthetic Polynucloetide
atggactggatttggcgcatccttttccttgtcggcgctgctaccggcgcgcattccttcgaacaagttcagctggttcagagcggagccgaagtgaagaaacctggcagcagcgtgaaggtgtcctgcaaagcaagcggcggcacctttagcacctacgccatccactgggttcgacaggcaccaggacaaggactggaatggatgggcagaatcatccccatcgagggcagagcctactacgcccagaaattccagggcagagtgaccatcaccgccgacgagtctacaagcaccgcctacatggaactgagcagcctgagaagcgaggataccgctgtgtactattgcgccagaggccggtacagctacagatattggttcgactactggggccagggcaccctggttacagtctcttctacgcgtgagcagaaactgatctcggaagaggatgggagcggcatccagaaccctgatcctgccgtgtaccagctgcgggatagcaagagcagcgacaagagcgtgtgtctgttcaccgacttcgacagccagaccaacgtgtcccagagcaaggactccgacgtgtacatcaccgataagtgcgtgctggacatgcggagcatggacttcaagagcaactccgccgtggcctggtccaacaagtccgatttcgcctgcgccaacgccttcaacaacagcattatccccgaggacacattcttcccaagccccgagagcagctgcgacgtgaagctggtggaaaagagcttcgagacagacaccaacctgaacttccagaacctgagcgtgatcggcttcagaatcctgctgctgaaagtggccggctttaacctgctgatgaccctgcggctgtggtccagctga

SEQ ID NO: 8425 - DNA, 1926 bp, Artificial Sequence
  Synthetic Polynucloetide
atggccttaccagtgaccgccttgctcctgccgctggccttgctgctccacgccgccaggccggagatcgtgctgacacagtctcccgccacactgtcactgtctccaggcgaaagagccacactgagctgtagagccagccagagcgtgtcctcttacctggcctggtatcagcagaagcctggacaggctccccggctgctgatctacgatgccagcaatagagccacaggcatccccgccagattttctggctctggcagcggcaccgatttcaccctgaccataagcagcctggaacctgaggacttcgccgtgtactactgccagcagagaagcaactggcccctgacctttggacagggcaccaaggtggaaatcaaaggcggaggcggaagtggaggcggaggatctggcggcggaggctctcaagttcagctggttcagagcggagccgaagtgaagaaacctggcagcagcgtgaaggtgtcctgcaaagcaagcggcggcacctttagcacctacgccatccactgggttcgacaggcaccaggacaaggactggaatggatgggcagaatcatccccatcgagggcagagcctactacgcccagaaattccagggcagagtgaccatcaccgccgacgagtctacaagcaccgcctacatggaactgagcagcctgagaagcgaggataccgctgtgtactattgcgccagaggccggtacagctacagatattggttcgactactggggccagggcaccctggttacagtctcttctacgcgtgggagcggcatccagaaccctgatcctgccgtgtaccagctgcgggatagcaagagcagcgacaagagcgtgtgtctgttcaccgacttcgacagccagaccaacgtgtcccagagcaaggactccgacgtgtacatcaccgataagaccgtgctggacatgcggagcatggacttcaagagcaactccgccgtggcctggtccaacaagtccgatttcgcctgcgccaacgccttcaacaacagcattatccccgaggacacattcttcccaagcagcgacgtgccctgcgacgtgaagctggtggaaaagagcttcgagacagacaccaacctgaacttccagaacctgagcgtgatcggcttcagaatcctgctgctgaaagtggccggctttaacctgctgatgaccctgcggctgtggtccagccgcgccaagagaagcggatctggcgtgaagcagaccctgaatttcgacctgctgaagctggctggcgacgtggaatccaacccaggcccttctagaggccatatgaccgagtacaagcccacggtgcgcctcgccacccgcgacgacgtccccagggccgtacgcaccctcgccgccgcgttcgccgactaccccgccacgcgccacaccgtcgatccggaccgccacatcgagcgggtcaccgagctgcaagaactcttcctcacgcgcgtcgggctcgacatcggcaaggtgtgggtcgcggacgacggcgccgcggtggcggtctggaccacgccggagagcgtcgaagcgggggcggtgttcgccgagatcggcccgcgcatggccgagttgagcggttcccggctggccgcgcagcaacagatggaaggcctcctggcgccgcaccggcccaaggagcccgcgtggttcctggccaccgtcggcgtctcgcccgaccaccagggcaagggtctgggcagcgccgtcgtgctccccggagtggaggcggccgagcgcgccggggtgcccgccttcctggagacctccgcgccccgcaacctccccttctacgagcggctcggcttcaccgtcaccgccgacgtcgaggtgcccgaaggaccgcgcacctggtgcatgacccgcaagcccggtgcctga

SEQ ID NO: 8426 - DNA, 2022 bp, Artificial Sequence
  Synthetic Polynucloetide
atggccttaccagtgaccgccttgctcctgccgctggccttgctgctccacgccgccaggccggagatcgtgctgacacagtctcccgccacactgtcactgtctccaggcgaaagagccacactgagctgtagagccagccagagcgtgtcctcttacctggcctggtatcagcagaagcctggacaggctccccggctgctgatctacgatgccagcaatagagccacaggcatccccgccagattttctggctctggcagcggcaccgatttcaccctgaccataagcagcctggaacctgaggacttcgccgtgtactactgccagcagagaagcaactggcccctgacctttggacagggcaccaaggtggaaatcaaaggcggaggcggaagtggaggcggaggatctggcggcggaggctctcaagttcagctggttcagagcggagccgaagtgaagaaacctggcagcagcgtgaaggtgtcctgcaaagcaagcggcggcacctttagcacctacgccatccactgggttcgacaggcaccaggacaaggactggaatggatgggcagaatcatccccatcgagggcagagcctactacgcccagaaattccagggcagagtgaccatcaccgccgacgagtctacaagcaccgcctacatggaactgagcagcctgagaagcgaggataccgctgtgtactattgcgccagaggccggtacagctacagatattggttcgactactggggccagggcaccctggttacagtctcttctctcgaggacctgaagaacgtgttcccacctgaggtggccgtgttcgagcctagcaaggccgagatcgcccacacccagaaagccaccctcgtgtgcctggctaccggcttctaccccgaccatgtggaactgtcttggtgggtcaacggcaaagaggtgcacagcggcgtgtctaccgacccccagccactgaaagaacagcccgccctgaacgacagccggtactgcctgagcagcagactgagagtgtccgccaccttctggcagaacccccggaaccacttcagatgccaggtgcagttctacggcctgagcgagaacgacgagtggacccaggacagagccaagcccgtgacccagatcgtgtctgccgaagcctggggcagagccgattgcggcatcaccagcgccagctaccaccagggcgtgctgagcgccaccatcctgtacgagatcctgctgggcaaggccaccctgtacgccgtgctggtgtctgccctggtgctgatggctatggtcaagcggaaggacagccggggaagggccaagcgatctggatctggagcaacaaacttctcactactcaaacaagcaggtgacgtggaggagaatcccgggcctactagaggccatatgaccgagtacaagcccacggtgcgcctcgccacccgcgacgacgtccccagggccgtacgcaccctcgccgccgcgttcgccgactaccccgccacgcgccacaccgtcgatccggaccgccacatcgagcgggtcaccgagctgcaagaactcttcctcacgcgcgtcgggctcgacatcggcaaggtgtgggtcgcggacgacggcgccgcggtggcggtctggaccacgccggagagcgtcgaagcgggggcggtgttcgccgagatcggcccgcgcatggccgagttgagcggttcccggctggccgcgcagcaacagatggaaggcctcctggcgccgcaccggcccaaggagcccgcgtggttcctggccaccgtcggcgtctcgcccgaccaccagggcaagggtctgggcagcgccgtcgtgctccccggagtggaggcggccgagcgcgccggggtgcccgccttcctggagacctccgcgccccgcaacctccccttctacgagcggctcggcttcaccgtcaccgccgacgtcgaggtgcccgaaggaccgcgcacctggtgcatgacccgcaagcccggtgcctga

SEQ ID NO: 8427 - DNA, 2091 bp, Artificial Sequence
  Synthetic Polynucloetide
atggccttaccagtgaccgccttgctcctgccgctggccttgctgctccacgccgccaggccggagatcgtgctgacacagtctcccgccacactgtcactgtctccaggcgaaagagccacactgagctgtagagccagccagagcgtgtcctcttacctggcctggtatcagcagaagcctggacaggctccccggctgctgatctacgatgccagcaatagagccacaggcatccccgccagattttctggctctggcagcggcaccgatttcaccctgaccataagcagcctggaacctgaggacttcgccgtgtactactgccagcagagaagcaactggcccctgacctttggacagggcaccaaggtggaaatcaaaggcggaggcggaagtggaggcggaggatctggcggcggaggctctcaagttcagctggttcagagcggagccgaagtgaagaaacctggcagcagcgtgaaggtgtcctgcaaagcaagcggcggcacctttagcacctacgccatccactgggttcgacaggcaccaggacaaggactggaatggatgggcagaatcatccccatcgagggcagagcctactacgcccagaaattccagggcagagtgaccatcaccgccgacgagtctacaagcaccgcctacatggaactgagcagcctgagaagcgaggataccgctgtgtactattgcgccagaggccggtacagctacagatattggttcgactactggggccagggcaccctggttacagtctcttctacgcgtgggtctggaggcggaggcagcggcggaggcgggagcggcgacggtaacgaggagatgggaggaatcactcaaaccccttacaaagtctcaatttcaggaacaactgttatccttacatgtccccagtatcctggcagcgagatcctttggcagcataacgacaagaatatagggggagatgaagacgataagaatatcggatctgacgaggatcacttgagcctgaaagagttctccgagcttgaacaaagcggatattatgtgtgctatccgcgcgggtcaaagccggaagacgctaacttttacctttatctccgagccagagtgtgcgaaaattgcatggaaatggacgttatgtccgttgctacaatagttatcgtagatatatgcatcacgggtggactgcttctgctggtttattattggtccaagaatagaaaggccaaagctaaacccgtgaccagaggcgctggcgcaggcggaaggcaaaggggacaaaacaaagaacggccaccaccagtgccaaatccagattatgagcctattcggaaaggacagagggacctgtactctggcctgaatcagagaagaatccgcgccaagagaagcggatctggcgtgaagcagaccctgaatttcgacctgctgaagctggctggcgacgtggaatccaacccaggcccttctagaggccatatgaccgagtacaagcccacggtgcgcctcgccacccgcgacgacgtccccagggccgtacgcaccctcgccgccgcgttcgccgactaccccgccacgcgccacaccgtcgatccggaccgccacatcgagcgggtcaccgagctgcaagaactcttcctcacgcgcgtcgggctcgacatcggcaaggtgtgggtcgcggacgacggcgccgcggtggcggtctggaccacgccggagagcgtcgaagcgggggcggtgttcgccgagatcggcccgcgcatggccgagttgagcggttcccggctggccgcgcagcaacagatggaaggcctcctggcgccgcaccggcccaaggagcccgcgtggttcctggccaccgtcggcgtctcgcccgaccaccagggcaagggtctgggcagcgccgtcgtgctccccggagtggaggcggccgagcgcgccggggtgcccgccttcctggagacctccgcgccccgcaacctccccttctacgagcggctcggcttcaccgtcaccgccgacgtcgaggtgcccgaaggaccgcgcacctggtgcatgacccgcaagcccggtgcctga

SEQ ID NO: 8428 - DNA, 1986 bp, Artificial Sequence
  Synthetic Polynucloetide
atggccttaccagtgaccgccttgctcctgccgctggccttgctgctccacgccgccaggccggagatcgtgctgacacagtctcccgccacactgtcactgtctccaggcgaaagagccacactgagctgtagagccagccagagcgtgtcctcttacctggcctggtatcagcagaagcctggacaggctccccggctgctgatctacgatgccagcaatagagccacaggcatccccgccagattttctggctctggcagcggcaccgatttcaccctgaccataagcagcctggaacctgaggacttcgccgtgtactactgccagcagagaagcaactggcccctgacctttggacagggcaccaaggtggaaatcaaaggcggaggcggaagtggaggcggaggatctggcggcggaggctctcaagttcagctggttcagagcggagccgaagtgaagaaacctggcagcagcgtgaaggtgtcctgcaaagcaagcggcggcacctttagcacctacgccatccactgggttcgacaggcaccaggacaaggactggaatggatgggcagaatcatccccatcgagggcagagcctactacgcccagaaattccagggcagagtgaccatcaccgccgacgagtctacaagcaccgcctacatggaactgagcagcctgagaagcgaggataccgctgtgtactattgcgccagaggccggtacagctacagatattggttcgactactggggccagggcaccctggttacagtctcttctacgcgtgggtctggaggcggaggcagcggcggaggcgggagcggcttcaagatccccatcgaggaactggaagatcgggtgttcgtgaactgcaacacctctatcacctgggtggaaggcaccgtgggaacactgctgagcgacatcaccagactggacctcggcaagcggattctggaccctcggggcatctacagatgcaacggcaccgacatctacaaggacaaagaaagcaccgtgcaggtccactacagaatgtgccagtcctgcgtggaactggaccctgctacagtggccggcatcatcgtgaccgatgtgatcgctactctgctgctggctctgggagtgttctgcttcgccggacacgaaacaggcagactgtctggcgctgccgatacacaggccctgctgagaaacgaccaagtgtatcagcccctgcgcgacagagatgatgcccagtattctcacctcggcggcaactgggctagaaacaagcgcgccaagagaagcggatctggcgtgaagcagaccctgaatttcgacctgctgaagctggctggcgacgtggaatccaacccaggcccttctagaggccatatgaccgagtacaagcccacggtgcgcctcgccacccgcgacgacgtccccagggccgtacgcaccctcgccgccgcgttcgccgactaccccgccacgcgccacaccgtcgatccggaccgccacatcgagcgggtcaccgagctgcaagaactcttcctcacgcgcgtcgggctcgacatcggcaaggtgtgggtcgcggacgacggcgccgcggtggcggtctggaccacgccggagagcgtcgaagcgggggcggtgttcgccgagatcggcccgcgcatggccgagttgagcggttcccggctggccgcgcagcaacagatggaaggcctcctggcgccgcaccggcccaaggagcccgcgtggttcctggccaccgtcggcgtctcgcccgaccaccagggcaagggtctgggcagcgccgtcgtgctccccggagtggaggcggccgagcgcgccggggtgcccgccttcctggagacctccgcgccccgcaacctccccttctacgagcggctcggcttcaccgtcaccgccgacgtcgaggtgcccgaaggaccgcgcacctggtgcatgacccgcaagcccggtgcctga

SEQ ID NO: 8429 - DNA, 2016 bp, Artificial Sequence
  Synthetic Polynucloetide
atggccttaccagtgaccgccttgctcctgccgctggccttgctgctccacgccgccaggccggagatcgtgctgacacagtctcccgccacactgtcactgtctccaggcgaaagagccacactgagctgtagagccagccagagcgtgtcctcttacctggcctggtatcagcagaagcctggacaggctccccggctgctgatctacgatgccagcaatagagccacaggcatccccgccagattttctggctctggcagcggcaccgatttcaccctgaccataagcagcctggaacctgaggacttcgccgtgtactactgccagcagagaagcaactggcccctgacctttggacagggcaccaaggtggaaatcaaaggcggaggcggaagtggaggcggaggatctggcggcggaggctctcaagttcagctggttcagagcggagccgaagtgaagaaacctggcagcagcgtgaaggtgtcctgcaaagcaagcggcggcacctttagcacctacgccatccactgggttcgacaggcaccaggacaaggactggaatggatgggcagaatcatccccatcgagggcagagcctactacgcccagaaattccagggcagagtgaccatcaccgccgacgagtctacaagcaccgcctacatggaactgagcagcctgagaagcgaggataccgctgtgtactattgcgccagaggccggtacagctacagatattggttcgactactggggccagggcaccctggttacagtctcttctacgcgtgggtctggaggcggaggcagcggcggaggcgggagcggccagagcatcaagggcaaccacctggtcaaggtgtacgactaccaagaggacggcagcgtgctgctgacatgtgatgccgaggccaagaacatcacctggtttaaggacggcaagatgatcggcttcctgaccgaggacaagaagaagtggaacctgggcagcaacgctaaggaccccagaggcatgtatcagtgcaagggcagccagaacaagagcaagcccctccaggtgtactaccggatgtgccagaactgcatcgagctgaacgccgctaccatcagcggctttctgttcgccgagatcgtgtccatcttcgtgctggccgtgggcgtgtactttatcgctggacaggatggcgtgcggcagagcagagcttccgataagcaaaccctgctgcctaacgaccagctgtaccagcctctgaaggacagagaggacgaccagtacagccacctccagggcaatcagctgagaagaaaccgcgccaagagaagcggatctggcgtgaagcagaccctgaatttcgacctgctgaagctggctggcgacgtggaatccaacccaggcccttctagaggccatatgaccgagtacaagcccacggtgcgcctcgccacccgcgacgacgtccccagggccgtacgcaccctcgccgccgcgttcgccgactaccccgccacgcgccacaccgtcgatccggaccgccacatcgagcgggtcaccgagctgcaagaactcttcctcacgcgcgtcgggctcgacatcggcaaggtgtgggtcgcggacgacggcgccgcggtggcggtctggaccacgccggagagcgtcgaagcgggggcggtgttcgccgagatcggcccgcgcatggccgagttgagcggttcccggctggccgcgcagcaacagatggaaggcctcctggcgccgcaccggcccaaggagcccgcgtggttcctggccaccgtcggcgtctcgcccgaccaccagggcaagggtctgggcagcgccgtcgtgctccccggagtggaggcggccgagcgcgccggggtgcccgccttcctggagacctccgcgccccgcaacctccccttctacgagcggctcggcttcaccgtcaccgccgacgtcgaggtgcccgaaggaccgcgcacctggtgcatgacccgcaagcccggtgcctga

SEQ ID NO: 8430 - DNA, 1965 bp, Artificial Sequence
  Synthetic Polynucloetide
atggccttaccagtgaccgccttgctcctgccgctggccttgctgctccacgccgccaggccggagatcgtgctgacacagtctcccgccacactgtcactgtctccaggcgaaagagccacactgagctgtagagccagccagagcgtgtcctcttacctggcctggtatcagcagaagcctggacaggctccccggctgctgatctacgatgccagcaatagagccacaggcatccccgccagattttctggctctggcagcggcaccgatttcaccctgaccataagcagcctggaacctgaggacttcgccgtgtactactgccagcagagaagcaactggcccctgacctttggacagggcaccaaggtggaaatcaaaggcggaggcggaagtggaggcggaggatctggcggcggaggctctcaagttcagctggttcagagcggagccgaagtgaagaaacctggcagcagcgtgaaggtgtcctgcaaagcaagcggcggcacctttagcacctacgccatccactgggttcgacaggcaccaggacaaggactggaatggatgggcagaatcatccccatcgagggcagagcctactacgcccagaaattccagggcagagtgaccatcaccgccgacgagtctacaagcaccgcctacatggaactgagcagcctgagaagcgaggataccgctgtgtactattgcgccagaggccggtacagctacagatattggttcgactactggggccagggcaccctggttacagtctcttctacgcgtgggtctggaggcggaggcagcggcggaggcgggagcggccagagttttgggttgttggaccctaaattgtgctatctgttggacggaatcctgttcatttacggagtgatcctgaccgcattgttcctgcgggttaagttttccagatccgcagacgcacccgcttaccaacaagggcagaaccaactctacaatgaacttaatttggggcggagggaagagtacgacgttctggacaaaaggaggggacgagatcccgagatgggcggaaagcctcagcgaaggaagaatccgcaagaggggctttataacgaactccagaaagataaaatggcagaagcctatagtgagattgggatgaagggagaaaggaggaggggtaaaggtcacgatgggttgtaccaaggattgagcacagccactaaagatacctatgatgcgctccacatgcaggccctgccgccaagacgcgccaagagaagcggatctggcgtgaagcagaccctgaatttcgacctgctgaagctggctggcgacgtggaatccaacccaggcccttctagaggccatatgaccgagtacaagcccacggtgcgcctcgccacccgcgacgacgtccccagggccgtacgcaccctcgccgccgcgttcgccgactaccccgccacgcgccacaccgtcgatccggaccgccacatcgagcgggtcaccgagctgcaagaactcttcctcacgcgcgtcgggctcgacatcggcaaggtgtgggtcgcggacgacggcgccgcggtggcggtctggaccacgccggagagcgtcgaagcgggggcggtgttcgccgagatcggcccgcgcatggccgagttgagcggttcccggctggccgcgcagcaacagatggaaggcctcctggcgccgcaccggcccaaggagcccgcgtggttcctggccaccgtcggcgtctcgcccgaccaccagggcaagggtctgggcagcgccgtcgtgctccccggagtggaggcggccgagcgcgccggggtgcccgccttcctggagacctccgcgccccgcaacctccccttctacgagcggctcggcttcaccgtcaccgccgacgtcgaggtgcccgaaggaccgcgcacctggtgcatgacccgcaagcccggtgcctga

SEQ ID NO: 8431 - DNA, 2265 bp, Artificial Sequence
  Synthetic Polynucloetide
atggccttaccagtgaccgccttgctcctgccgctggccttgctgctccacgccgccaggccggaagtgcagctggttgaatctggcggaggactggttcagcctggcggatctctgagactgtcttgtgccgccagcggcttcagcttcagcgacttttggatgagctgggtccgacaggcccctggcaaaggacttgaatgggtcgccacaatcagccaggccggcagcgagaaggactacgtggactctgtgaagggcagattcaccatcagccgggacaacgccaagaagtccctgtacctccagatgaacagcctgagagccgaggacaccgccgtgtactattgtgcctctggcgtgtacagcttcgactacagaggccagggcaccctggtcacagtctcttctggtaccggcggaggcggatctggcggcggaggtagcggtggcggaggatctgaattcgagatcgtgctgacacagtctcccgccacactgtcactgtctccaggcgaaagagccacactgagctgtagagccagccagagcgtgtcctcttacctggcctggtatcagcagaagcctggacaggctccccggctgctgatctacgatgccagcaatagagccacaggcatccccgccagattttctggctctggcagcggcaccgatttcaccctgaccataagcagcctggaacctgaggacttcgccgtgtactactgccagcagagaagcaactggcccctgacctttggacagggcaccaaggtggaaatcaaactcgaggacctgaagaacgtgttcccacctgaggtggccgtgttcgagcctagcgaggccgagatcagccacacccagaaagccaccctcgtgtgcctggctaccggcttctaccccgaccatgtggaactgtcttggtgggtcaacggcaaagaggtgcacagcggcgtgtgtaccgacccccagccactgaaagaacagcccgccctgaacgacagccggtactgcctgagcagcagactgagagtgtccgccaccttctggcagaacccccggaaccacttcagatgccaggtgcagttctacggcctgagcgagaacgacgagtggacccaggacagagccaagcccgtgacccagatcgtgtctgccgaagcctggggcagagccgattgcggctttaccagcgagagctaccagcagggcgtgctgagcgccaccatcctgtacgagatcctgctgggcaaggccaccctgtacgccgtgctggtgtctgccctggtgctgatggctatggtcaagcggaaggacagccggggaagggccaagcgatctggatctggagcaacaaacttctcactactcaaacaagcaggtgacgtggaggagaatcccgggcctactagtatggactggatttggcgcatccttttccttgtcggcgctgctaccggcgcgcattccttcgaacaagttcagctggttcagagcggagccgaagtgaagaaacctggcagcagcgtgaaggtgtcctgcaaagcaagcggcggcacctttagcacctacgccatccactgggttcgacaggcaccaggacaaggactggaatggatgggcagaatcatccccatcgagggcagagcctactacgcccagaaattccagggcagagtgaccatcaccgccgacgagtctacaagcaccgcctacatggaactgagcagcctgagaagcgaggataccgctgtgtactattgcgccagaggccggtacagctacagatattggttcgactactggggccagggcaccctggttacagtctcttctacgcgtatccagaaccctgatcctgccgtgtaccagctgcgggatagcaagagcagcgacaagagcgtgtgtctgttcaccgacttcgacagccagaccaacgtgtcccagagcaaggactccgacgtgtacatcaccgataagtgcgtgctggacatgcggagcatggacttcaagagcaactccgccgtggcctggtccaacaagtccgatttcgcctgcgccaacgccttcaacaacagcattatccccgaggacacattcttcccaagccccgagagcagctgcgacgtgaagctggtggaaaagagcttcgagacagacaccaacctgaacttccagaacctgagcgtgatcggcttcagaatcctgctgctgaaagtggccggctttaacctgctgatgaccctgcggctgtggtccagc

SEQ ID NO: 8432 - DNA, 2277 bp, Artificial Sequence
  Synthetic Polynucloetide
atggccttaccagtgaccgccttgctcctgccgctggccttgctgctccacgccgccaggccggaagtgcagctggttgaatctggcggaggactggttcagcctggcggatctctgagactgtcttgtgccgccagcggcttcagcttcagcgacttttggatgagctgggtccgacaggcccctggcaaaggacttgaatgggtcgccacaatcagccaggccggcagcgagaaggactacgtggactctgtgaagggcagattcaccatcagccgggacaacgccaagaagtccctgtacctccagatgaacagcctgagagccgaggacaccgccgtgtactattgtgcctctggcgtgtacagcttcgactacagaggccagggcaccctggtcacagtctcttctggtaccggcggaggcggatctggcggcggaggtagcggtggcggaggatctgaattcgagatcgtgctgacacagtctcccgccacactgtcactgtctccaggcgaaagagccacactgagctgtagagccagccagagcgtgtcctcttacctggcctggtatcagcagaagcctggacaggctccccggctgctgatctacgatgccagcaatagagccacaggcatccccgccagattttctggctctggcagcggcaccgatttcaccctgaccataagcagcctggaacctgaggacttcgccgtgtactactgccagcagagaagcaactggcccctgacctttggacagggcaccaaggtggaaatcaaactcgagatccagaaccctgatcctgccgtgtaccagctgcgggatagcaagagcagcgacaagagcgtgtgtctgttcaccgacttcgacagccagaccaacgtgtcccagagcaaggactccgacgtgtacatcaccgataagtgcgtgctggacatgcggagcatggacttcaagagcaactccgccgtggcctggtccaacaagtccgatttcgcctgcgccaacgccttcaacaacagcattatccccgaggacacattcttcccaagccccgagagcagctgcgacgtgaagctggtggaaaagagcttcgagacagacaccaacctgaacttccagaacctgagcgtgatcggcttcagaatcctgctgctgaaagtggccggctttaacctgctgatgaccctgcggctgtggtccagccgcgccaagagaagcggatctggcgtgaagcagaccctgaatttcgacctgctgaagctggctggcgacgtggaatccaacccaggccctactagtatggactggatttggcgcatccttttccttgtcggcgctgctaccggcgcgcattccttcgaacaagttcagctggttcagagcggagccgaagtgaagaaacctggcagcagcgtgaaggtgtcctgcaaagcaagcggcggcacctttagcacctacgccatccactgggttcgacaggcaccaggacaaggactggaatggatgggcagaatcatccccatcgagggcagagcctactacgcccagaaattccagggcagagtgaccatcaccgccgacgagtctacaagcaccgcctacatggaactgagcagcctgagaagcgaggataccgctgtgtactattgcgccagaggccggtacagctacagatattggttcgactactggggccagggcaccctggttacagtctcttctacgcgtgaggacctgaagaacgtgttcccacctgaggtggccgtgttcgagcctagcgaggccgagatcagccacacccagaaagccaccctcgtgtgcctggctaccggcttctaccccgaccatgtggaactgtcttggtgggtcaacggcaaagaggtgcacagcggcgtgtgtaccgacccccagccactgaaagaacagcccgccctgaacgacagccggtactgcctgagcagcagactgagagtgtccgccaccttctggcagaacccccggaaccacttcagatgccaggtgcagttctacggcctgagcgagaacgacgagtggacccaggacagagccaagcccgtgacccagatcgtgtctgccgaagcctggggcagagccgattgcggctttaccagcgagagctaccagcagggcgtgctgagcgccaccatcctgtacgagatcctgctgggcaaggccaccctgtacgccgtgctggtgtctgccctggtgctgatggctatggtcaagcggaaggacagccgggga

SEQ ID NO: 8433 - DNA, 2853 bp, Artificial Sequence
  Synthetic Polynucloetide
atggccttaccagtgaccgccttgctcctgccgctggccttgctgctccacgccgccaggccggaagtgcagctggttgaatctggcggaggactggttcagcctggcggatctctgagactgtcttgtgccgccagcggcttcagcttcagcgacttttggatgagctgggtccgacaggcccctggcaaaggacttgaatgggtcgccacaatcagccaggccggcagcgagaaggactacgtggactctgtgaagggcagattcaccatcagccgggacaacgccaagaagtccctgtacctccagatgaacagcctgagagccgaggacaccgccgtgtactattgtgcctctggcgtgtacagcttcgactacagaggccagggcaccctggtcacagtctcttctggtaccggcggaggcggatctggcggcggaggtagcggtggcggaggatctgaattcgagatcgtgctgacacagtctcccgccacactgtcactgtctccaggcgaaagagccacactgagctgtagagccagccagagcgtgtcctcttacctggcctggtatcagcagaagcctggacaggctccccggctgctgatctacgatgccagcaatagagccacaggcatccccgccagattttctggctctggcagcggcaccgatttcaccctgaccataagcagcctggaacctgaggacttcgccgtgtactactgccagcagagaagcaactggcccctgacctttggacagggcaccaaggtggaaatcaaactcgaggacctgaagaacgtgttcccacctgaggtggccgtgttcgagcctagcgaggccgagatcagccacacccagaaagccaccctcgtgtgcctggctaccggcttctaccccgaccatgtggaactgtcttggtgggtcaacggcaaagaggtgcacagcggcgtgtctaccgacccccagccactgaaagaacagcccgccctgaacgacagccggtactgcctgagcagcagactgagagtgtccgccaccttctggcagaacccccggaaccacttcagatgccaggtgcagttctacggcctgagcgagaacgacgagtggacccaggacagagccaagcccgtgacccagatcgtgtctgccgaagcctggggcagagccgattgcggatcccagagcttcggcctgctggaccccaagctgtgctacctgctggatggcatcctgttcatctacggcgtgatcctgaccgccctgttcctgagagtgaagttcagcagaagcgccgacgcccctgcctaccagcagggacagaaccaactgtacaacgagctgaacctgggcagacgggaagagtacgacgtgctggacaagcggagaggcagggaccctgagatgggcggaaagccccagcggagaaagaacccccaggaaggactgtataacgaactccagaaagacaagatggccgaagcctacagcgagatcggcatgaagggcgagcggagaagaggcaagggccacgatggcctgtaccagggcctgagcaccgccaccaaggacacctatgacgccctgcacatgcaggccctgcctccaagaagggccaagcgatctggatctggagcaacaaacttctcactactcaaacaagcaggtgacgtggaggagaatcccgggcctactagtatggactggatttggcgcatccttttccttgtcggcgctgctaccggcgcgcattccttcgaacaagttcagctggttcagagcggagccgaagtgaagaaacctggcagcagcgtgaaggtgtcctgcaaagcaagcggcggcacctttagcacctacgccatccactgggttcgacaggcaccaggacaaggactggaatggatgggcagaatcatccccatcgagggcagagcctactacgcccagaaattccagggcagagtgaccatcaccgccgacgagtctacaagcaccgcctacatggaactgagcagcctgagaagcgaggataccgctgtgtactattgcgccagaggccggtacagctacagatattggttcgactactggggccagggcaccctggttacagtctcttctacgcgtatccagaaccctgatcctgccgtgtaccagctgcgggatagcaagagcagcgacaagagcgtgtgtctgttcaccgacttcgacagccagaccaacgtgtcccagagcaaggactccgacgtgtacatcaccgataagaccgtgctggacatgcggagcatggacttcaagagcaactccgccgtggcctggtccaacaagtccgatttcgcctgcgccaacgccttcaacaacagcattatccccgaggacacattcttcccaagccccgagagcagctgcggtacccagagttttgggttgttggaccctaaattgtgctatctgttggacggaatcctgttcatttacggagtgatcctgaccgcattgttcctgcgggttaagttttccagatccgcagacgcacccgcttaccaacaagggcagaaccaactctacaatgaacttaatttggggcggagggaagagtacgacgttctggacaaaaggaggggacgagatcccgagatgggcggaaagcctcagcgaaggaagaatccgcaagaggggctttataacgaactccagaaagataaaatggcagaagcctatagtgagattgggatgaagggagaaaggaggaggggtaaaggtcacgatgggttgtaccaaggattgagcacagccactaaagatacctatgatgcgctccacatgcaggccctgccgccaaga

SEQ ID NO: 8434 - DNA, 2343 bp, Artificial Sequence
  Synthetic Polynucloetide
atggccttaccagtgaccgccttgctcctgccgctggccttgctgctccacgccgccaggccggaagtgcagctggttgaatctggcggaggactggttcagcctggcggatctctgagactgtcttgtgccgccagcggcttcagcttcagcgacttttggatgagctgggtccgacaggcccctggcaaaggacttgaatgggtcgccacaatcagccaggccggcagcgagaaggactacgtggactctgtgaagggcagattcaccatcagccgggacaacgccaagaagtccctgtacctccagatgaacagcctgagagccgaggacaccgccgtgtactattgtgcctctggcgtgtacagcttcgactacagaggccagggcaccctggtcacagtctcttctggtaccggcggaggcggatctggcggcggaggtagcggtggcggaggatctgaattcgagatcgtgctgacacagtctcccgccacactgtcactgtctccaggcgaaagagccacactgagctgtagagccagccagagcgtgtcctcttacctggcctggtatcagcagaagcctggacaggctccccggctgctgatctacgatgccagcaatagagccacaggcatccccgccagattttctggctctggcagcggcaccgatttcaccctgaccataagcagcctggaacctgaggacttcgccgtgtactactgccagcagagaagcaactggcccctgacctttggacagggcaccaaggtggaaatcaaactcgagggacagcctaaggccaatcctaccgtgacactgttccctccaagcagcgaagaactccaggccaacaaggccacacttgtgtgcctgatctccgacttctaccctggggctgtgacagtggcttggaaggccgatggatctcctgtgaaagccggcgtggaaaccaccaagccatccaagcagagcaacaacaaatacgccgccagctcctacctgagcctgacacctgagcagtggaagtcccacagatcctacagctgccaagtgacccacgaaggcagcaccgtggaaaagacagtggcccctacagagtgcagccccatcaagaccgatgtgattacaatggaccccaaggacaactgctccaaggacgccaacgataccctgctgctccagctgaccaacaccagcgcctactacatgtacttgttgctgctgctgaagtccgtggtgtacttcgccatcatcacatgctgcctgctgcggagaaccgccttctgctgcaacggcgagaagtctagggccaagcgatctggatctggagcaacaaacttctcactactcaaacaagcaggtgacgtggaggagaatcccgggcctactagtatggactggatttggcgcatccttttccttgtcggcgctgctaccggcgcgcattccttcgaacaagttcagctggttcagagcggagccgaagtgaagaaacctggcagcagcgtgaaggtgtcctgcaaagcaagcggcggcacctttagcacctacgccatccactgggttcgacaggcaccaggacaaggactggaatggatgggcagaatcatccccatcgagggcagagcctactacgcccagaaattccagggcagagtgaccatcaccgccgacgagtctacaagcaccgcctacatggaactgagcagcctgagaagcgaggataccgctgtgtactattgcgccagaggccggtacagctacagatattggttcgactactggggccagggcaccctggttacagtctcttctacgcgtgcctctacaaagggaccctccgtgtttcctctggctcccagcagcaagtctacaagcggaggaacagccgctctgggctgcctggtcaaggattactttcccgagcctgtgaccgtgtcctggaatagcggagcactgacaagcggcgtgcacacctttccagccgtgctgcaaagcagcggcctgtactctctgagcagcgtggtcacagtgcctagctctagcctgggcacccagacctacatctgcaatgtgaaccacaagcctagcaacaccaaggtggacaagagagtggaacccaagagctgtgaagtgaaaaccgactccaccgaccacgtgaagcccaaagagacagagaacaccaagcagcccagcaagagctgccacaagcccaaggccatcgtgcacaccgagaaagtgaacatgatgagcctgaccgtgctgggcctgcggatgctgttcgccaaaaccgtggccgtgaacttcctgctgaccgccaagctgttcttcctc

SEQ ID NO: 8435 - DNA, 2286 bp, Artificial Sequence
  Synthetic Polynucloetide
atggccttaccagtgaccgccttgctcctgccgctggccttgctgctccacgccgccaggccggaagtgcagctggttgaatctggcggaggactggttcagcctggcggatctctgagactgtcttgtgccgccagcggcttcagcttcagcgacttttggatgagctgggtccgacaggcccctggcaaaggacttgaatgggtcgccacaatcagccaggccggcagcgagaaggactacgtggactctgtgaagggcagattcaccatcagccgggacaacgccaagaagtccctgtacctccagatgaacagcctgagagccgaggacaccgccgtgtactattgtgcctctggcgtgtacagcttcgactacagaggccagggcaccctggtcacagtctcttctggtaccggcggaggcggatctggcggcggaggtagcggtggcggaggatctgaattcgagatcgtgctgacacagtctcccgccacactgtcactgtctccaggcgaaagagccacactgagctgtagagccagccagagcgtgtcctcttacctggcctggtatcagcagaagcctggacaggctccccggctgctgatctacgatgccagcaatagagccacaggcatccccgccagattttctggctctggcagcggcaccgatttcaccctgaccataagcagcctggaacctgaggacttcgccgtgtactactgccagcagagaagcaactggcccctgacctttggacagggcaccaaggtggaaatcaaactcgagggacagcctaaggccaatcctaccgtgacactgttccctccaagcagcgaagaactccaggccaacaaggccacacttgtgtgcctgatctccgacttctaccctggggctgtgacagtggcttggaaggccgatggatctcctgtgaaagccggcgtggaaaccaccaagccatccaagcagagcaacaacaaatacgccgccagctcctacctgagcctgacacctgagcagtggaagtcccacagatcctacagctgccaagtgacccacgaaggcagcaccgtggaaaagacagtggcccctacagagtgcagcggcagagccgattgcggctttaccagcgagagctaccagcagggcgtgctgagcgccaccatcctgtacgagatcctgctgggcaaggccaccctgtacgccgtgctggtgtctgccctggtgctgatggctatggtcaagcggaaggacagccggggacgcgccaagagaagcggatctggcgtgaagcagaccctgaatttcgacctgctgaagctggctggcgacgtggaatccaacccaggccctactagtatggactggatttggcgcatccttttccttgtcggcgctgctaccggcgcgcattccttcgaacaagttcagctggttcagagcggagccgaagtgaagaaacctggcagcagcgtgaaggtgtcctgcaaagcaagcggcggcacctttagcacctacgccatccactgggttcgacaggcaccaggacaaggactggaatggatgggcagaatcatccccatcgagggcagagcctactacgcccagaaattccagggcagagtgaccatcaccgccgacgagtctacaagcaccgcctacatggaactgagcagcctgagaagcgaggataccgctgtgtactattgcgccagaggccggtacagctacagatattggttcgactactggggccagggcaccctggttacagtctcttctacgcgtgcctctacaaagggaccctccgtgtttcctctggctcccagcagcaagtctacaagcggaggaacagccgctctgggctgcctggtcaaggattactttcccgagcctgtgaccgtgtcctggaatagcggagcactgacaagcggcgtgcacacctttccagccgtgctgcaaagcagcggcctgtactctctgagcagcgtggtcacagtgcctagctctagcctgggcacccagacctacatctgcaatgtgaaccacaagcctagcaacaccaaggtggacaagagagtggaacccaagagctgtatccccgaggacacattcttcccaagccccgagagcagctgcgacgtgaagctggtggaaaagagcttcgagacagacaccaacctgaacttccagaacctgagcgtgatcggcttcagaatcctgctgctgaaagtggccggctttaacctgctgatgaccctgcggctgtggtccagc

SEQ ID NO: 8436 - DNA, 2688 bp, Artificial Sequence
  Synthetic Polynucloetide
atggccttaccagtgaccgccttgctcctgccgctggccttgctgctccacgccgccaggccggaagtgcagctggttgaatctggcggaggactggttcagcctggcggatctctgagactgtcttgtgccgccagcggcttcagcttcagcgacttttggatgagctgggtccgacaggcccctggcaaaggacttgaatgggtcgccacaatcagccaggccggcagcgagaaggactacgtggactctgtgaagggcagattcaccatcagccgggacaacgccaagaagtccctgtacctccagatgaacagcctgagagccgaggacaccgccgtgtactattgtgcctctggcgtgtacagcttcgactacagaggccagggcaccctggtcacagtctcttctggtaccggcggaggcggatctggcggcggaggtagcggtggcggaggatctgaattcgagatcgtgctgacacagtctcccgccacactgtcactgtctccaggcgaaagagccacactgagctgtagagccagccagagcgtgtcctcttacctggcctggtatcagcagaagcctggacaggctccccggctgctgatctacgatgccagcaatagagccacaggcatccccgccagattttctggctctggcagcggcaccgatttcaccctgaccataagcagcctggaacctgaggacttcgccgtgtactactgccagcagagaagcaactggcccctgacctttggacagggcaccaaggtggaaatcaaactcgagatccagaaccctgatcctgccgtgtaccagctgcgggatagcaagagcagcgacaagagcgtgtgtctgttcaccgacttcgacagccagaccaacgtgtcccagagcaaggactccgacgtgtacatcaccgataagtgcgtgctggacatgcggagcatggacttcaagagcaactccgccgtggcctggtccaacaagtccgatttcgcctgcgccaacgccttcaacaacagcattatccccgaggacacattcttcccaagccccgagagcagctgcgacgtgaagctggtggaaaagagcttcgagacagacaccaacctgaacttccagaacctgagcgtgatcggcttcagaatcctgctgctgaaagtggccggctttaacctgctgatgaccctgcggctgtggtccagccgcgccaagagaagcggatctggcgtgaagcagaccctgaatttcgacctgctgaagctggctggcgacgtggaatccaacccaggccctactagtatggactggatttggcgcatccttttccttgtcggcgctgctaccggcgcgcattccgggccccagctccagctgcaagagtctggacctggcctggtcaagcctagcgagacactgagcctgacctgtaccgtgtccggcgatagcatcagcagcggcgattactactggggctggatcagacagcctcctggcaaaggactggaatggatcggccacatctactacagcggcgtgacctactacaaccccagcctgaagtccagagtgaccatcagcgtggacaccagccggaaccagttctccctgaagctgtctagcgtgacagccgccgataccgccgtgtactactgcaccagagaggacagcagcaactggcggagtagaggccagggaacactggtcacagttagctctggatccggcggaggcggaagtggaggcggaggatctggcggcggaggctctttcgaacaagttcagctggttcagagcggagccgaagtgaagaaacctggcagcagcgtgaaggtgtcctgcaaagcaagcggcggcacctttagcacctacgccatccactgggttcgacaggcaccaggacaaggactggaatggatgggcagaatcatccccatcgagggcagagcctactacgcccagaaattccagggcagagtgaccatcaccgccgacgagtctacaagcaccgcctacatggaactgagcagcctgagaagcgaggataccgctgtgtactattgcgccagaggccggtacagctacagatattggttcgactactggggccagggcaccctggttacagtctcttctacgcgtgaggacctgaagaacgtgttcccacctgaggtggccgtgttcgagcctagcgaggccgagatcagccacacccagaaagccaccctcgtgtgcctggctaccggcttctaccccgaccatgtggaactgtcttggtgggtcaacggcaaagaggtgcacagcggcgtgtgtaccgacccccagccactgaaagaacagcccgccctgaacgacagccggtactgcctgagcagcagactgagagtgtccgccaccttctggcagaacccccggaaccacttcagatgccaggtgcagttctacggcctgagcgagaacgacgagtggacccaggacagagccaagcccgtgacccagatcgtgtctgccgaagcctggggcagagccgattgcggctttaccagcgagagctaccagcagggcgtgctgagcgccaccatcctgtacgagatcctgctgggcaaggccaccctgtacgccgtgctggtgtctgccctggtgctgatggctatggtcaagcggaaggacagccgggga

SEQ ID NO: 8437 - DNA, 3264 bp, Artificial Sequence
  Synthetic Polynucloetide
atggccttaccagtgaccgccttgctcctgccgctggccttgctgctccacgccgccaggccggaagtgcagctggttgaatctggcggaggactggttcagcctggcggatctctgagactgtcttgtgccgccagcggcttcagcttcagcgacttttggatgagctgggtccgacaggcccctggcaaaggacttgaatgggtcgccacaatcagccaggccggcagcgagaaggactacgtggactctgtgaagggcagattcaccatcagccgggacaacgccaagaagtccctgtacctccagatgaacagcctgagagccgaggacaccgccgtgtactattgtgcctctggcgtgtacagcttcgactacagaggccagggcaccctggtcacagtctcttctggtaccggcggaggcggatctggcggcggaggtagcggtggcggaggatctgaattcgagatcgtgctgacacagtctcccgccacactgtcactgtctccaggcgaaagagccacactgagctgtagagccagccagagcgtgtcctcttacctggcctggtatcagcagaagcctggacaggctccccggctgctgatctacgatgccagcaatagagccacaggcatccccgccagattttctggctctggcagcggcaccgatttcaccctgaccataagcagcctggaacctgaggacttcgccgtgtactactgccagcagagaagcaactggcccctgacctttggacagggcaccaaggtggaaatcaaactcgaggacctgaagaacgtgttcccacctgaggtggccgtgttcgagcctagcgaggccgagatcagccacacccagaaagccaccctcgtgtgcctggctaccggcttctaccccgaccatgtggaactgtcttggtgggtcaacggcaaagaggtgcacagcggcgtgtctaccgacccccagccactgaaagaacagcccgccctgaacgacagccggtactgcctgagcagcagactgagagtgtccgccaccttctggcagaacccccggaaccacttcagatgccaggtgcagttctacggcctgagcgagaacgacgagtggacccaggacagagccaagcccgtgacccagatcgtgtctgccgaagcctggggcagagccgattgcggatcccagagcttcggcctgctggaccccaagctgtgctacctgctggatggcatcctgttcatctacggcgtgatcctgaccgccctgttcctgagagtgaagttcagcagaagcgccgacgcccctgcctaccagcagggacagaaccaactgtacaacgagctgaacctgggcagacgggaagagtacgacgtgctggacaagcggagaggcagggaccctgagatgggcggaaagccccagcggagaaagaacccccaggaaggactgtataacgaactccagaaagacaagatggccgaagcctacagcgagatcggcatgaagggcgagcggagaagaggcaagggccacgatggcctgtaccagggcctgagcaccgccaccaaggacacctatgacgccctgcacatgcaggccctgcctccaagaagggccaagcgatctggatctggagcaacaaacttctcactactcaaacaagcaggtgacgtggaggagaatcccgggcctactagtatggactggatttggcgcatccttttccttgtcggcgctgctaccggcgcgcattccgggccccagctccagctgcaagagtctggacctggcctggtcaagcctagcgagacactgagcctgacctgtaccgtgtccggcgatagcatcagcagcggcgattactactggggctggatcagacagcctcctggcaaaggactggaatggatcggccacatctactacagcggcgtgacctactacaaccccagcctgaagtccagagtgaccatcagcgtggacaccagccggaaccagttctccctgaagctgtctagcgtgacagccgccgataccgccgtgtactactgcaccagagaggacagcagcaactggcggagtagaggccagggaacactggtcacagttagctctggatccggcggaggcggaagtggaggcggaggatctggcggcggaggctctttcgaacaagttcagctggttcagagcggagccgaagtgaagaaacctggcagcagcgtgaaggtgtcctgcaaagcaagcggcggcacctttagcacctacgccatccactgggttcgacaggcaccaggacaaggactggaatggatgggcagaatcatccccatcgagggcagagcctactacgcccagaaattccagggcagagtgaccatcaccgccgacgagtctacaagcaccgcctacatggaactgagcagcctgagaagcgaggataccgctgtgtactattgcgccagaggccggtacagctacagatattggttcgactactggggccagggcaccctggttacagtctcttctacgcgtatccagaaccctgatcctgccgtgtaccagctgcgggatagcaagagcagcgacaagagcgtgtgtctgttcaccgacttcgacagccagaccaacgtgtcccagagcaaggactccgacgtgtacatcaccgataagaccgtgctggacatgcggagcatggacttcaagagcaactccgccgtggcctggtccaacaagtccgatttcgcctgcgccaacgccttcaacaacagcattatccccgaggacacattcttcccaagccccgagagcagctgcggtacccagagttttgggttgttggaccctaaattgtgctatctgttggacggaatcctgttcatttacggagtgatcctgaccgcattgttcctgcgggttaagttttccagatccgcagacgcacccgcttaccaacaagggcagaaccaactctacaatgaacttaatttggggcggagggaagagtacgacgttctggacaaaaggaggggacgagatcccgagatgggcggaaagcctcagcgaaggaagaatccgcaagaggggctttataacgaactccagaaagataaaatggcagaagcctatagtgagattgggatgaagggagaaaggaggaggggtaaaggtcacgatgggttgtaccaaggattgagcacagccactaaagatacctatgatgcgctccacatgcaggccctgccgccaaga

SEQ ID NO: 8438 - DNA, 2754 bp, Artificial Sequence
  Synthetic Polynucloetide
atggccttaccagtgaccgccttgctcctgccgctggccttgctgctccacgccgccaggccggaagtgcagctggttgaatctggcggaggactggttcagcctggcggatctctgagactgtcttgtgccgccagcggcttcagcttcagcgacttttggatgagctgggtccgacaggcccctggcaaaggacttgaatgggtcgccacaatcagccaggccggcagcgagaaggactacgtggactctgtgaagggcagattcaccatcagccgggacaacgccaagaagtccctgtacctccagatgaacagcctgagagccgaggacaccgccgtgtactattgtgcctctggcgtgtacagcttcgactacagaggccagggcaccctggtcacagtctcttctggtaccggcggaggcggatctggcggcggaggtagcggtggcggaggatctgaattcgagatcgtgctgacacagtctcccgccacactgtcactgtctccaggcgaaagagccacactgagctgtagagccagccagagcgtgtcctcttacctggcctggtatcagcagaagcctggacaggctccccggctgctgatctacgatgccagcaatagagccacaggcatccccgccagattttctggctctggcagcggcaccgatttcaccctgaccataagcagcctggaacctgaggacttcgccgtgtactactgccagcagagaagcaactggcccctgacctttggacagggcaccaaggtggaaatcaaactcgagggacagcctaaggccaatcctaccgtgacactgttccctccaagcagcgaagaactccaggccaacaaggccacacttgtgtgcctgatctccgacttctaccctggggctgtgacagtggcttggaaggccgatggatctcctgtgaaagccggcgtggaaaccaccaagccatccaagcagagcaacaacaaatacgccgccagctcctacctgagcctgacacctgagcagtggaagtcccacagatcctacagctgccaagtgacccacgaaggcagcaccgtggaaaagacagtggcccctacagagtgcagccccatcaagaccgatgtgattacaatggaccccaaggacaactgctccaaggacgccaacgataccctgctgctccagctgaccaacaccagcgcctactacatgtacttgttgctgctgctgaagtccgtggtgtacttcgccatcatcacatgctgcctgctgcggagaaccgccttctgctgcaacggcgagaagtctagggccaagcgatctggatctggagcaacaaacttctcactactcaaacaagcaggtgacgtggaggagaatcccgggcctactagtatggactggatttggcgcatccttttccttgtcggcgctgctaccggcgcgcattccgggccccagctccagctgcaagagtctggacctggcctggtcaagcctagcgagacactgagcctgacctgtaccgtgtccggcgatagcatcagcagcggcgattactactggggctggatcagacagcctcctggcaaaggactggaatggatcggccacatctactacagcggcgtgacctactacaaccccagcctgaagtccagagtgaccatcagcgtggacaccagccggaaccagttctccctgaagctgtctagcgtgacagccgccgataccgccgtgtactactgcaccagagaggacagcagcaactggcggagtagaggccagggaacactggtcacagttagctctggatccggcggaggcggaagtggaggcggaggatctggcggcggaggctctttcgaacaagttcagctggttcagagcggagccgaagtgaagaaacctggcagcagcgtgaaggtgtcctgcaaagcaagcggcggcacctttagcacctacgccatccactgggttcgacaggcaccaggacaaggactggaatggatgggcagaatcatccccatcgagggcagagcctactacgcccagaaattccagggcagagtgaccatcaccgccgacgagtctacaagcaccgcctacatggaactgagcagcctgagaagcgaggataccgctgtgtactattgcgccagaggccggtacagctacagatattggttcgactactggggccagggcaccctggttacagtctcttctacgcgtgcctctacaaagggaccctccgtgtttcctctggctcccagcagcaagtctacaagcggaggaacagccgctctgggctgcctggtcaaggattactttcccgagcctgtgaccgtgtcctggaatagcggagcactgacaagcggcgtgcacacctttccagccgtgctgcaaagcagcggcctgtactctctgagcagcgtggtcacagtgcctagctctagcctgggcacccagacctacatctgcaatgtgaaccacaagcctagcaacaccaaggtggacaagagagtggaacccaagagctgtgaagtgaaaaccgactccaccgaccacgtgaagcccaaagagacagagaacaccaagcagcccagcaagagctgccacaagcccaaggccatcgtgcacaccgagaaagtgaacatgatgagcctgaccgtgctgggcctgcggatgctgttcgccaaaaccgtggccgtgaacttcctgctgaccgccaagctgttcttcctc

SEQ ID NO: 8439 - DNA, 2697 bp, Artificial Sequence
  Synthetic Polynucloetide
atggccttaccagtgaccgccttgctcctgccgctggccttgctgctccacgccgccaggccggaagtgcagctggttgaatctggcggaggactggttcagcctggcggatctctgagactgtcttgtgccgccagcggcttcagcttcagcgacttttggatgagctgggtccgacaggcccctggcaaaggacttgaatgggtcgccacaatcagccaggccggcagcgagaaggactacgtggactctgtgaagggcagattcaccatcagccgggacaacgccaagaagtccctgtacctccagatgaacagcctgagagccgaggacaccgccgtgtactattgtgcctctggcgtgtacagcttcgactacagaggccagggcaccctggtcacagtctcttctggtaccggcggaggcggatctggcggcggaggtagcggtggcggaggatctgaattcgagatcgtgctgacacagtctcccgccacactgtcactgtctccaggcgaaagagccacactgagctgtagagccagccagagcgtgtcctcttacctggcctggtatcagcagaagcctggacaggctccccggctgctgatctacgatgccagcaatagagccacaggcatccccgccagattttctggctctggcagcggcaccgatttcaccctgaccataagcagcctggaacctgaggacttcgccgtgtactactgccagcagagaagcaactggcccctgacctttggacagggcaccaaggtggaaatcaaactcgagggacagcctaaggccaatcctaccgtgacactgttccctccaagcagcgaagaactccaggccaacaaggccacacttgtgtgcctgatctccgacttctaccctggggctgtgacagtggcttggaaggccgatggatctcctgtgaaagccggcgtggaaaccaccaagccatccaagcagagcaacaacaaatacgccgccagctcctacctgagcctgacacctgagcagtggaagtcccacagatcctacagctgccaagtgacccacgaaggcagcaccgtggaaaagacagtggcccctacagagtgcagcggcagagccgattgcggctttaccagcgagagctaccagcagggcgtgctgagcgccaccatcctgtacgagatcctgctgggcaaggccaccctgtacgccgtgctggtgtctgccctggtgctgatggctatggtcaagcggaaggacagccggggacgcgccaagagaagcggatctggcgtgaagcagaccctgaatttcgacctgctgaagctggctggcgacgtggaatccaacccaggccctactagtatggactggatttggcgcatccttttccttgtcggcgctgctaccggcgcgcattccgggccccagctccagctgcaagagtctggacctggcctggtcaagcctagcgagacactgagcctgacctgtaccgtgtccggcgatagcatcagcagcggcgattactactggggctggatcagacagcctcctggcaaaggactggaatggatcggccacatctactacagcggcgtgacctactacaaccccagcctgaagtccagagtgaccatcagcgtggacaccagccggaaccagttctccctgaagctgtctagcgtgacagccgccgataccgccgtgtactactgcaccagagaggacagcagcaactggcggagtagaggccagggaacactggtcacagttagctctggatccggcggaggcggaagtggaggcggaggatctggcggcggaggctctttcgaacaagttcagctggttcagagcggagccgaagtgaagaaacctggcagcagcgtgaaggtgtcctgcaaagcaagcggcggcacctttagcacctacgccatccactgggttcgacaggcaccaggacaaggactggaatggatgggcagaatcatccccatcgagggcagagcctactacgcccagaaattccagggcagagtgaccatcaccgccgacgagtctacaagcaccgcctacatggaactgagcagcctgagaagcgaggataccgctgtgtactattgcgccagaggccggtacagctacagatattggttcgactactggggccagggcaccctggttacagtctcttctacgcgtgcctctacaaagggaccctccgtgtttcctctggctcccagcagcaagtctacaagcggaggaacagccgctctgggctgcctggtcaaggattactttcccgagcctgtgaccgtgtcctggaatagcggagcactgacaagcggcgtgcacacctttccagccgtgctgcaaagcagcggcctgtactctctgagcagcgtggtcacagtgcctagctctagcctgggcacccagacctacatctgcaatgtgaaccacaagcctagcaacaccaaggtggacaagagagtggaacccaagagctgtatccccgaggacacattcttcccaagccccgagagcagctgcgacgtgaagctggtggaaaagagcttcgagacagacaccaacctgaacttccagaacctgagcgtgatcggcttcagaatcctgctgctgaaagtggccggctttaacctgctgatgaccctgcggctgtggtccagc

SEQ ID NO: 8440 - DNA, 2268 bp, Artificial Sequence
  Synthetic Polynucloetide
atggccttaccagtgaccgccttgctcctgccgctggccttgctgctccacgccgccaggccggaagtgcaggttttggagtctggcggaggactggttcagcctggcggatctctgagactgtcttgtgccgccagcggcttcaccttcagcaactttgccatgagctgggtccgacaggcccctggcaaaggacttgaatgggtgtccacaatcagcggcagcgccggcacaacagattacgccgattctgtgaagggcagattcaccatcagccgggacaacagcaagaaaaccctgtacctccagatgaacagcctgcgcgtggaagataccgccgtgtactactgtgccgatggcagaggccccttcttcgattatcgcggccagggcacactggtcaccgtttcttctggtaccggcggaggcggatctggcggcggaggtagcggtggcggaggatctgaattcgagatcgtgctgacacagtctcccgccacactgtcactgtctccaggcgaaagagccacactgagctgtagagccagccagagcgtgtcctcttacctggcctggtatcagcagaagcctggacaggctccccggctgctgatctacgatgccagcaatagagccacaggcatccccgccagattttctggctctggcagcggcaccgatttcaccctgaccataagcagcctggaacctgaggacttcgccgtgtactactgccagcagagaagcaactggcccctgacctttggacagggcaccaaggtggaaatcaaactcgaggacctgaagaacgtgttcccacctgaggtggccgtgttcgagcctagcgaggccgagatcagccacacccagaaagccaccctcgtgtgcctggctaccggcttctaccccgaccatgtggaactgtcttggtgggtcaacggcaaagaggtgcacagcggcgtgtgtaccgacccccagccactgaaagaacagcccgccctgaacgacagccggtactgcctgagcagcagactgagagtgtccgccaccttctggcagaacccccggaaccacttcagatgccaggtgcagttctacggcctgagcgagaacgacgagtggacccaggacagagccaagcccgtgacccagatcgtgtctgccgaagcctggggcagagccgattgcggctttaccagcgagagctaccagcagggcgtgctgagcgccaccatcctgtacgagatcctgctgggcaaggccaccctgtacgccgtgctggtgtctgccctggtgctgatggctatggtcaagcggaaggacagccggggaagggccaagcgatctggatctggagcaacaaacttctcactactcaaacaagcaggtgacgtggaggagaatcccgggcctactagtatggactggatttggcgcatccttttccttgtcggcgctgctaccggcgcgcattccttcgaacaagttcagctggttcagagcggagccgaagtgaagaaacctggcagcagcgtgaaggtgtcctgcaaagcaagcggcggcacctttagcacctacgccatccactgggttcgacaggcaccaggacaaggactggaatggatgggcagaatcatccccatcgagggcagagcctactacgcccagaaattccagggcagagtgaccatcaccgccgacgagtctacaagcaccgcctacatggaactgagcagcctgagaagcgaggataccgctgtgtactattgcgccagaggccggtacagctacagatattggttcgactactggggccagggcaccctggttacagtctcttctacgcgtatccagaaccctgatcctgccgtgtaccagctgcgggatagcaagagcagcgacaagagcgtgtgtctgttcaccgacttcgacagccagaccaacgtgtcccagagcaaggactccgacgtgtacatcaccgataagtgcgtgctggacatgcggagcatggacttcaagagcaactccgccgtggcctggtccaacaagtccgatttcgcctgcgccaacgccttcaacaacagcattatccccgaggacacattcttcccaagccccgagagcagctgcgacgtgaagctggtggaaaagagcttcgagacagacaccaacctgaacttccagaacctgagcgtgatcggcttcagaatcctgctgctgaaagtggccggctttaacctgctgatgaccctgcggctgtggtccagc

SEQ ID NO: 8441 - DNA, 2271 bp, Artificial Sequence
  Synthetic Polynucloetide
atggccttaccagtgaccgccttgctcctgccgctggccttgctgctccacgccgccaggccggagatcgtgctgacacagtctcccgccacactgtcactgtctccaggcgaaagagccacactgagctgtagagccagccagagcgtgtcctcttacctggcctggtatcagcagaagcctggacaggctccccggctgctgatctacgatgccagcaatagagccacaggcatccccgccagattttctggctctggcagcggcaccgatttcaccctgaccataagcagcctggaacctgaggacttcgccgtgtactactgccagcagagaagcaactggcccctgacctttggacagggcaccaaggtggaaatcaaactcgaggacctgaagaacgtgttcccacctgaggtggccgtgttcgagcctagcgaggccgagatcagccacacccagaaagccaccctcgtgtgcctggctaccggcttctaccccgaccatgtggaactgtcttggtgggtcaacggcaaagaggtgcacagcggcgtgtgtaccgacccccagccactgaaagaacagcccgccctgaacgacagccggtactgcctgagcagcagactgagagtgtccgccaccttctggcagaacccccggaaccacttcagatgccaggtgcagttctacggcctgagcgagaacgacgagtggacccaggacagagccaagcccgtgacccagatcgtgtctgccgaagcctggggcagagccgattgcggctttaccagcgagagctaccagcagggcgtgctgagcgccaccatcctgtacgagatcctgctgggcaaggccaccctgtacgccgtgctggtgtctgccctggtgctgatggctatggtcaagcggaaggacagccggggaagggccaagcgatctggatctggagcaacaaacttctcactactcaaacaagcaggtgacgtggaggagaatcccgggcctactagtatggactggatttggcgcatccttttccttgtcggcgctgctaccggcgcccattccgggcccgaagtgcagctggttgaatctggcggaggactggttcaggctggcggatctctgagactgtcttgtgccgccagcggcagaacctttagcatgggctggtttagacaggcccctggcaaagagagagagttcgtcgccgccatcacatactctggcggcagcccttactacgccgactctgtgaagggcagattcaccatcagccgggacaacgccaagaacaccgtgtacctccagatgaacagcctgaagcctgaggacaccgccgtgtactactgcgccgccaatccaacatacggcagcgactggaacgccgagaattggggccagggaacccaagtgacagtgtctagcggatccggcggcggaggatctggcggaggcggatctgggggcggaggctctttcgaacaagttcagctggttcagagcggagccgaagtgaagaaacctggcagcagcgtgaaggtgtcctgcaaagcaagcggcggcacctttagcacctacgccatccactgggttcgacaggcaccaggacaaggactggaatggatgggcagaatcatccccatcgagggcagagcctactacgcccagaaattccagggcagagtgaccatcaccgccgacgagtctacaagcaccgcctacatggaactgagcagcctgagaagcgaggataccgctgtgtactattgcgccagaggccggtacagctacagatattggttcgactactggggccagggcaccctggttacagtctcttctacgcgtatccagaaccctgatcctgccgtgtaccagctgcgggatagcaagagcagcgacaagagcgtgtgtctgttcaccgacttcgacagccagaccaacgtgtcccagagcaaggactccgacgtgtacatcaccgataagtgcgtgctggacatgcggagcatggacttcaagagcaactccgccgtggcctggtccaacaagtccgatttcgcctgcgccaacgccttcaacaacagcattatccccgaggacacattcttcccaagccccgagagcagctgcgacgtgaagctggtggaaaagagcttcgagacagacaccaacctgaacttccagaacctgagcgtgatcggcttcagaatcctgctgctgaaagtggccggctttaacctgctgatgaccctgcggctgtggtccagc

SEQ ID NO: 8442 - DNA, 2652 bp, Artificial Sequence
  Synthetic Polynucloetide
atggccttaccagtgaccgccttgctcctgccgctggccttgctgctccacgccgccaggccggagatcgtgctgacacagtctcccgccacactgtcactgtctccaggcgaaagagccacactgagctgtagagccagccagagcgtgtcctcttacctggcctggtatcagcagaagcctggacaggctccccggctgctgatctacgatgccagcaatagagccacaggcatccccgccagattttctggctctggcagcggcaccgatttcaccctgaccataagcagcctggaacctgaggacttcgccgtgtactactgccagcagagaagcaactggcccctgacctttggacagggcaccaaggtggaaatcaaactcgaggacctgaagaacgtgttcccacctgaggtggccgtgttcgagcctagcgaggccgagatcagccacacccagaaagccaccctcgtgtgcctggctaccggcttctaccccgaccatgtggaactgtcttggtgggtcaacggcaaagaggtgcacagcggcgtgtgtaccgacccccagccactgaaagaacagcccgccctgaacgacagccggtactgcctgagcagcagactgagagtgtccgccaccttctggcagaacccccggaaccacttcagatgccaggtgcagttctacggcctgagcgagaacgacgagtggacccaggacagagccaagcccgtgacccagatcgtgtctgccgaagcctggggcagagccgattgcggctttaccagcgagagctaccagcagggcgtgctgagcgccaccatcctgtacgagatcctgctgggcaaggccaccctgtacgccgtgctggtgtctgccctggtgctgatggctatggtcaagcggaaggacagccggggaagggccaagcgatctggatctggagcaacaaacttctcactactcaaacaagcaggtgacgtggaggagaatcccgggcctactagtatggactggatttggcgcatccttttccttgtcggcgctgctaccggcgcccattcccaactgcaactgcaagagtctggccctggcctggtcaagccttctgaaaccctgagcctgacctgtaccgtgtccggcggctctatcagcagcggcgattactactggggctggatcagacagcctccaggcaagggactcgaatggatcggcagcatcagctacagcggctccacctactacaacccaagcctgaagtccagagtgaccatcagcgtggacaccagcagaaaccagttctccctgaagctgagcagcgtgacagccgccgatacagccgtgtattattgcaccagagaggacagcagcaactggcggagtagaggacagggcacactggtcacagtgtcctcttctggaggcggtggaagcggtggaggaggatctgaagtgcagctggttgaatctggcggaggactggttcaggctggcggatctctgagactgtcttgtgccgccagcggcagaacctttagcatgggctggtttagacaggcccctggcaaagagagagagttcgtcgccgccatcacatactctggcggcagcccttactacgccgactctgtgaagggcagattcaccatcagccgggacaacgccaagaacaccgtgtacctccagatgaacagcctgaagcctgaggacaccgccgtgtactactgcgccgccaatccaacatacggcagcgactggaacgccgagaattggggccagggaacccaagtgacagtgtctagcggatccggcggcggaggatctggcggaggcggatctgggggcggaggctctttcgaacaagttcagctggttcagagcggagccgaagtgaagaaacctggcagcagcgtgaaggtgtcctgcaaagcaagcggcggcacctttagcacctacgccatccactgggttcgacaggcaccaggacaaggactggaatggatgggcagaatcatccccatcgagggcagagcctactacgcccagaaattccagggcagagtgaccatcaccgccgacgagtctacaagcaccgcctacatggaactgagcagcctgagaagcgaggataccgctgtgtactattgcgccagaggccggtacagctacagatattggttcgactactggggccagggcaccctggttacagtctcttctacgcgtatccagaaccctgatcctgccgtgtaccagctgcgggatagcaagagcagcgacaagagcgtgtgtctgttcaccgacttcgacagccagaccaacgtgtcccagagcaaggactccgacgtgtacatcaccgataagtgcgtgctggacatgcggagcatggacttcaagagcaactccgccgtggcctggtccaacaagtccgatttcgcctgcgccaacgccttcaacaacagcattatccccgaggacacattcttcccaagccccgagagcagctgcgacgtgaagctggtggaaaagagcttcgagacagacaccaacctgaacttccagaacctgagcgtgatcggcttcagaatcctgctgctgaaagtggccggctttaacctgctgatgaccctgcggctgtggtccagc

SEQ ID NO: 8443 - DNA, 2679 bp, Artificial Sequence
  Synthetic Polynucloetide
atggccttaccagtgaccgccttgctcctgccgctggccttgctgctccacgccgccaggccggaagtgcaggttttggagtctggcggaggactggttcagcctggcggatctctgagactgtcttgtgccgccagcggcttcaccttcagcaactttgccatgagctgggtccgacaggcccctggcaaaggacttgaatgggtgtccacaatcagcggcagcgccggcacaacagattacgccgattctgtgaagggcagattcaccatcagccgggacaacagcaagaaaaccctgtacctccagatgaacagcctgcgcgtggaagataccgccgtgtactactgtgccgatggcagaggccccttcttcgattatcgcggccagggcacactggtcaccgtttcttctggtaccggcggaggcggatctggcggcggaggtagcggtggcggaggatctgaattcgagatcgtgctgacacagtctcccgccacactgtcactgtctccaggcgaaagagccacactgagctgtagagccagccagagcgtgtcctcttacctggcctggtatcagcagaagcctggacaggctccccggctgctgatctacgatgccagcaatagagccacaggcatccccgccagattttctggctctggcagcggcaccgatttcaccctgaccataagcagcctggaacctgaggacttcgccgtgtactactgccagcagagaagcaactggcccctgacctttggacagggcaccaaggtggaaatcaaactcgaggacctgaagaacgtgttcccacctgaggtggccgtgttcgagcctagcgaggccgagatcagccacacccagaaagccaccctcgtgtgcctggctaccggcttctaccccgaccatgtggaactgtcttggtgggtcaacggcaaagaggtgcacagcggcgtgtgtaccgacccccagccactgaaagaacagcccgccctgaacgacagccggtactgcctgagcagcagactgagagtgtccgccaccttctggcagaacccccggaaccacttcagatgccaggtgcagttctacggcctgagcgagaacgacgagtggacccaggacagagccaagcccgtgacccagatcgtgtctgccgaagcctggggcagagccgattgcggctttaccagcgagagctaccagcagggcgtgctgagcgccaccatcctgtacgagatcctgctgggcaaggccaccctgtacgccgtgctggtgtctgccctggtgctgatggctatggtcaagcggaaggacagccggggaagggccaagcgatctggatctggagcaacaaacttctcactactcaaacaagcaggtgacgtggaggagaatcccgggcctactagtatggactggatttggcgcatccttttccttgtcggcgctgctaccggcgcccattccgggcccgaagtgcagctggttgaatctggcggaggactggttcaggctggcggatctctgagactgtcttgtgccgccagcggcagaacctttagcatgggctggtttagacaggcccctggcaaagagagagagttcgtcgccgccatcacatacagcggcggcagcccttactacgcctcttctgtcagaggccggttcaccatcagccgggacaacgccaagaacaccgtgtacctccagatgaacagcctgaagccagaggacaccgccgtgtactactgtgccgccaatccaacctacggcagcgactggaatgccgagaattggggccagggcacccaagtgacagtgtctagtggatccggcggcggaggatctggcggaggcggatctgggggcggaggctctttcgaacaagttcagctggttcagagcggagccgaagtgaagaaacctggcagcagcgtgaaggtgtcctgcaaagcaagcggcggcacctttagcacctacgccatccactgggttcgacaggcaccaggacaaggactggaatggatgggcagaatcatccccatcgagggcagagcctactacgcccagaaattccagggcagagtgaccatcaccgccgacgagtctacaagcaccgcctacatggaactgagcagcctgagaagcgaggataccgctgtgtactattgcgccagaggccggtacagctacagatattggttcgactactggggccagggcaccctggttacagtctcttctacgcgtatccagaaccctgatcctgccgtgtaccagctgcgggatagcaagagcagcgacaagagcgtgtgtctgttcaccgacttcgacagccagaccaacgtgtcccagagcaaggactccgacgtgtacatcaccgataagtgcgtgctggacatgcggagcatggacttcaagagcaactccgccgtggcctggtccaacaagtccgatttcgcctgcgccaacgccttcaacaacagcattatccccgaggacacattcttcccaagccccgagagcagctgcgacgtgaagctggtggaaaagagcttcgagacagacaccaacctgaacttccagaacctgagcgtgatcggcttcagaatcctgctgctgaaagtggccggctttaacctgctgatgaccctgcggctgtggtccagc

SEQ ID NO: 8444 - DNA, 2199 bp, Artificial Sequence
  Synthetic Polynucloetide
atggccttaccagtgaccgccttgctcctgccgctggccttgctgctccacgccgccaggccggacatcgtgatgacacagagccctgatagcctggccgtgtctctgggagagagagccaccatcaactgcaagagcagccagagcgtgctgtactccagcaacaacaagaactacctggcctggtatcagcagaagcccggccagcctcctaagctgctgatctactgggccagcaccagagaaagcggcgtgcccgatagattttctggcagcggctctggcaccgacttcaccctgacaattagcagcctccaggccgaggatgtggccgtgtactactgccagcagtattacagcacccctctgaccttcggccagggcaccaaggtggaaatcaaaggcggaggcggaagtggaggcggaggatctggcggcggaggctctgaagttcagctggttcagagcggagccgaagtgaagaagccaggcgagagcctgaagattagctgcaaaggctccggctacagcttcaccagctactggatcggctgggtccgacagatgcctggcaaaggactggaatggatgggcatcatctaccccggcgacagcgacaccagatacagccctagctttcagggccaagtgaccatcagcgccgacaagagcatcagcacagcctacctccagtggtcctctctgaaggccagcgataccgccatgtactattgcgccagagatgtcggcagatgggctcctggcggcttcctggattattggggacagggcacactggtcaccgtgtctagtacgcgtgagcagaaactgatctcggaagaggatctggcgaagcccaccacgacgccagcgccgcgaccaccaacaccggcgcccaccatcgcgtcgcagcccctgtccctgcgcccagaggcgtgccggccagcggcggggggcgcagtgcacacgagggggctggacttcgcctgtgacatctacatctgggcgcccttggccgggacttgtggggtccttctcctgtcactggttatcaccctttactgcaaacggggcagaaagaaactcctgtatatattcaaacaaccatttatgagaccagtacaaactactcaagaggaagatggctgtagctgccgatttccagaagaagaagaaggaggatgtgaactgagagtgaagttcagcaggagcgcagacgcccccgcgtaccagcagggccagaaccagctctataacgagctgaatctaggacgaagagaggagtacgatgttttggacaagagacgtggccgggaccctgagatggggggaaagccgagaaggaagaaccctcaggaaggcctgtacaatgaactgcagaaagataagatggcggaggcctacagtgagattgggatgaaaggcgagcgccggaggggcaaggggcacgatggcctttaccagggtctcagtacagccaccaaggacacctacgacgcccttcacatgcaggccctgccccctcgctctagtggctccggcgagggcagaggaagtctactaacctgcggagatgtggaagaaaatcctggcccacatatgaccgagtacaagcccacggtgcgcctcgccacccgcgacgacgtccccagggccgtacgcaccctcgccgccgcgttcgccgactaccccgccacgcgccacaccgtcgatccggaccgccacatcgagcgggtcaccgagctgcaagaactcttcctcacgcgcgtcgggctcgacatcggcaaggtgtgggtcgcggacgacggcgccgcggtggcggtctggaccacgccggagagcgtcgaagcgggggcggtgttcgccgagatcggcccgcgcatggccgagttgagcggttcccggctggccgcgcagcaacagatggaaggcctcctggcgccgcaccggcccaaggagcccgcgtggttcctggccaccgtcggcgtctcgcccgaccaccagggcaagggtctgggcagcgccgtcgtgctccccggagtggaggcggccgagcgcgccggggtgcccgccttcctggagacctccgcgccccgcaacctccccttctacgagcggctcggcttcaccgtcaccgccgacgtcgaggtgcccgaaggaccgcgcacctggtgcatgacccgcaagcccggtgcctga

SEQ ID NO: 8445 - DNA, 2181 bp, Artificial Sequence
  Synthetic Polynucloetide
atggccttaccagtgaccgccttgctcctgccgctggccttgctgctccacgccgccaggccggacatcgtgatgacacagagccctgatagcctggccgtgtctctgggagagagagccaccatcaactgcaagagcagccagagcgtgctgtactccagcaacaacaagaactacctggcctggtatcagcagaagcccggccagcctcctaagctgctgatctactgggccagcaccagagaaagcggcgtgcccgatagattttctggcagcggctctggcaccgacttcaccctgacaattagcagcctccaggccgaggatgtggccgtgtactactgccagcagtattacagcacccctctgaccttcggccagggcaccaaggtggaaatcaaaggcggaggcggaagtggaggcggaggatctggcggcggaggctctgaagttcagctggttcagagcggagccgaagtgaagaagccaggcgagagcctgaagattagctgcaaaggctccggctacagcttcaccagctactggatcggctgggtccgacagatgcctggcaaaggactggaatggatgggcatcatctaccccggcgacagcgacaccagatacagccctagctttcagggccaagtgaccatcagcgccgacaagagcatcagcacagcctacctccagtggtcctctctgaaggccagcgataccgccatgtactattgcgccagagatgtcggcagatgggctcctggcggcttcctggattattggggacagggcacactggtcaccgtgtctagtacgcgtgagcagaaactgatctcggaagaggatctgaaaattgaagttatgtatcctcctccttacctagacaatgagaagagcaatggaaccattatccatgtgaaagggaaacacctttgtccaagtcccctatttcccggaccttctaagcccttttgggtgctggtggtggttgggggagtcctggcttgctatagcttgctagtaacagtggcctttattattttctgggtgaggagtaagaggagcaggctcctgcacagtgactacatgaacatgactccacgccgccccggacccacccgcaagcattaccagccctatgccccaccacgcgacttcgcagcctatcgctccagagtgaagttcagcaggagcgcagacgcccccgcgtaccagcagggccagaaccagctctataacgagctcaatctaggacgaagagaggagtacgatgttttggacaagagacgtggccgggaccctgagatggggggaaagccgagaaggaagaaccctcaggaaggcctgtacaatgaactgcagaaagataagatggcggaggcctacagtgagattgggatgaaaggcgagcgccggaggggcaaggggcacgatggcctttaccagggtctcagtacagccaccaaggacacctacgacgcccttcacatgcaggccctgccccctcgctctagtggctccggcgagggcagaggaagtctactaacctgcggagatgtggaagaaaatcctggcccacatatgaccgagtacaagcccacggtgcgcctcgccacccgcgacgacgtccccagggccgtacgcaccctcgccgccgcgttcgccgactaccccgccacgcgccacaccgtcgatccggaccgccacatcgagcgggtcaccgagctgcaagaactcttcctcacgcgcgtcgggctcgacatcggcaaggtgtgggtcgcggacgacggcgccgcggtggcggtctggaccacgccggagagcgtcgaagcgggggcggtgttcgccgagatcggcccgcgcatggccgagttgagcggttcccggctggccgcgcagcaacagatggaaggcctcctggcgccgcaccggcccaaggagcccgcgtggttcctggccaccgtcggcgtctcgcccgaccaccagggcaagggtctgggcagcgccgtcgtgctccccggagtggaggcggccgagcgcgccggggtgcccgccttcctggagacctccgcgccccgcaacctccccttctacgagcggctcggcttcaccgtcaccgccgacgtcgaggtgcccgaaggaccgcgcacctggtgcatgacccgcaagcccggtgcctga

SEQ ID NO: 8446 - DNA, 1509 bp, Artificial Sequence
  Synthetic Polynucloetide
atggccttaccagtgaccgccttgctcctgccgctggccttgctgctccacgccgccaggccggacatcgtgatgacacagagccctgatagcctggccgtgtctctgggagagagagccaccatcaactgcaagagcagccagagcgtgctgtactccagcaacaacaagaactacctggcctggtatcagcagaagcccggccagcctcctaagctgctgatctactgggccagcaccagagaaagcggcgtgcccgatagattttctggcagcggctctggcaccgacttcaccctgacaattagcagcctccaggccgaggatgtggccgtgtactactgccagcagtattacagcacccctctgaccttcggccagggcaccaaggtggaaatcaaaggcggaggcggaagtggaggcggaggatctggcggcggaggctctgaagttcagctggttcagagcggagccgaagtgaagaagccaggcgagagcctgaagattagctgcaaaggctccggctacagcttcaccagctactggatcggctgggtccgacagatgcctggcaaaggactggaatggatgggcatcatctaccccggcgacagcgacaccagatacagccctagctttcagggccaagtgaccatcagcgccgacaagagcatcagcacagcctacctccagtggtcctctctgaaggccagcgataccgccatgtactattgcgccagagatgtcggcagatgggctcctggcggcttcctggattattggggacagggcacactggtcaccgtgtctagtacgcgtgagcagaaactgatctcggaagaggatctgaaaattgaagttatgtatcctcctccttacctagacaatgagaagagcaatggaaccattatccatgtgaaagggaaacacctttgtccaagtcccctatttcccggaccttctaagcccttttgggtgctggtggtggttgggggagtcctggcttgctatagcttgctagtaacagtggcctttattattttctgggtgaggagtaagaggagcaggctcctgcacagtgactacatgaacatgactccacgccgccccggacccacccgcaagcattaccagccctatgccccaccacgcgacttcgcagcctatcgctccagagtgaagttcagcaggagcgcagacgcccccgcgtaccagcagggccagaaccagctctataacgagctcaatctaggacgaagagaggagtacgatgttttggacaagagacgtggccgggaccctgagatggggggaaagccgagaaggaagaaccctcaggaaggcctgtacaatgaactgcagaaagataagatggcggaggcctacagtgagattgggatgaaaggcgagcgccggaggggcaaggggcacgatggcctttaccagggtctcagtacagccaccaaggacacctacgacgcccttcacatgcaggccctgccccctcgc

SEQ ID NO: 8447 - DNA, 1530 bp, Artificial Sequence
  Synthetic Polynucloetide
atggccttaccagtgaccgccttgctcctgccgctggccttgctgctccacgccgccaggccggacatcgtgatgacacagagccctgatagcctggccgtgtctctgggagagagagccaccatcaactgcaagagcagccagagcgtgctgtactccagcaacaacaagaactacctggcctggtatcagcagaagcccggccagcctcctaagctgctgatctactgggccagcaccagagaaagcggcgtgcccgatagattttctggcagcggctctggcaccgacttcaccctgacaattagcagcctccaggccgaggatgtggccgtgtactactgccagcagtattacagcacccctctgaccttcggccagggcaccaaggtggaaatcaaaggcggaggcggaagtggaggcggaggatctggcggcggaggctctgaagttcagctggttcagagcggagccgaagtgaagaagccaggcgagagcctgaagattagctgcaaaggctccggctacagcttcaccagctactggatcggctgggtccgacagatgcctggcaaaggactggaatggatgggcatcatctaccccggcgacagcgacaccagatacagccctagctttcagggccaagtgaccatcagcgccgacaagagcatcagcacagcctacctccagtggtcctctctgaaggccagcgataccgccatgtactattgcgccagagatgtcggcagatgggctcctggcggcttcctggattattggggacagggcacactggtcaccgtgtctagtacgcgtgagcagaaactgatctcggaagaggatctggcgaagcccaccacgacgccagcgccgcgaccaccaacaccggcgcccaccatcgcgtcgcagcccctgtccctgcgcccagaggcgtgccggccagcggcggggggcgcagtgcacacgagggggctggacttcgcctgtgacatctacatctgggcgcccttggccgggacttgtggggtccttctcctgtcactggttatcaccctttactgcaaacggggcagaaagaaactcctgtatatattcaaacaaccatttatgagaccagtacaaactactcaagaggaagatggctgtagctgccgatttccagaagaagaagaaggaggatgtgaactgagagtgaagttcagcaggagcgcagacgcccccgcgtaccagcagggccagaaccagctctataacgagctgaatctaggacgaagagaggagtacgatgttttggacaagagacgtggccgggaccctgagatggggggaaagccgagaaggaagaaccctcaggaaggcctgtacaatgaactgcagaaagataagatggcggaggcctacagtgagattgggatgaaaggcgagcgccggaggggcaaggggcacgatggcctttaccagggtctcagtacagccaccaaggacacctacgacgcccttcacatgcaggccctgccccctcgctga

SEQ ID NO: 8448 - DNA, 1530 bp, Artificial Sequence
  Synthetic Polynucloetide
atggccttaccagtgaccgccttgctcctgccgctggccttgctgctccacgccgccaggccggaagttcagctggttcagagcggagccgaagtgaagaagccaggcgagagcctgaagattagctgcaaaggctccggctacagcttcaccagctactggatcggctgggtccgacagatgcctggcaaaggactggaatggatgggcatcatctaccccggcgacagcgacaccagatacagccctagctttcagggccaagtgaccatcagcgccgacaagagcatcagcacagcctacctccagtggtcctctctgaaggccagcgataccgccatgtactattgcgccagagatgtcggcagatgggctcctggcggcttcctggattattggggacagggcacactggtcaccgtgtctagtggcggaggcggaagtggaggcggaggatctggcggcggaggctctgacatcgtgatgacacagagccctgatagcctggccgtgtctctgggagagagagccaccatcaactgcaagagcagccagagcgtgctgtactccagcaacaacaagaactacctggcctggtatcagcagaagcccggccagcctcctaagctgctgatctactgggccagcaccagagaaagcggcgtgcccgatagattttctggcagcggctctggcaccgacttcaccctgacaattagcagcctccaggccgaggatgtggccgtgtactactgccagcagtattacagcacccctctgaccttcggccagggcaccaaggtggaaatcaaaacgcgtgagcagaaactgatctcggaagaggatctggcgaagcccaccacgacgccagcgccgcgaccaccaacaccggcgcccaccatcgcgtcgcagcccctgtccctgcgcccagaggcgtgccggccagcggcggggggcgcagtgcacacgagggggctggacttcgcctgtgacatctacatctgggcgcccttggccgggacttgtggggtccttctcctgtcactggttatcaccctttactgcaaacggggcagaaagaaactcctgtatatattcaaacaaccatttatgagaccagtacaaactactcaagaggaagatggctgtagctgccgatttccagaagaagaagaaggaggatgtgaactgagagtgaagttcagcaggagcgcagacgcccccgcgtaccagcagggccagaaccagctctataacgagctgaatctaggacgaagagaggagtacgatgttttggacaagagacgtggccgggaccctgagatggggggaaagccgagaaggaagaaccctcaggaaggcctgtacaatgaactgcagaaagataagatggcggaggcctacagtgagattgggatgaaaggcgagcgccggaggggcaaggggcacgatggcctttaccagggtctcagtacagccaccaaggacacctacgacgcccttcacatgcaggccctgccccctcgctga

SEQ ID NO: 8449 - DNA, 2769 bp, Artificial Sequence
  Synthetic Polynucloetide
atggccttaccagtgaccgccttgctcctgccgctggccttgctgctccacgccgccaggccggacatcgtgatgacacagagccctgatagcctggccgtgtctctgggagagagagccaccatcaactgcaagagcagccagagcgtgctgtactccagcaacaacaagaactacctggcctggtatcagcagaagcccggccagcctcctaagctgctgatctactgggccagcaccagagaaagcggcgtgcccgatagattttctggcagcggctctggcaccgacttcaccctgacaattagcagcctccaggccgaggatgtggccgtgtactactgccagcagtattacagcacccctctgaccttcggccagggcaccaaggtggaaatcaaaggcggaggcggaagtggaggcggaggatctggcggcggaggctctgaagttcagctggttcagagcggagccgaagtgaagaagccaggcgagagcctgaagattagctgcaaaggctccggctacagcttcaccagctactggatcggctgggtccgacagatgcctggcaaaggactggaatggatgggcatcatctaccccggcgacagcgacaccagatacagccctagctttcagggccaagtgaccatcagcgccgacaagagcatcagcacagcctacctccagtggtcctctctgaaggccagcgataccgccatgtactattgcgccagagatgtcggcagatgggctcctggcggcttcctggattattggggacagggcacactggtcaccgtgtctagtacgcgtgagcagaaactgatctcggaagaggatctggcgaagcccaccacgacgccagcgccgcgaccaccaacaccggcgcccaccatcgcgtcgcagcccctgtccctgcgcccagaggcgtgccggccagcggcggggggcgcagtgcacacgagggggctggacttcgcctgtgacatctacatctgggcgcccttggccgggacttgtggggtccttctcctgtcactggttatcaccctttactgcgggcgcgccagagtgaagttcagcaggagcgcagacgcccccgcgtaccagcagggccagaaccagctctataacgagctgaatctaggacgaagagaggagtacgatgttttggacaagagacgtggccgggaccctgagatggggggaaagccgagaaggaagaaccctcaggaaggcctgtacaatgaactgcagaaagataagatggcggaggcctacagtgagattgggatgaaaggcgagcgccggaggggcaaggggcacgatggcctttaccagggtctcagtacagccaccaaggacacctacgacgcccttcacatgcaggccctgccccctcgctctagaggatctggagcaacaaacttctcactactcaaacaagcaggtgacgtggaggagaatcccgggcctgggatccacatggccacttacgaggttctctgtgaggtggcgcggaaactgggcacggatgacagggaagtggtattgttcctcctaaacgtgttcatacctcaacccacactggcccaattaattggagctcttagagctttaaaggaggagggcaggttaacgtttcccctgttagcggaatgtctgtttcgtgcaggtcgcagagacctcttgcgcgacctgcttcacttagacccgcgttttttagagcgccacctagcgggcacaatgagttatttcagcccttatcagctcactgttctccacgtagacggggagctgtgtgcgagggatattaggtctttgatatttttaagcaaggacactatagggtctcgcagcacaccacagacattcttacactgggtgtactgtatggaaaacttagacctactgggtcccactgacgtggatgccctaatgtcaatgcttagatctttgtcaagagtagacctacagcgccaagtgcaaaccctaatgggccttcacctttccggcccatcacactcccaacactatcgccatacaccactcgagaccgatttctacgactacaaggacgacgatgacaagactagtggctccggcgagggcagaggaagtctactaacctgcggagatgtggaagaaaatcctggcccacatatgaccgagtacaagcccacggtgcgcctcgccacccgcgacgacgtccccagggccgtacgcaccctcgccgccgcgttcgccgactaccccgccacgcgccacaccgtcgatccggaccgccacatcgagcgggtcaccgagctgcaagaactcttcctcacgcgcgtcgggctcgacatcggcaaggtgtgggtcgcggacgacggcgccgcggtggcggtctggaccacgccggagagcgtcgaagcgggggcggtgttcgccgagatcggcccgcgcatggccgagttgagcggttcccggctggccgcgcagcaacagatggaaggcctcctggcgccgcaccggcccaaggagcccgcgtggttcctggccaccgtcggcgtctcgcccgaccaccagggcaagggtctgggcagcgccgtcgtgctccccggagtggaggcggccgagcgcgccggggtgcccgccttcctggagacctccgcgccccgcaacctccccttctacgagcggctcggcttcaccgtcaccgccgacgtcgaggtgcccgaaggaccgcgcacctggtgcatgacccgcaagcccggtgcctga

SEQ ID NO: 8450 - DNA, 2589 bp, Artificial Sequence
  Synthetic Polynucloetide
atggccttaccagtgaccgccttgctcctgccgctggccttgctgctccacgccgccaggccggacatcgtgatgacacagagccctgatagcctggccgtgtctctgggagagagagccaccatcaactgcaagagcagccagagcgtgctgtactccagcaacaacaagaactacctggcctggtatcagcagaagcccggccagcctcctaagctgctgatctactgggccagcaccagagaaagcggcgtgcccgatagattttctggcagcggctctggcaccgacttcaccctgacaattagcagcctccaggccgaggatgtggccgtgtactactgccagcagtattacagcacccctctgaccttcggccagggcaccaaggtggaaatcaaactcgagatccagaaccctgatcctgccgtgtaccagctgcgggatagcaagagcagcgacaagagcgtgtgtctgttcaccgacttcgacagccagaccaacgtgtcccagagcaaggactccgacgtgtacatcaccgataagtgcgtgctggacatgcggagcatggacttcaagagcaactccgccgtggcctggtccaacaagtccgatttcgcctgcgccaacgccttcaacaacagcattatccccgaggacacattcttcccaagcagcgacgtgccctgcgacgtgaagctggtggaaaagagcttcgagacagacaccaacctgaacttccagaacctgagcgtgatcggcttcagaatcctgctgctgaaagtggccggctttaacctgctgatgaccctgcggctgtggtccagccgcgccaagagaagcggatctggcgtgaagcagaccctgaatttcgacctgctgaagctggctggcgacgtggaatccaacccaggccctactagtatggactggatttggcgcatccttttccttgtcggcgctgctaccggcgcgcattccttcgaagaagttcagctggttcagagcggagccgaagtgaagaagccaggcgagagcctgaagattagctgcaaaggctccggctacagcttcaccagctactggatcggctgggtccgacagatgcctggcaaaggactggaatggatgggcatcatctaccccggcgacagcgacaccagatacagccctagctttcagggccaagtgaccatcagcgccgacaagagcatcagcacagcctacctccagtggtcctctctgaaggccagcgataccgccatgtactattgcgccagagatgtcggcagatgggctcctggcggcttcctggattattggggacagggcacactggtcaccgtgtctagtacgcgtgaggacctgaagaacgtgttcccacctgaggtggccgtgttcgagcctagcaaggccgagatcgcccacacccagaaagccaccctcgtgtgcctggctaccggcttctaccccgaccatgtggaactgtcttggtgggtcaacggcaaagaggtgcacagcggcgtgtgtaccgacccccagccactgaaagaacagcccgccctgaacgacagccggtactgcctgagcagcagactgagagtgtccgccaccttctggcagaacccccggaaccacttcagatgccaggtgcagttctacggcctgagcgagaacgacgagtggacccaggacagagccaagcccgtgacccagatcgtgtctgccgaagcctggggcagagccgattgcggcatcaccagcgccagctaccaccagggcgtgctgagcgccaccatcctgtacgagatcctgctgggcaaggccaccctgtacgccgtgctggtgtctgccctggtgctgatggctatggtcaagcggaaggacagccggggaagggccaagcgatctggatctggagcaacaaacttctcactactcaaacaagcaggtgacgtggaggagaatcccgggccttctagaggccatatgaccgagtacaagcccacggtgcgcctcgccacccgcgacgacgtccccagggccgtacgcaccctcgccgccgcgttcgccgactaccccgccacgcgccacaccgtcgatccggaccgccacatcgagcgggtcaccgagctgcaagaactcttcctcacgcgcgtcgggctcgacatcggcaaggtgtgggtcgcggacgacggcgccgcggtggcggtctggaccacgccggagagcgtcgaagcgggggcggtgttcgccgagatcggcccgcgcatggccgagttgagcggttcccggctggccgcgcagcaacagatggaaggcctcctggcgccgcaccggcccaaggagcccgcgtggttcctggccaccgtcggcgtctcgcccgaccaccagggcaagggtctgggcagcgccgtcgtgctccccggagtggaggcggccgagcgcgccggggtgcccgccttcctggagacctccgcgccccgcaacctccccttctacgagcggctcggcttcaccgtcaccgccgacgtcgaggtgcccgaaggaccgcgcacctggtgcatgacccgcaagcccggtgcctga

SEQ ID NO: 8451 - DNA, 2586 bp, Artificial Sequence
  Synthetic Polynucloetide
atggccttaccagtgaccgccttgctcctgccgctggccttgctgctccacgccgccaggccggacatcgtgatgacacagagccctgatagcctggccgtgtctctgggagagagagccaccatcaactgcaagagcagccagagcgtgctgtactccagcaacaacaagaactacctggcctggtatcagcagaagcccggccagcctcctaagctgctgatctactgggccagcaccagagaaagcggcgtgcccgatagattttctggcagcggctctggcaccgacttcaccctgacaattagcagcctccaggccgaggatgtggccgtgtactactgccagcagtattacagcacccctctgaccttcggccagggcaccaaggtggaaatcaaactcgaggacctgaagaacgtgttcccacctgaggtggccgtgttcgagcctagcaaggccgagatcgcccacacccagaaagccaccctcgtgtgcctggctaccggcttctaccccgaccatgtggaactgtcttggtgggtcaacggcaaagaggtgcacagcggcgtgtgtaccgacccccagccactgaaagaacagcccgccctgaacgacagccggtactgcctgagcagcagactgagagtgtccgccaccttctggcagaacccccggaaccacttcagatgccaggtgcagttctacggcctgagcgagaacgacgagtggacccaggacagagccaagcccgtgacccagatcgtgtctgccgaagcctggggcagagccgattgcggcatcaccagcgccagctaccaccagggcgtgctgagcgccaccatcctgtacgagatcctgctgggcaaggccaccctgtacgccgtgctggtgtctgccctggtgctgatggctatggtcaagcggaaggacagccggggaagggccaagcgatctggatctggagcaacaaacttctcactactcaaacaagcaggtgacgtggaggagaatcccgggcctactagtatggactggatttggcgcatccttttccttgtcggcgctgctaccggcgcgcattccttcgaagaagttcagctggttcagagcggagccgaagtgaagaagccaggcgagagcctgaagattagctgcaaaggctccggctacagcttcaccagctactggatcggctgggtccgacagatgcctggcaaaggactggaatggatgggcatcatctaccccggcgacagcgacaccagatacagccctagctttcagggccaagtgaccatcagcgccgacaagagcatcagcacagcctacctccagtggtcctctctgaaggccagcgataccgccatgtactattgcgccagagatgtcggcagatgggctcctggcggcttcctggattattggggacagggcacactggtcaccgtgtctagtacgcgtatccagaaccctgatcctgccgtgtaccagctgcgggatagcaagagcagcgacaagagcgtgtgtctgttcaccgacttcgacagccagaccaacgtgtcccagagcaaggactccgacgtgtacatcaccgataagtgcgtgctggacatgcggagcatggacttcaagagcaactccgccgtggcctggtccaacaagtccgatttcgcctgcgccaacgccttcaacaacagcattatccccgaggacacattcttcccaagcagcgacgtgccctgcgacgtgaagctggtggaaaagagcttcgagacagacaccaacctgaacttccagaacctgagcgtgatcggcttcagaatcctgctgctgaaagtggccggctttaacctgctgatgaccctgcggctgtggtccagccgcgccaagagaagcggatctggcgtgaagcagaccctgaatttcgacctgctgaagctggctggcgacgtggaatccaacccaggcccttctagaggccatatgaccgagtacaagcccacggtgcgcctcgccacccgcgacgacgtccccagggccgtacgcaccctcgccgccgcgttcgccgactaccccgccacgcgccacaccgtcgatccggaccgccacatcgagcgggtcaccgagctgcaagaactcttcctcacgcgcgtcgggctcgacatcggcaaggtgtgggtcgcggacgacggcgccgcggtggcggtctggaccacgccggagagcgtcgaagcgggggcggtgttcgccgagatcggcccgcgcatggccgagttgagcggttcccggctggccgcgcagcaacagatggaaggcctcctggcgccgcaccggcccaaggagcccgcgtggttcctggccaccgtcggcgtctcgcccgaccaccagggcaagggtctgggcagcgccgtcgtgctccccggagtggaggcggccgagcgcgccggggtgcccgccttcctggagacctccgcgccccgcaacctccccttctacgagcggctcggcttcaccgtcaccgccgacgtcgaggtgcccgaaggaccgcgcacctggtgcatgacccgcaagcccggtgcctga

SEQ ID NO: 8452 - DNA, 1884 bp, Artificial Sequence
  Synthetic Polynucloetide
atggccttaccagtgaccgccttgctcctgccgctggccttgctgctccacgccgccaggccggacatcgtgatgacacagagccctgatagcctggccgtgtctctgggagagagagccaccatcaactgcaagagcagccagagcgtgctgtactccagcaacaacaagaactacctggcctggtatcagcagaagcccggccagcctcctaagctgctgatctactgggccagcaccagagaaagcggcgtgcccgatagattttctggcagcggctctggcaccgacttcaccctgacaattagcagcctccaggccgaggatgtggccgtgtactactgccagcagtattacagcacccctctgaccttcggccagggcaccaaggtggaaatcaaactcgaggacctgaagaacgtgttcccacctgaggtggccgtgttcgagcctagcgaggccgagatcagccacacccagaaagccaccctcgtgtgcctggctaccggcttctaccccgaccatgtggaactgtcttggtgggtcaacggcaaagaggtgcacagcggcgtgtgtaccgacccccagccactgaaagaacagcccgccctgaacgacagccggtactgcctgagcagcagactgagagtgtccgccaccttctggcagaacccccggaaccacttcagatgccaggtgcagttctacggcctgagcgagaacgacgagtggacccaggacagagccaagcccgtgacccagatcgtgtctgccgaagcctggggcagagccgattgcggctttaccagcgagagctaccagcagggcgtgctgagcgccaccatcctgtacgagatcctgctgggcaaggccaccctgtacgccgtgctggtgtctgccctggtgctgatggctatggtcaagcggaaggacagccggggaagggccaagcgatctggatctggagcaacaaacttctcactactcaaacaagcaggtgacgtggaggagaatcccgggcctactagtatggactggatttggcgcatccttttccttgtcggcgctgctaccggcgcgcattccttcgaagaagttcagctggttcagagcggagccgaagtgaagaagccaggcgagagcctgaagattagctgcaaaggctccggctacagcttcaccagctactggatcggctgggtccgacagatgcctggcaaaggactggaatggatgggcatcatctaccccggcgacagcgacaccagatacagccctagctttcagggccaagtgaccatcagcgccgacaagagcatcagcacagcctacctccagtggtcctctctgaaggccagcgataccgccatgtactattgcgccagagatgtcggcagatgggctcctggcggcttcctggattattggggacagggcacactggtcaccgtgtctagtacgcgtatccagaaccctgatcctgccgtgtaccagctgcgggatagcaagagcagcgacaagagcgtgtgtctgttcaccgacttcgacagccagaccaacgtgtcccagagcaaggactccgacgtgtacatcaccgataagtgcgtgctggacatgcggagcatggacttcaagagcaactccgccgtggcctggtccaacaagtccgatttcgcctgcgccaacgccttcaacaacagcattatccccgaggacacattcttcccaagccccgagagcagctgcgacgtgaagctggtggaaaagagcttcgagacagacaccaacctgaacttccagaacctgagcgtgatcggcttcagaatcctgctgctgaaagtggccggctttaacctgctgatgaccctgcggctgtggtccagc

SEQ ID NO: 8453 - DNA, 2559 bp, Artificial Sequence
  Synthetic Polynucloetide
atggccttaccagtgaccgccttgctcctgccgctggccttgctgctccacgccgccaggccggacatcgtgatgacacagagccctgatagcctggccgtgtctctgggagagagagccaccatcaactgcaagagcagccagagcgtgctgtactccagcaacaacaagaactacctggcctggtatcagcagaagcccggccagcctcctaagctgctgatctactgggccagcaccagagaaagcggcgtgcccgatagattttctggcagcggctctggcaccgacttcaccctgacaattagcagcctccaggccgaggatgtggccgtgtactactgccagcagtattacagcacccctctgaccttcggccagggcaccaaggtggaaatcaaactcgaggacctgaagaacgtgttcccacctgaggtggccgtgttcgagcctagcgaggccgagatcagccacacccagaaagccaccctcgtgtgcctggctaccggcttctaccccgaccatgtggaactgtcttggtgggtcaacggcaaagaggtgcacagcggcgtgtgtaccgacccccagccactgaaagaacagcccgccctgaacgacagccggtactgcctgagcagcagactgagagtgtccgccaccttctggcagaacccccggaaccacttcagatgccaggtgcagttctacggcctgagcgagaacgacgagtggacccaggacagagccaagcccgtgacccagatcgtgtctgccgaagcctggggcagagccgattgcggctttaccagcgagagctaccagcagggcgtgctgagcgccaccatcctgtacgagatcctgctgggcaaggccaccctgtacgccgtgctggtgtctgccctggtgctgatggctatggtcaagcggaaggacagccggggaagggccaagcgatctggatctggagcaacaaacttctcactactcaaacaagcaggtgacgtggaggagaatcccgggcctactagtatggactggatttggcgcatccttttccttgtcggcgctgctaccggcgcgcattccttcgaagaagttcagctggttcagagcggagccgaagtgaagaagccaggcgagagcctgaagattagctgcaaaggctccggctacagcttcaccagctactggatcggctgggtccgacagatgcctggcaaaggactggaatggatgggcatcatctaccccggcgacagcgacaccagatacagccctagctttcagggccaagtgaccatcagcgccgacaagagcatcagcacagcctacctccagtggtcctctctgaaggccagcgataccgccatgtactattgcgccagagatgtcggcagatgggctcctggcggcttcctggattattggggacagggcacactggtcaccgtgtctagtacgcgtatccagaaccctgatcctgccgtgtaccagctgcgggatagcaagagcagcgacaagagcgtgtgtctgttcaccgacttcgacagccagaccaacgtgtcccagagcaaggactccgacgtgtacatcaccgataagtgcgtgctggacatgcggagcatggacttcaagagcaactccgccgtggcctggtccaacaagtccgatttcgcctgcgccaacgccttcaacaacagcattatccccgaggacacattcttcccaagccccgagagcagctgcgacgtgaagctggtggaaaagagcttcgagacagacaccaacctgaacttccagaacctgagcgtgatcggcttcagaatcctgctgctgaaagtggccggctttaacctgctgatgaccctgcggctgtggtccagccgcgccaagagaagcggatctggcgtgaagcagaccctgaatttcgacctgctgaagctggctggcgacgtggaatccaacccaggcccttctagaggcgggatccacaccatggctacctacgaggtgctgtgcgaggtggcaagaaagctgggcaccgacgacagagaagtggtgctgttcctgctgaacgtgttcatccctcagcctacactggcccagctgatcggtgcactgagagccctgaaagaggaaggccggctgacctttcctctgctggccgaatgcctgttcagagccggaagaagggatctgctgcgggacctgctgcatctggaccccagatttctggaaagacacctggccggcaccatgagctacttcagcccttaccagctgaccgtgctgcacgttgacggcgaactgtgcgccagagatattcggagcctgatcttcctgagcaaggacaccatcggcagccggtctacccctcagacatttctgcactgggtgtactgcatggaaaacctggacctgctcggccccacagatgtggatgccctgatgtccatgctgagaagcctgagcagagtggacctccagagacaggtgcagacactgatgggactgcacctgagcggacctagccacagccagcactacagacacacccct

SEQ ID NO: 8454 - DNA, 1896 bp, Artificial Sequence
  Synthetic Polynucloetide
atggccttaccagtgaccgccttgctcctgccgctggccttgctgctccacgccgccaggccggacatcgtgatgacacagagccctgatagcctggccgtgtctctgggagagagagccaccatcaactgcaagagcagccagagcgtgctgtactccagcaacaacaagaactacctggcctggtatcagcagaagcccggccagcctcctaagctgctgatctactgggccagcaccagagaaagcggcgtgcccgatagattttctggcagcggctctggcaccgacttcaccctgacaattagcagcctccaggccgaggatgtggccgtgtactactgccagcagtattacagcacccctctgaccttcggccagggcaccaaggtggaaatcaaactcgagatccagaaccctgatcctgccgtgtaccagctgcgggatagcaagagcagcgacaagagcgtgtgtctgttcaccgacttcgacagccagaccaacgtgtcccagagcaaggactccgacgtgtacatcaccgataagtgcgtgctggacatgcggagcatggacttcaagagcaactccgccgtggcctggtccaacaagtccgatttcgcctgcgccaacgccttcaacaacagcattatccccgaggacacattcttcccaagccccgagagcagctgcgacgtgaagctggtggaaaagagcttcgagacagacaccaacctgaacttccagaacctgagcgtgatcggcttcagaatcctgctgctgaaagtggccggctttaacctgctgatgaccctgcggctgtggtccagccgcgccaagagaagcggatctggcgtgaagcagaccctgaatttcgacctgctgaagctggctggcgacgtggaatccaacccaggccctactagtatggactggatttggcgcatccttttccttgtcggcgctgctaccggcgcgcattccttcgaagaagttcagctggttcagagcggagccgaagtgaagaagccaggcgagagcctgaagattagctgcaaaggctccggctacagcttcaccagctactggatcggctgggtccgacagatgcctggcaaaggactggaatggatgggcatcatctaccccggcgacagcgacaccagatacagccctagctttcagggccaagtgaccatcagcgccgacaagagcatcagcacagcctacctccagtggtcctctctgaaggccagcgataccgccatgtactattgcgccagagatgtcggcagatgggctcctggcggcttcctggattattggggacagggcacactggtcaccgtgtctagtacgcgtgaggacctgaagaacgtgttcccacctgaggtggccgtgttcgagcctagcgaggccgagatcagccacacccagaaagccaccctcgtgtgcctggctaccggcttctaccccgaccatgtggaactgtcttggtgggtcaacggcaaagaggtgcacagcggcgtgtgtaccgacccccagccactgaaagaacagcccgccctgaacgacagccggtactgcctgagcagcagactgagagtgtccgccaccttctggcagaacccccggaaccacttcagatgccaggtgcagttctacggcctgagcgagaacgacgagtggacccaggacagagccaagcccgtgacccagatcgtgtctgccgaagcctggggcagagccgattgcggctttaccagcgagagctaccagcagggcgtgctgagcgccaccatcctgtacgagatcctgctgggcaaggccaccctgtacgccgtgctggtgtctgccctggtgctgatggctatggtcaagcggaaggacagccgggga

SEQ ID NO: 8455 - DNA, 2562 bp, Artificial Sequence
  Synthetic Polynucloetide
atggccttaccagtgaccgccttgctcctgccgctggccttgctgctccacgccgccaggccggacatcgtgatgacacagagccctgatagcctggccgtgtctctgggagagagagccaccatcaactgcaagagcagccagagcgtgctgtactccagcaacaacaagaactacctggcctggtatcagcagaagcccggccagcctcctaagctgctgatctactgggccagcaccagagaaagcggcgtgcccgatagattttctggcagcggctctggcaccgacttcaccctgacaattagcagcctccaggccgaggatgtggccgtgtactactgccagcagtattacagcacccctctgaccttcggccagggcaccaaggtggaaatcaaactcgagatccagaaccctgatcctgccgtgtaccagctgcgggatagcaagagcagcgacaagagcgtgtgtctgttcaccgacttcgacagccagaccaacgtgtcccagagcaaggactccgacgtgtacatcaccgataagtgcgtgctggacatgcggagcatggacttcaagagcaactccgccgtggcctggtccaacaagtccgatttcgcctgcgccaacgccttcaacaacagcattatccccgaggacacattcttcccaagccccgagagcagctgcgacgtgaagctggtggaaaagagcttcgagacagacaccaacctgaacttccagaacctgagcgtgatcggcttcagaatcctgctgctgaaagtggccggctttaacctgctgatgaccctgcggctgtggtccagccgcgccaagagaagcggatctggcgtgaagcagaccctgaatttcgacctgctgaagctggctggcgacgtggaatccaacccaggccctactagtatggactggatttggcgcatccttttccttgtcggcgctgctaccggcgcgcattccttcgaagaagttcagctggttcagagcggagccgaagtgaagaagccaggcgagagcctgaagattagctgcaaaggctccggctacagcttcaccagctactggatcggctgggtccgacagatgcctggcaaaggactggaatggatgggcatcatctaccccggcgacagcgacaccagatacagccctagctttcagggccaagtgaccatcagcgccgacaagagcatcagcacagcctacctccagtggtcctctctgaaggccagcgataccgccatgtactattgcgccagagatgtcggcagatgggctcctggcggcttcctggattattggggacagggcacactggtcaccgtgtctagtacgcgtgaggacctgaagaacgtgttcccacctgaggtggccgtgttcgagcctagcgaggccgagatcagccacacccagaaagccaccctcgtgtgcctggctaccggcttctaccccgaccatgtggaactgtcttggtgggtcaacggcaaagaggtgcacagcggcgtgtgtaccgacccccagccactgaaagaacagcccgccctgaacgacagccggtactgcctgagcagcagactgagagtgtccgccaccttctggcagaacccccggaaccacttcagatgccaggtgcagttctacggcctgagcgagaacgacgagtggacccaggacagagccaagcccgtgacccagatcgtgtctgccgaagcctggggcagagccgattgcggctttaccagcgagagctaccagcagggcgtgctgagcgccaccatcctgtacgagatcctgctgggcaaggccaccctgtacgccgtgctggtgtctgccctggtgctgatggctatggtcaagcggaaggacagccggggaagggccaagcgatctggatctggagcaacaaacttctcactactcaaacaagcaggtgacgtggaggagaatcccgggccttctagaggcgggatccacaccatggctacctacgaggtgctgtgcgaggtggcaagaaagctgggcaccgacgacagagaagtggtgctgttcctgctgaacgtgttcatccctcagcctacactggcccagctgatcggtgcactgagagccctgaaagaggaaggccggctgacctttcctctgctggccgaatgcctgttcagagccggaagaagggatctgctgcgggacctgctgcatctggaccccagatttctggaaagacacctggccggcaccatgagctacttcagcccttaccagctgaccgtgctgcacgttgacggcgaactgtgcgccagagatattcggagcctgatcttcctgagcaaggacaccatcggcagccggtctacccctcagacatttctgcactgggtgtactgcatggaaaacctggacctgctcggccccacagatgtggatgccctgatgtccatgctgagaagcctgagcagagtggacctccagagacaggtgcagacactgatgggactgcacctgagcggacctagccacagccagcactacagacacacccct

SEQ ID NO: 8456 - DNA, 2721 bp, Artificial Sequence
  Synthetic Polynucloetide
atggccttaccagtgaccgccttgctcctgccgctggccttgctgctccacgccgccaggccgctcgaggggaaaccaattcccaaccctcttctgggactggattcaaccggcagcggcgaggacctgaagaacgtgttcccacctgaggtggccgtgttcgagcctagcaaggccgagatcgcccacacccagaaagccaccctcgtgtgcctggctaccggcttctaccccgaccatgtggaactgtcttggtgggtcaacggcaaagaggtgcacagcggcgtgtgtaccgacccccagccactgaaagaacagcccgccctgaacgacagccggtactgcctgagcagcagactgagagtgtccgccaccttctggcagaacccccggaaccacttcagatgccaggtgcagttctacggcctgagcgagaacgacgagtggacccaggacagagccaagcccgtgacccagatcgtgtctgccgaagcctggggcagagccgattgcggcatcaccagcgccagctaccaccagggcgtgctgagcgccaccatcctgtacgagatcctgctgggcaaggccaccctgtacgccgtgctggtgtctgccctggtgctgatggctatggtcaagcggaaggacagccggggaagggccaagcgatctggatctggagcaacaaacttctcactactcaaacaagcaggtgacgtggaggagaatcccgggcctactagcatggccttaccagtgaccgccttgctcctgccgctggccttgctgctccacgccgccaggccggacatcgtgatgacacagagccctgatagcctggccgtgtctctgggagagagagccaccatcaactgcaagagcagccagagcgtgctgtactccagcaacaacaagaactacctggcctggtatcagcagaagcccggccagcctcctaagctgctgatctactgggccagcaccagagaaagcggcgtgcccgatagattttctggcagcggctctggcaccgacttcaccctgacaattagcagcctccaggccgaggatgtggccgtgtactactgccagcagtattacagcacccctctgaccttcggccagggcaccaaggtggaaatcaaaggcggaggcggaagtggaggcggaggatctggcggcggaggctctgaagttcagctggttcagagcggagccgaagtgaagaagccaggcgagagcctgaagattagctgcaaaggctccggctacagcttcaccagctactggatcggctgggtccgacagatgcctggcaaaggactggaatggatgggcatcatctaccccggcgacagcgacaccagatacagccctagctttcagggccaagtgaccatcagcgccgacaagagcatcagcacagcctacctccagtggtcctctctgaaggccagcgataccgccatgtactattgcgccagagatgtcggcagatgggctcctggcggcttcctggattattggggacagggcacactggtcaccgtgtctagtacgcgtgagcagaaactgatctcggaagaggatgggagcggcatccagaaccctgatcctgccgtgtaccagctgcgggatagcaagagcagcgacaagagcgtgtgtctgttcaccgacttcgacagccagaccaacgtgtcccagagcaaggactccgacgtgtacatcaccgataagtgcgtgctggacatgcggagcatggacttcaagagcaactccgccgtggcctggtccaacaagtccgatttcgcctgcgccaacgccttcaacaacagcattatccccgaggacacattcttcccaagcagcgacgtgccctgcgacgtgaagctggtggaaaagagcttcgagacagacaccaacctgaacttccagaacctgagcgtgatcggcttcagaatcctgctgctgaaagtggccggctttaacctgctgatgaccctgcggctgtggtccagccgcgccaagagaagcggatctggcgtgaagcagaccctgaatttcgacctgctgaagctggctggcgacgtggaatccaacccaggcccttctagaggccatatgaccgagtacaagcccacggtgcgcctcgccacccgcgacgacgtccccagggccgtacgcaccctcgccgccgcgttcgccgactaccccgccacgcgccacaccgtcgatccggaccgccacatcgagcgggtcaccgagctgcaagaactcttcctcacgcgcgtcgggctcgacatcggcaaggtgtgggtcgcggacgacggcgccgcggtggcggtctggaccacgccggagagcgtcgaagcgggggcggtgttcgccgagatcggcccgcgcatggccgagttgagcggttcccggctggccgcgcagcaacagatggaaggcctcctggcgccgcaccggcccaaggagcccgcgtggttcctggccaccgtcggcgtctcgcccgaccaccagggcaagggtctgggcagcgccgtcgtgctccccggagtggaggcggccgagcgcgccggggtgcccgccttcctggagacctccgcgccccgcaacctccccttctacgagcggctcggcttcaccgtcaccgccgacgtcgaggtgcccgaaggaccgcgcacctggtgcatgacccgcaagcccggtgcctga

SEQ ID NO: 8457 - DNA, 2724 bp, Artificial Sequence
  Synthetic Polynucloetide
atggccttaccagtgaccgccttgctcctgccgctggccttgctgctccacgccgccaggccgctcgagcagaaactgatctcggaagaggatctgggctccggcgatcgccctgatcctgccgtgtaccagctgcgggatagcaagagcagcgacaagagcgtgtgtctgttcaccgacttcgacagccagaccaacgtgtcccagagcaaggactccgacgtgtacatcaccgataagtgcgtgctggacatgcggagcatggacttcaagagcaactccgccgtggcctggtccaacaagtccgatttcgcctgcgccaacgccttcaacaacagcattatccccgaggacacattcttcccaagccccgagagcagctgcgacgtgaagctggtggaaaagagcttcgagacagacaccaacctgaacttccagaacctgagcgtgatcggcttcagaatcctgctgctgaaagtggccggctttaacctgctgatgaccctgcggctgtggtccagctctagtcgcgccaagagaagcggatctggcgtgaagcagaccctgaatttcgacctgctgaagctggctggcgacgtggaatccaacccaggccccactagcatggccttaccagtgaccgccttgctcctgccgctggccttgctgctccacgccgccaggccggacatcgtgatgacacagagccctgatagcctggccgtgtctctgggagagagagccaccatcaactgcaagagcagccagagcgtgctgtactccagcaacaacaagaactacctggcctggtatcagcagaagcccggccagcctcctaagctgctgatctactgggccagcaccagagaaagcggcgtgcccgatagattttctggcagcggctctggcaccgacttcaccctgacaattagcagcctccaggccgaggatgtggccgtgtactactgccagcagtattacagcacccctctgaccttcggccagggcaccaaggtggaaatcaaaggcggaggcggaagtggaggcggaggatctggcggcggaggctctgaagttcagctggttcagagcggagccgaagtgaagaagccaggcgagagcctgaagattagctgcaaaggctccggctacagcttcaccagctactggatcggctgggtccgacagatgcctggcaaaggactggaatggatgggcatcatctaccccggcgacagcgacaccagatacagccctagctttcagggccaagtgaccatcagcgccgacaagagcatcagcacagcctacctccagtggtcctctctgaaggccagcgataccgccatgtactattgcgccagagatgtcggcagatgggctcctggcggcttcctggattattggggacagggcacactggtcaccgtgtctagtacgcgtgggaaaccaattcccaaccctcttctgggactggattcaaccggcagcggcgaggacctgaagaacgtgttcccacctgaggtggccgtgttcgagcctagcgaggccgagatcagccacacccagaaagccaccctcgtgtgcctggctaccggcttctaccccgaccatgtggaactgtcttggtgggtcaacggcaaagaggtgcacagcggcgtgtgtaccgacccccagccactgaaagaacagcccgccctgaacgacagccggtactgcctgagcagcagactgagagtgtccgccaccttctggcagaacccccggaaccacttcagatgccaggtgcagttctacggcctgagcgagaacgacgagtggacccaggacagagccaagcccgtgacccagatcgtgtctgccgaagcctggggcagagccgattgcggctttaccagcgagagctaccagcagggcgtgctgagcgccaccatcctgtacgagatcctgctgggcaaggccaccctgtacgccgtgctggtgtctgccctggtgctgatggctatggtcaagcggaaggacagccggggaagggccaagcgatctggatctggagcaacaaacttctcactactcaaacaagcaggtgacgtggaggagaatcccgggccttctagaggccatatgaccgagtacaagcccacggtgcgcctcgccacccgcgacgacgtccccagggccgtacgcaccctcgccgccgcgttcgccgactaccccgccacgcgccacaccgtcgatccggaccgccacatcgagcgggtcaccgagctgcaagaactcttcctcacgcgcgtcgggctcgacatcggcaaggtgtgggtcgcggacgacggcgccgcggtggcggtctggaccacgccggagagcgtcgaagcgggggcggtgttcgccgagatcggcccgcgcatggccgagttgagcggttcccggctggccgcgcagcaacagatggaaggcctcctggcgccgcaccggcccaaggagcccgcgtggttcctggccaccgtcggcgtctcgcccgaccaccagggcaagggtctgggcagcgccgtcgtgctccccggagtggaggcggccgagcgcgccggggtgcccgccttcctggagacctccgcgccccgcaacctccccttctacgagcggctcggcttcaccgtcaccgccgacgtcgaggtgcccgaaggaccgcgcacctggtgcatgacccgcaagcccggtgcctga

SEQ ID NO: 8458 - DNA, 2586 bp, Artificial Sequence
  Synthetic Polynucloetide
atggccttaccagtgaccgccttgctcctgccgctggccttgctgctccacgccgccaggccggacatcgtgatgacacagagccctgatagcctggccgtgtctctgggagagagagccaccatcaactgcaagagcagccagagcgtgctgtactccagcaacaacaagaactacctggcctggtatcagcagaagcccggccagcctcctaagctgctgatctactgggccagcaccagagaaagcggcgtgcccgatagattttctggcagcggctctggcaccgacttcaccctgacaattagcagcctccaggccgaggatgtggccgtgtactactgccagcagtattacagcacccctctgaccttcggccagggcaccaaggtggaaatcaaactcgaggacctgaagaacgtgttcccacctgaggtggccgtgttcgagcctagcgaggccgagatcagccacacccagaaagccaccctcgtgtgcctggctaccggcttctaccccgaccatgtggaactgtcttggtgggtcaacggcaaagaggtgcacagcggcgtgtctaccgacccccagccactgaaagaacagcccgccctgaacgacagccggtactgcctgagcagcagactgagagtgtccgccaccttctggcagaacccccggaaccacttcagatgccaggtgcagttctacggcctgagcgagaacgacgagtggacccaggacagagccaagcccgtgacccagatcgtgtctgccgaagcctggggcagagccgattgcggctttaccagcgagagctaccagcagggcgtgctgagcgccaccatcctgtacgagatcctgctgggcaaggccaccctgtacgccgtgctggtgtctgccctggtgctgatggctatggtcaagcggaaggacagccggggaagggccaagcgatctggatctggagcaacaaacttctcactactcaaacaagcaggtgacgtggaggagaatcccgggcctactagtatggactggatttggcgcatccttttccttgtcggcgctgctaccggcgcgcattccttcgaagaagttcagctggttcagagcggagccgaagtgaagaagccaggcgagagcctgaagattagctgcaaaggctccggctacagcttcaccagctactggatcggctgggtccgacagatgcctggcaaaggactggaatggatgggcatcatctaccccggcgacagcgacaccagatacagccctagctttcagggccaagtgaccatcagcgccgacaagagcatcagcacagcctacctccagtggtcctctctgaaggccagcgataccgccatgtactattgcgccagagatgtcggcagatgggctcctggcggcttcctggattattggggacagggcacactggtcaccgtgtctagtacgcgtatccagaaccctgatcctgccgtgtaccagctgcgggatagcaagagcagcgacaagagcgtgtgtctgttcaccgacttcgacagccagaccaacgtgtcccagagcaaggactccgacgtgtacatcaccgataagaccgtgctggacatgcggagcatggacttcaagagcaactccgccgtggcctggtccaacaagtccgatttcgcctgcgccaacgccttcaacaacagcattatccccgaggacacattcttcccaagccccgagagcagctgcgacgtgaagctggtggaaaagagcttcgagacagacaccaacctgaacttccagaacctgagcgtgatcggcttcagaatcctgctgctgaaagtggccggctttaacctgctgatgaccctgcggctgtggtccagccgcgccaagagaagcggatctggcgtgaagcagaccctgaatttcgacctgctgaagctggctggcgacgtggaatccaacccaggcccttctagaggccatatgaccgagtacaagcccacggtgcgcctcgccacccgcgacgacgtccccagggccgtacgcaccctcgccgccgcgttcgccgactaccccgccacgcgccacaccgtcgatccggaccgccacatcgagcgggtcaccgagctgcaagaactcttcctcacgcgcgtcgggctcgacatcggcaaggtgtgggtcgcggacgacggcgccgcggtggcggtctggaccacgccggagagcgtcgaagcgggggcggtgttcgccgagatcggcccgcgcatggccgagttgagcggttcccggctggccgcgcagcaacagatggaaggcctcctggcgccgcaccggcccaaggagcccgcgtggttcctggccaccgtcggcgtctcgcccgaccaccagggcaagggtctgggcagcgccgtcgtgctccccggagtggaggcggccgagcgcgccggggtgcccgccttcctggagacctccgcgccccgcaacctccccttctacgagcggctcggcttcaccgtcaccgccgacgtcgaggtgcccgaaggaccgcgcacctggtgcatgacccgcaagcccggtgcctga

SEQ ID NO: 8459 - DNA, 2832 bp, Artificial Sequence
  Synthetic Polynucloetide
atggccttaccagtgaccgccttgctcctgccgctggccttgctgctccacgccgccaggccggacatcgtgatgacacagagccctgatagcctggccgtgtctctgggagagagagccaccatcaactgcaagagcagccagagcgtgctgtactccagcaacaacaagaactacctggcctggtatcagcagaagcccggccagcctcctaagctgctgatctactgggccagcaccagagaaagcggcgtgcccgatagattttctggcagcggctctggcaccgacttcaccctgacaattagcagcctccaggccgaggatgtggccgtgtactactgccagcagtattacagcacccctctgaccttcggccagggcaccaaggtggaaatcaaactcgaggacctgaagaacgtgttcccacctgaggtggccgtgttcgagcctagcgaggccgagatcagccacacccagaaagccaccctcgtgtgcctggctaccggcttctaccccgaccatgtggaactgtcttggtgggtcaacggcaaagaggtgcacagcggcgtgtctaccgacccccagccactgaaagaacagcccgccctgaacgacagccggtactgcctgagcagcagactgagagtgtccgccaccttctggcagaacccccggaaccacttcagatgccaggtgcagttctacggcctgagcgagaacgacgagtggacccaggacagagccaagcccgtgacccagatcgtgtctgccgaagcctggggcagagccgattgcggctttaccagcgagagctaccagcagggcgtgctgagcgccaccatcctgtacgagatcctgctgggcaaggccaccctgtacgccgtgctggtgtctgccctggtgctgatggctatggtcaagcggaaggacagccggggaagggccaagcgatctggatctggagcaacaaacttctcactactcaaacaagcaggtgacgtggaggagaatcccgggcctactagtatggactggatttggcgcatccttttccttgtcggcgctgctaccggcgcgcattccttcgaagaagttcagctggttcagagcggagccgaagtgaagaagccaggcgagagcctgaagattagctgcaaaggctccggctacagcttcaccagctactggatcggctgggtccgacagatgcctggcaaaggactggaatggatgggcatcatctaccccggcgacagcgacaccagatacagccctagctttcagggccaagtgaccatcagcgccgacaagagcatcagcacagcctacctccagtggtcctctctgaaggccagcgataccgccatgtactattgcgccagagatgtcggcagatgggctcctggcggcttcctggattattggggacagggcacactggtcaccgtgtctagtacgcgtgagcagaaactgatctcggaagaggatgggagcggcaccccattcccttctctggcccctcccatcatgctgctggtggacggcaagcagcagatggtggtcgtgtgcctggtgctggatgtggccccacctggactggacagccccatctggtttagcgccggcaatggctctgccctggacgcctttacctacggcccaagccctgccaccgatggcacctggacaaatctggcccacctgagcctgcccagcgaggaactggcttcttgggagcctctcgtgtgccacacaggacctggcgctgagggacacagcagatccacccagcctatgcacctgtctggcgaggccagcaccgccagaacctgtcctcaggaacctctgagaggcacccctggcggagcactgtggctgggagtgctgagactgctgctgttcaagctgctgctgtttgacctgctgctgacctgctcctgtctgtgcgatcctgccggccctctgccttctcctgccaccaccacaagactgagagccctgggcagccacagactgcaccctgccacagagacaggcggcagagaggccacaagcagccctagaccccagcccagagacagaagatggggcgataccccccctggcagaaagcctggatctccagtccgcgccaagagaagcggatctggcgtgaagcagaccctgaatttcgacctgctgaagctggctggcgacgtggaatccaacccaggcccttctagaggccatatgaccgagtacaagcccacggtgcgcctcgccacccgcgacgacgtccccagggccgtacgcaccctcgccgccgcgttcgccgactaccccgccacgcgccacaccgtcgatccggaccgccacatcgagcgggtcaccgagctgcaagaactcttcctcacgcgcgtcgggctcgacatcggcaaggtgtgggtcgcggacgacggcgccgcggtggcggtctggaccacgccggagagcgtcgaagcgggggcggtgttcgccgagatcggcccgcgcatggccgagttgagcggttcccggctggccgcgcagcaacagatggaaggcctcctggcgccgcaccggcccaaggagcccgcgtggttcctggccaccgtcggcgtctcgcccgaccaccagggcaagggtctgggcagcgccgtcgtgctccccggagtggaggcggccgagcgcgccggggtgcccgccttcctggagacctccgcgccccgcaacctccccttctacgagcggctcggcttcaccgtcaccgccgacgtcgaggtgcccgaaggaccgcgcacctggtgcatgacccgcaagcccggtgcctga

SEQ ID NO: 8460 - DNA, 2886 bp, Artificial Sequence
  Synthetic Polynucloetide
atggccttaccagtgaccgccttgctcctgccgctggccttgctgctccacgccgccaggccgctcgaggacctgaagaacgtgttcccacctgaggtggccgtgttcgagcctagcgaggccgagatcagccacacccagaaagccaccctcgtgtgcctggctaccggcttctaccccgaccatgtggaactgtcttggtgggtcaacggcaaagaggtgcacagcggcgtgtctaccgacccccagccactgaaagaacagcccgccctgaacgacagccggtactgcctgagcagcagactgagagtgtccgccaccttctggcagaacccccggaaccacttcagatgccaggtgcagttctacggcctgagcgagaacgacgagtggacccaggacagagccaagcccgtgacccagatcgtgtctgccgaagcctggggcagagccgattgcggctttaccagcgagagctaccagcagggcgtgctgagcgccaccatcctgtacgagatcctgctgggcaaggccaccctgtacgccgtgctggtgtctgccctggtgctgatggctatggtcaagcggaaggacagccggggaagggccaagcgatctggatctggagcaacaaacttctcactactcaaacaagcaggtgacgtggaggagaatcccgggcctactagcatggccttaccagtgaccgccttgctcctgccgctggccttgctgctccacgccgccaggccggacatcgtgatgacacagagccctgatagcctggccgtgtctctgggagagagagccaccatcaactgcaagagcagccagagcgtgctgtactccagcaacaacaagaactacctggcctggtatcagcagaagcccggccagcctcctaagctgctgatctactgggccagcaccagagaaagcggcgtgcccgatagattttctggcagcggctctggcaccgacttcaccctgacaattagcagcctccaggccgaggatgtggccgtgtactactgccagcagtattacagcacccctctgaccttcggccagggcaccaaggtggaaatcaaaggcggaggcggaagtggaggcggaggatctggcggcggaggctctgaagttcagctggttcagagcggagccgaagtgaagaagccaggcgagagcctgaagattagctgcaaaggctccggctacagcttcaccagctactggatcggctgggtccgacagatgcctggcaaaggactggaatggatgggcatcatctaccccggcgacagcgacaccagatacagccctagctttcagggccaagtgaccatcagcgccgacaagagcatcagcacagcctacctccagtggtcctctctgaaggccagcgataccgccatgtactattgcgccagagatgtcggcagatgggctcctggcggcttcctggattattggggacagggcacactggtcaccgtgtctagtacgcgtgagcagaaactgatctcggaagaggatctggggagcggcaccccattcccttctctggcccctcccatcatgctgctggtggacggcaagcagcagatggtggtcgtgtgcctggtgctggatgtggccccacctggactggacagccccatctggtttagcgccggcaatggctctgccctggacgcctttacctacggcccaagccctgccaccgatggcacctggacaaatctggcccacctgagcctgcccagcgaggaactggcttcttgggagcctctcgtgtgccacacaggacctggcgctgagggacacagcagatccacccagcctatgcacctgtctggcgaggccagcaccgccagaacctgtcctcaggaacctctgagaggcacccctggcggagcactgtggctgggagtgctgagactgctgctgttcaagctgctgctgtttgacctgctgctgacctgctcctgtctgtgcgatcctgccggccctctgccttctcctgccaccaccacaagactgagagccctgggcagccacagactgcaccctgccacagagacaggcggcagagaggccacaagcagccctagaccccagcccagagacagaagatggggcgataccccccctggcagaaagcctggatctccagtccgcgccaagagaagcggatctggcgtgaagcagaccctgaatttcgacctgctgaagctggctggcgacgtggaatccaacccaggcccttctagatctagaggccatatgaccgagtacaagcccacggtgcgcctcgccacccgcgacgacgtccccagggccgtacgcaccctcgccgccgcgttcgccgactaccccgccacgcgccacaccgtcgatccggaccgccacatcgagcgggtcaccgagctgcaagaactcttcctcacgcgcgtcgggctcgacatcggcaaggtgtgggtcgcggacgacggcgccgcggtggcggtctggaccacgccggagagcgtcgaagcgggggcggtgttcgccgagatcggcccgcgcatggccgagttgagcggttcccggctggccgcgcagcaacagatggaaggcctcctggcgccgcaccggcccaaggagcccgcgtggttcctggccaccgtcggcgtctcgcccgaccaccagggcaagggtctgggcagcgccgtcgtgctccccggagtggaggcggccgagcgcgccggggtgcccgccttcctggagacctccgcgccccgcaacctccccttctacgagcggctcggcttcaccgtcaccgccgacgtcgaggtgcccgaaggaccgcgcacctggtgcatgacccgcaagcccggtgcctga

SEQ ID NO: 8461 - DNA, 2697 bp, Artificial Sequence
  Synthetic Polynucloetide
atggccttaccagtgaccgccttgctcctgccgctggccttgctgctccacgccgccaggccggacatcgtgatgacacagagccctgatagcctggccgtgtctctgggagagagagccaccatcaactgcaagagcagccagagcgtgctgtactccagcaacaacaagaactacctggcctggtatcagcagaagcccggccagcctcctaagctgctgatctactgggccagcaccagagaaagcggcgtgcccgatagattttctggcagcggctctggcaccgacttcaccctgacaattagcagcctccaggccgaggatgtggccgtgtactactgccagcagtattacagcacccctctgaccttcggccagggcaccaaggtggaaatcaaactcgaggggaaaccaattcccaaccctcttctgggactggattcaaccggcagcggcgacaagcagctggacgccgacgtgtcccccaagcctaccatcttcctgccctctatcgccgagacaaagctccagaaggccggcacctacctgtgcctgctggaaaagttcttcccagatgtgattaagatccactggcaggaaaagaagtccaacaccatcctgggcagccaggaaggcaacaccatgaagaccaacgacacctacatgaagttcagctggctgaccgtgcccgagaagtccctggacaaagaacacagatgcatcgtgcggcacgaaaacaacaagaacggcgtggaccaggaaatcatcttcccacccatcaagaccgatgtgattacaatggaccccaaggacaactgctccaaggacgccaacgataccctgctgctccagctgaccaacaccagcgcctactacatgtacttgttgctgctgctgaagtccgtggtgtacttcgccatcatcacatgctgcctgctgcggagaaccgccttctgctgcaacggcgagaagtctagggccaagcgatctggatctggagcaacaaacttctcactactcaaacaagcaggtgacgtggaggagaatcccgggcctactagtatggactggatttggcgcatccttttccttgtcggcgctgctaccggcgcgcattccttcgaagaagttcagctggttcagagcggagccgaagtgaagaagccaggcgagagcctgaagattagctgcaaaggctccggctacagcttcaccagctactggatcggctgggtccgacagatgcctggcaaaggactggaatggatgggcatcatctaccccggcgacagcgacaccagatacagccctagctttcagggccaagtgaccatcagcgccgacaagagcatcagcacagcctacctccagtggtcctctctgaaggccagcgataccgccatgtactattgcgccagagatgtcggcagatgggctcctggcggcttcctggattattggggacagggcacactggtcaccgtgtctagtacgcgtgagcagaaactgatctcggaagaggatgggagcggcagccagcctcacaccaagcccagcgtgttcgtgatgaagaacggcaccaacgtggcctgcctcgtgaaagagttctaccccaaggacatcaggatcaacctggtgtccagcaagaagatcaccgagttcgaccccgccatcgtgatctcccccagcggcaagtacaacgccgtgaagctggggaagtacgaggacagcaacagcgtgacctgctccgtgcagcacgacaacaagaccgtgcacagcaccgactttgaagtgaaaaccgactccaccgaccacgtgaagcccaaagagacagagaacaccaagcagcccagcaagagctgccacaagcccaaggccatcgtgcacaccgagaaagtgaacatgatgagcctgaccgtgctgggcctgcggatgctgttcgccaaaaccgtggccgtgaacttcctgctgaccgccaagctgttcttcctccgcgccaagagaagcggatctggcgtgaagcagaccctgaatttcgacctgctgaagctggctggcgacgtggaatccaacccaggcccttctagaggccatatgaccgagtacaagcccacggtgcgcctcgccacccgcgacgacgtccccagggccgtacgcaccctcgccgccgcgttcgccgactaccccgccacgcgccacaccgtcgatccggaccgccacatcgagcgggtcaccgagctgcaagaactcttcctcacgcgcgtcgggctcgacatcggcaaggtgtgggtcgcggacgacggcgccgcggtggcggtctggaccacgccggagagcgtcgaagcgggggcggtgttcgccgagatcggcccgcgcatggccgagttgagcggttcccggctggccgcgcagcaacagatggaaggcctcctggcgccgcaccggcccaaggagcccgcgtggttcctggccaccgtcggcgtctcgcccgaccaccagggcaagggtctgggcagcgccgtcgtgctccccggagtggaggcggccgagcgcgccggggtgcccgccttcctggagacctccgcgccccgcaacctccccttctacgagcggctcggcttcaccgtcaccgccgacgtcgaggtgcccgaaggaccgcgcacctggtgcatgacccgcaagcccggtgcctga

SEQ ID NO: 8462 - DNA, 1908 bp, Artificial Sequence
  Synthetic Polynucloetide
atggccttaccagtgaccgccttgctcctgccgctggccttgctgctccacgccgccaggccggacatcgtgatgacacagagccctgatagcctggccgtgtctctgggagagagagccaccatcaactgcaagagcagccagagcgtgctgtactccagcaacaacaagaactacctggcctggtatcagcagaagcccggccagcctcctaagctgctgatctactgggccagcaccagagaaagcggcgtgcccgatagattttctggcagcggctctggcaccgacttcaccctgacaattagcagcctccaggccgaggatgtggccgtgtactactgccagcagtattacagcacccctctgaccttcggccagggcaccaaggtggaaatcaaactcgagagccagcctcacaccaagcccagcgtgttcgtgatgaagaacggcaccaacgtggcctgcctcgtgaaagagttctaccccaaggacatcaggatcaacctggtgtccagcaagaagatcaccgagttcgaccccgccatcgtgatctcccccagcggcaagtacaacgccgtgaagctggggaagtacgaggacagcaacagcgtgacctgctccgtgcagcacgacaacaagaccgtgcacagcaccgactttgaagtgaaaaccgactccaccgaccacgtgaagcccaaagagacagagaacaccaagcagcccagcaagagctgccacaagcccaaggccatcgtgcacaccgagaaagtgaacatgatgagcctgaccgtgctgggcctgcggatgctgttcgccaaaaccgtggccgtgaacttcctgctgaccgccaagctgttcttcctcagggccaagcgatctggatctggagcaacaaacttctcactactcaaacaagcaggtgacgtggaggagaatcccgggcctactagtatggactggatttggcgcatccttttccttgtcggcgctgctaccggcgcgcattccttcgaagaagttcagctggttcagagcggagccgaagtgaagaagccaggcgagagcctgaagattagctgcaaaggctccggctacagcttcaccagctactggatcggctgggtccgacagatgcctggcaaaggactggaatggatgggcatcatctaccccggcgacagcgacaccagatacagccctagctttcagggccaagtgaccatcagcgccgacaagagcatcagcacagcctacctccagtggtcctctctgaaggccagcgataccgccatgtactattgcgccagagatgtcggcagatgggctcctggcggcttcctggattattggggacagggcacactggtcaccgtgtctagtacgcgtgacaagcagctggacgccgacgtgtcccccaagcctaccatcttcctgccctctatcgccgagacaaagctccagaaggccggcacctacctgtgcctgctggaaaagttcttcccagatgtgattaagatccactggcaggaaaagaagtccaacaccatcctgggcagccaggaaggcaacaccatgaagaccaacgacacctacatgaagttcagctggctgaccgtgcccgagaagtccctggacaaagaacacagatgcatcgtgcggcacgaaaacaacaagaacggcgtggaccaggaaatcatcttcccacccatcaagaccgatgtgattacaatggaccccaaggacaactgctccaaggacgccaacgataccctgctgctccagctgaccaacaccagcgcctactacatgtacttgttgctgctgctgaagtccgtggtgtacttcgccatcatcacatgctgcctgctgcggagaaccgccttctgctgcaacggcgagaagtct

SEQ ID NO: 8463 - DNA, 2742 bp, Artificial Sequence
  Synthetic Polynucloetide
atggccttaccagtgaccgccttgctcctgccgctggccttgctgctccacgccgccaggccgctcgaggggaaaccaattcccaaccctcttctgggactggattcaaccggcagcggcgacaagcagctggacgccgacgtgtcccccaagcctaccatcttcctgccctctatcgccgagacaaagctccagaaggccggcacctacctgtgcctgctggaaaagttcttcccagatgtgattaagatccactggcaggaaaagaagtccaacaccatcctgggcagccaggaaggcaacaccatgaagaccaacgacacctacatgaagttcagctggctgaccgtgcccgagaagtccctggacaaagaacacagatgcatcgtgcggcacgaaaacaacaagaacggcgtggaccaggaaatcatcttcccacccatcaagaccgatgtgattacaatggaccccaaggacaactgctccaaggacgccaacgataccctgctgctccagctgaccaacaccagcgcctactacatgtacttgttgctgctgctgaagtccgtggtgtacttcgccatcatcacatgctgcctgctgcggagaaccgccttctgctgcaacggcgagaagtctagggccaagcgatctggatctggagcaacaaacttctcactactcaaacaagcaggtgacgtggaggagaatcccgggcctactagcatggccttaccagtgaccgccttgctcctgccgctggccttgctgctccacgccgccaggccggacatcgtgatgacacagagccctgatagcctggccgtgtctctgggagagagagccaccatcaactgcaagagcagccagagcgtgctgtactccagcaacaacaagaactacctggcctggtatcagcagaagcccggccagcctcctaagctgctgatctactgggccagcaccagagaaagcggcgtgcccgatagattttctggcagcggctctggcaccgacttcaccctgacaattagcagcctccaggccgaggatgtggccgtgtactactgccagcagtattacagcacccctctgaccttcggccagggcaccaaggtggaaatcaaaggcggaggcggaagtggaggcggaggatctggcggcggaggctctgaagttcagctggttcagagcggagccgaagtgaagaagccaggcgagagcctgaagattagctgcaaaggctccggctacagcttcaccagctactggatcggctgggtccgacagatgcctggcaaaggactggaatggatgggcatcatctaccccggcgacagcgacaccagatacagccctagctttcagggccaagtgaccatcagcgccgacaagagcatcagcacagcctacctccagtggtcctctctgaaggccagcgataccgccatgtactattgcgccagagatgtcggcagatgggctcctggcggcttcctggattattggggacagggcacactggtcaccgtgtctagtacgcgtgagcagaaactgatctcggaagaggatgggagcggcagccagcctcacaccaagcccagcgtgttcgtgatgaagaacggcaccaacgtggcctgcctcgtgaaagagttctaccccaaggacatcaggatcaacctggtgtccagcaagaagatcaccgagttcgaccccgccatcgtgatctcccccagcggcaagtacaacgccgtgaagctggggaagtacgaggacagcaacagcgtgacctgctccgtgcagcacgacaacaagaccgtgcacagcaccgactttgaagtgaaaaccgactccaccgaccacgtgaagcccaaagagacagagaacaccaagcagcccagcaagagctgccacaagcccaaggccatcgtgcacaccgagaaagtgaacatgatgagcctgaccgtgctgggcctgcggatgctgttcgccaaaaccgtggccgtgaacttcctgctgaccgccaagctgttcttcctccgcgccaagagaagcggatctggcgtgaagcagaccctgaatttcgacctgctgaagctggctggcgacgtggaatccaacccaggcccttctagaggccatatgaccgagtacaagcccacggtgcgcctcgccacccgcgacgacgtccccagggccgtacgcaccctcgccgccgcgttcgccgactaccccgccacgcgccacaccgtcgatccggaccgccacatcgagcgggtcaccgagctgcaagaactcttcctcacgcgcgtcgggctcgacatcggcaaggtgtgggtcgcggacgacggcgccgcggtggcggtctggaccacgccggagagcgtcgaagcgggggcggtgttcgccgagatcggcccgcgcatggccgagttgagcggttcccggctggccgcgcagcaacagatggaaggcctcctggcgccgcaccggcccaaggagcccgcgtggttcctggccaccgtcggcgtctcgcccgaccaccagggcaagggtctgggcagcgccgtcgtgctccccggagtggaggcggccgagcgcgccggggtgcccgccttcctggagacctccgcgccccgcaacctccccttctacgagcggctcggcttcaccgtcaccgccgacgtcgaggtgcccgaaggaccgcgcacctggtgcatgacccgcaagcccggtgcctga

SEQ ID NO: 8464 - DNA, 3117 bp, Artificial Sequence
  Synthetic Polynucloetide
atggccttaccagtgaccgccttgctcctgccgctggccttgctgctccacgccgccaggccggacatcgtgatgacacagagccctgatagcctggccgtgtctctgggagagagagccaccatcaactgcaagagcagccagagcgtgctgtactccagcaacaacaagaactacctggcctggtatcagcagaagcccggccagcctcctaagctgctgatctactgggccagcaccagagaaagcggcgtgcccgatagattttctggcagcggctctggcaccgacttcaccctgacaattagcagcctccaggccgaggatgtggccgtgtactactgccagcagtattacagcacccctctgaccttcggccagggcaccaaggtggaaatcaaaggacagcctaaggccaatcctaccgtgacactgttccctccaagcagcgaagaactccaggccaacaaggccacacttgtgtgcctgatctccgacttctaccctggggctgtgacagtggcttggaaggccgatggatctcctgtgaaagccggcgtggaaaccaccaagccatccaagcagagcaacaacaaatacgccgccagctcctacctgagcctgacacctgagcagtggaagtcccacagatcctacagctgccaagtgacccacgaaggcagcaccgtggaaaagacagtggcccctacagagtgcagcggatcccagagcttcggcctgctggaccccaagctgtgctacctgctggatggcatcctgttcatctacggcgtgatcctgaccgccctgttcctgagagtgaagttcagcagaagcgccgacgcccctgcctaccagcagggacagaaccaactgtacaacgagctgaacctgggcagacgggaagagtacgacgtgctggacaagcggagaggcagggaccctgagatgggcggaaagccccagcggagaaagaacccccaggaaggactgtataacgaactccagaaagacaagatggccgaagcctacagcgagatcggcatgaagggcgagcggagaagaggcaagggccacgatggcctgtaccagggcctgagcaccgccaccaaggacacctatgacgccctgcacatgcaggccctgcctccaagaagggccaagcgatctggatctggagcaacaaacttctcactactcaaacaagcaggtgacgtggaggagaatcccgggcctactagtatggactggatttggcgcatccttttccttgtcggcgctgctaccggcgcgcattccttcgaagaagttcagctggttcagagcggagccgaagtgaagaagccaggcgagagcctgaagattagctgcaaaggctccggctacagcttcaccagctactggatcggctgggtccgacagatgcctggcaaaggactggaatggatgggcatcatctaccccggcgacagcgacaccagatacagccctagctttcagggccaagtgaccatcagcgccgacaagagcatcagcacagcctacctccagtggtcctctctgaaggccagcgataccgccatgtactattgcgccagagatgtcggcagatgggctcctggcggcttcctggattattggggacagggcacactggtcaccgtgtctagtgcctctacaaagggaccctccgtgtttcctctggctcccagcagcaagtctacaagcggaggaacagccgctctgggctgcctggtcaaggattactttcccgagcctgtgaccgtgtcctggaatagcggagcactgacaagcggcgtgcacacctttccagccgtgctgcaaagcagcggcctgtactctctgagcagcgtggtcacagtgcctagctctagcctgggcacccagacctacatctgcaatgtgaaccacaagcctagcaacaccaaggtggacaagagagtggaacccaagagctgtggtacccagagttttgggttgttggaccctaaattgtgctatctgttggacggaatcctgttcatttacggagtgatcctgaccgcattgttcctgcgggttaagttttccagatccgcagacgcacccgcttaccaacaagggcagaaccaactctacaatgaacttaatttggggcggagggaagagtacgacgttctggacaaaaggaggggacgagatcccgagatgggcggaaagcctcagcgaaggaagaatccgcaagaggggctttataacgaactccagaaagataaaatggcagaagcctatagtgagattgggatgaagggagaaaggaggaggggtaaaggtcacgatgggttgtaccaaggattgagcacagccactaaagatacctatgatgcgctccacatgcaggccctgccgccaagacgcgccaagagaagcggatctggcgtgaagcagaccctgaatttcgacctgctgaagctggctggcgacgtggaatccaacccaggcccttctagaggccatatgaccgagtacaagcccacggtgcgcctcgccacccgcgacgacgtccccagggccgtacgcaccctcgccgccgcgttcgccgactaccccgccacgcgccacaccgtcgatccggaccgccacatcgagcgggtcaccgagctgcaagaactcttcctcacgcgcgtcgggctcgacatcggcaaggtgtgggtcgcggacgacggcgccgcggtggcggtctggaccacgccggagagcgtcgaagcgggggcggtgttcgccgagatcggcccgcgcatggccgagttgagcggttcccggctggccgcgcagcaacagatggaaggcctcctggcgccgcaccggcccaaggagcccgcgtggttcctggccaccgtcggcgtctcgcccgaccaccagggcaagggtctgggcagcgccgtcgtgctccccggagtggaggcggccgagcgcgccggggtgcccgccttcctggagacctccgcgccccgcaacctccccttctacgagcggctcggcttcaccgtcaccgccgacgtcgaggtgcccgaaggaccgcgcacctggtgcatgacccgcaagcccggtgcctga

SEQ ID NO: 8465 - DNA, 2472 bp, Artificial Sequence
  Synthetic Polynucloetide
atggccttaccagtgaccgccttgctcctgccgctggccttgctgctccacgccgccaggccggacatcgtgatgacacagagccctgatagcctggccgtgtctctgggagagagagccaccatcaactgcaagagcagccagagcgtgctgtactccagcaacaacaagaactacctggcctggtatcagcagaagcccggccagcctcctaagctgctgatctactgggccagcaccagagaaagcggcgtgcccgatagattttctggcagcggctctggcaccgacttcaccctgacaattagcagcctccaggccgaggatgtggccgtgtactactgccagcagtattacagcacccctctgaccttcggccagggcaccaaggtggaaatcaaactcgaggacctgaagaacgtgttcccacctgaggtggccgtgttcgagcctagcgaggccgagatcagccacacccagaaagccaccctcgtgtgcctggctaccggcttctaccccgaccatgtggaactgtcttggtgggtcaacggcaaagaggtgcacagcggcgtgtctaccgacccccagccactgaaagaacagcccgccctgaacgacagccggtactgcctgagcagcagactgagagtgtccgccaccttctggcagaacccccggaaccacttcagatgccaggtgcagttctacggcctgagcgagaacgacgagtggacccaggacagagccaagcccgtgacccagatcgtgtctgccgaagcctggggcagagccgattgcggatcccagagcttcggcctgctggaccccaagctgtgctacctgctggatggcatcctgttcatctacggcgtgatcctgaccgccctgttcctgagagtgaagttcagcagaagcgccgacgcccctgcctaccagcagggacagaaccaactgtacaacgagctgaacctgggcagacgggaagagtacgacgtgctggacaagcggagaggcagggaccctgagatgggcggaaagccccagcggagaaagaacccccaggaaggactgtataacgaactccagaaagacaagatggccgaagcctacagcgagatcggcatgaagggcgagcggagaagaggcaagggccacgatggcctgtaccagggcctgagcaccgccaccaaggacacctatgacgccctgcacatgcaggccctgcctccaagaagggccaagcgatctggatctggagcaacaaacttctcactactcaaacaagcaggtgacgtggaggagaatcccgggcctactagtatggactggatttggcgcatccttttccttgtcggcgctgctaccggcgcgcattccttcgaagaagttcagctggttcagagcggagccgaagtgaagaagccaggcgagagcctgaagattagctgcaaaggctccggctacagcttcaccagctactggatcggctgggtccgacagatgcctggcaaaggactggaatggatgggcatcatctaccccggcgacagcgacaccagatacagccctagctttcagggccaagtgaccatcagcgccgacaagagcatcagcacagcctacctccagtggtcctctctgaaggccagcgataccgccatgtactattgcgccagagatgtcggcagatgggctcctggcggcttcctggattattggggacagggcacactggtcaccgtgtctagtacgcgtatccagaaccctgatcctgccgtgtaccagctgcgggatagcaagagcagcgacaagagcgtgtgtctgttcaccgacttcgacagccagaccaacgtgtcccagagcaaggactccgacgtgtacatcaccgataagaccgtgctggacatgcggagcatggacttcaagagcaactccgccgtggcctggtccaacaagtccgatttcgcctgcgccaacgccttcaacaacagcattatccccgaggacacattcttcccaagccccgagagcagctgcggtacccagagttttgggttgttggaccctaaattgtgctatctgttggacggaatcctgttcatttacggagtgatcctgaccgcattgttcctgcgggttaagttttccagatccgcagacgcacccgcttaccaacaagggcagaaccaactctacaatgaacttaatttggggcggagggaagagtacgacgttctggacaaaaggaggggacgagatcccgagatgggcggaaagcctcagcgaaggaagaatccgcaagaggggctttataacgaactccagaaagataaaatggcagaagcctatagtgagattgggatgaagggagaaaggaggaggggtaaaggtcacgatgggttgtaccaaggattgagcacagccactaaagatacctatgatgcgctccacatgcaggccctgccgccaaga

SEQ ID NO: 8466 - DNA, 2472 bp, Artificial Sequence
  Synthetic Polynucloetide
atggccttaccagtgaccgccttgctcctgccgctggccttgctgctccacgccgccaggccggacatcgtgatgacacagagccctgatagcctggccgtgtctctgggagagagagccaccatcaactgcaagagcagccagagcgtgctgtactccagcaacaacaagaactacctggcctggtatcagcagaagcccggccagcctcctaagctgctgatctactgggccagcaccagagaaagcggcgtgcccgatagattttctggcagcggctctggcaccgacttcaccctgacaattagcagcctccaggccgaggatgtggccgtgtactactgccagcagtattacagcacccctctgaccttcggccagggcaccaaggtggaaatcaaactcgaggacctgaagaacgtgttcccacctgaggtggccgtgttcgagcctagcaaggccgagatcgcccacacccagaaagccaccctcgtgtgcctggctaccggcttctaccccgaccatgtggaactgtcttggtgggtcaacggcaaagaggtgcacagcggcgtgtgtaccgacccccagccactgaaagaacagcccgccctgaacgacagccggtactgcctgagcagcagactgagagtgtccgccaccttctggcagaacccccggaaccacttcagatgccaggtgcagttctacggcctgagcgagaacgacgagtggacccaggacagagccaagcccgtgacccagatcgtgtctgccgaagcctggggcagagccgattgcggatcccagagcttcggcctgctggaccccaagctgtgctacctgctggatggcatcctgttcatctacggcgtgatcctgaccgccctgttcctgagagtgaagttcagcagaagcgccgacgcccctgcctaccagcagggacagaaccaactgtacaacgagctgaacctgggcagacgggaagagtacgacgtgctggacaagcggagaggcagggaccctgagatgggcggaaagccccagcggagaaagaacccccaggaaggactgtataacgaactccagaaagacaagatggccgaagcctacagcgagatcggcatgaagggcgagcggagaagaggcaagggccacgatggcctgtaccagggcctgagcaccgccaccaaggacacctatgacgccctgcacatgcaggccctgcctccaagaagggccaagcgatctggatctggagcaacaaacttctcactactcaaacaagcaggtgacgtggaggagaatcccgggcctactagtatggactggatttggcgcatccttttccttgtcggcgctgctaccggcgcgcattccttcgaagaagttcagctggttcagagcggagccgaagtgaagaagccaggcgagagcctgaagattagctgcaaaggctccggctacagcttcaccagctactggatcggctgggtccgacagatgcctggcaaaggactggaatggatgggcatcatctaccccggcgacagcgacaccagatacagccctagctttcagggccaagtgaccatcagcgccgacaagagcatcagcacagcctacctccagtggtcctctctgaaggccagcgataccgccatgtactattgcgccagagatgtcggcagatgggctcctggcggcttcctggattattggggacagggcacactggtcaccgtgtctagtacgcgtatccagaaccctgatcctgccgtgtaccagctgcgggatagcaagagcagcgacaagagcgtgtgtctgttcaccgacttcgacagccagaccaacgtgtcccagagcaaggactccgacgtgtacatcaccgataagtgcgtgctggacatgcggagcatggacttcaagagcaactccgccgtggcctggtccaacaagtccgatttcgcctgcgccaacgccttcaacaacagcattatccccgaggacacattcttcccaagcagcgacgtgccctgcggtacccagagttttgggttgttggaccctaaattgtgctatctgttggacggaatcctgttcatttacggagtgatcctgaccgcattgttcctgcgggttaagttttccagatccgcagacgcacccgcttaccaacaagggcagaaccaactctacaatgaacttaatttggggcggagggaagagtacgacgttctggacaaaaggaggggacgagatcccgagatgggcggaaagcctcagcgaaggaagaatccgcaagaggggctttataacgaactccagaaagataaaatggcagaagcctatagtgagattgggatgaagggagaaaggaggaggggtaaaggtcacgatgggttgtaccaaggattgagcacagccactaaagatacctatgatgcgctccacatgcaggccctgccgccaaga

SEQ ID NO: 8467 - DNA, 2685 bp, Artificial Sequence
  Synthetic Polynucloetide
atggccttaccagtgaccgccttgctcctgccgctggccttgctgctccacgccgccaggccggacatcgtgatgacacagagccctgatagcctggccgtgtctctgggagagagagccaccatcaactgcaagagcagccagagcgtgctgtactccagcaacaacaagaactacctggcctggtatcagcagaagcccggccagcctcctaagctgctgatctactgggccagcaccagagaaagcggcgtgcccgatagattttctggcagcggctctggcaccgacttcaccctgacaattagcagcctccaggccgaggatgtggccgtgtactactgccagcagtattacagcacccctctgaccttcggccagggcaccaaggtggaaatcaaactcgaggggaaaccaattcccaaccctcttctgggactggattcaaccggcagcggcgaggacctgaagaacgtgttcccacctgaggtggccgtgttcgagcctagcgaggccgagatcagccacacccagaaagccaccctcgtgtgcctggctaccggcttctaccccgaccatgtggaactgtcttggtgggtcaacggcaaagaggtgcacagcggcgtgtctaccgacccccagccactgaaagaacagcccgccctgaacgacagccggtactgcctgagcagcagactgagagtgtccgccaccttctggcagaacccccggaaccacttcagatgccaggtgcagttctacggcctgagcgagaacgacgagtggacccaggacagagccaagcccgtgacccagatcgtgtctgccgaagcctggggcagagccgattgcggatcccagagcttcggcctgctggaccccaagctgtgctacctgctggatggcatcctgttcatctacggcgtgatcctgaccgccctgttcctgagagtgaagttcagcagaagcgccgacgcccctgcctaccagcagggacagaaccaactgtacaacgagctgaacctgggcagacgggaagagtacgacgtgctggacaagcggagaggcagggaccctgagatgggcggaaagccccagcggagaaagaacccccaggaaggactgtataacgaactccagaaagacaagatggccgaagcctacagcgagatcggcatgaagggcgagcggagaagaggcaagggccacgatggcctgtaccagggcctgagcaccgccaccaaggacacctatgacgccctgcacatgcaggccctgcctccaagaagggccaagcgatctggatctggagcaacaaacttctcactactcaaacaagcaggtgacgtggaggagaatcccgggcctactagtatggactggatttggcgcatccttttccttgtcggcgctgctaccggcgcgcattccttcgaagaagttcagctggttcagagcggagccgaagtgaagaagccaggcgagagcctgaagattagctgcaaaggctccggctacagcttcaccagctactggatcggctgggtccgacagatgcctggcaaaggactggaatggatgggcatcatctaccccggcgacagcgacaccagatacagccctagctttcagggccaagtgaccatcagcgccgacaagagcatcagcacagcctacctccagtggtcctctctgaaggccagcgataccgccatgtactattgcgccagagatgtcggcagatgggctcctggcggcttcctggattattggggacagggcacactggtcaccgtgtctagtacgcgtgagcagaaactgatctcggaagaggatgggagcggcatccagaaccctgatcctgccgtgtaccagctgcgggatagcaagagcagcgacaagagcgtgtgtctgttcaccgacttcgacagccagaccaacgtgtcccagagcaaggactccgacgtgtacatcaccgataagaccgtgctggacatgcggagcatggacttcaagagcaactccgccgtggcctggtccaacaagtccgatttcgcctgcgccaacgccttcaacaacagcattatccccgaggacacattcttcccaagccccgagagcagctgcggtacccagagttttgggttgttggaccctaaattgtgctatctgttggacggaatcctgttcatttacggagtgatcctgaccgcattgttcctgaggagcaagcggtcacggctgctccacagcgattacatgaatatgacaccacgaagaccgggtcctactcgcaaacactaccaaccctacgcacctccccgcgactttgcagcgtaccgatctcgggttaagttttccagatccgcagacgcacccgcttaccaacaagggcagaaccaactctacaatgaacttaatttggggcggagggaagagtacgacgttctggacaaaaggaggggacgagatcccgagatgggcggaaagcctcagcgaaggaagaatccgcaagaggggctttataacgaactccagaaagataaaatggcagaagcctatagtgagattgggatgaagggagaaaggaggaggggtaaaggtcacgatgggttgtaccaaggattgagcacagccactaaagatacctatgatgcgctccacatgcaggccctgccgccaaga

SEQ ID NO: 8468 - DNA, 2808 bp, Artificial Sequence
  Synthetic Polynucloetide
atggccttaccagtgaccgccttgctcctgccgctggccttgctgctccacgccgccaggccggacatcgtgatgacacagagccctgatagcctggccgtgtctctgggagagagagccaccatcaactgcaagagcagccagagcgtgctgtactccagcaacaacaagaactacctggcctggtatcagcagaagcccggccagcctcctaagctgctgatctactgggccagcaccagagaaagcggcgtgcccgatagattttctggcagcggctctggcaccgacttcaccctgacaattagcagcctccaggccgaggatgtggccgtgtactactgccagcagtattacagcacccctctgaccttcggccagggcaccaaggtggaaatcaaactcgaggggaaaccaattcccaaccctcttctgggactggattcaaccggcagcggcgaggacctgaagaacgtgttcccacctgaggtggccgtgttcgagcctagcgaggccgagatcagccacacccagaaagccaccctcgtgtgcctggctaccggcttctaccccgaccatgtggaactgtcttggtgggtcaacggcaaagaggtgcacagcggcgtgtctaccgacccccagccactgaaagaacagcccgccctgaacgacagccggtactgcctgagcagcagactgagagtgtccgccaccttctggcagaacccccggaaccacttcagatgccaggtgcagttctacggcctgagcgagaacgacgagtggacccaggacagagccaagcccgtgacccagatcgtgtctgccgaagcctggggcagagccgattgcggatcccagagcttcggcctgctggaccccaagctgtgctacctgctggatggcatcctgttcatctacggcgtgatcctgaccgccctgttcctgaggagtaagaggagcaggctcctgcacagtgactacatgaacatgactccacgccgccccggacccacccgcaagcattaccagccctatgccccaccacgcgacttcgcagcctatcgctccagagtgaagttcagcagaagcgccgacgcccctgcctaccagcagggacagaaccaactgtacaacgagctgaacctgggcagacgggaagagtacgacgtgctggacaagcggagaggcagggaccctgagatgggcggaaagccccagcggagaaagaacccccaggaaggactgtataacgaactccagaaagacaagatggccgaagcctacagcgagatcggcatgaagggcgagcggagaagaggcaagggccacgatggcctgtaccagggcctgagcaccgccaccaaggacacctatgacgccctgcacatgcaggccctgcctccaagaagggccaagcgatctggatctggagcaacaaacttctcactactcaaacaagcaggtgacgtggaggagaatcccgggcctactagtatggactggatttggcgcatccttttccttgtcggcgctgctaccggcgcgcattccttcgaagaagttcagctggttcagagcggagccgaagtgaagaagccaggcgagagcctgaagattagctgcaaaggctccggctacagcttcaccagctactggatcggctgggtccgacagatgcctggcaaaggactggaatggatgggcatcatctaccccggcgacagcgacaccagatacagccctagctttcagggccaagtgaccatcagcgccgacaagagcatcagcacagcctacctccagtggtcctctctgaaggccagcgataccgccatgtactattgcgccagagatgtcggcagatgggctcctggcggcttcctggattattggggacagggcacactggtcaccgtgtctagtacgcgtgagcagaaactgatctcggaagaggatgggagcggcatccagaaccctgatcctgccgtgtaccagctgcgggatagcaagagcagcgacaagagcgtgtgtctgttcaccgacttcgacagccagaccaacgtgtcccagagcaaggactccgacgtgtacatcaccgataagaccgtgctggacatgcggagcatggacttcaagagcaactccgccgtggcctggtccaacaagtccgatttcgcctgcgccaacgccttcaacaacagcattatccccgaggacacattcttcccaagccccgagagcagctgcggtacccagagttttgggttgttggaccctaaattgtgctatctgttggacggaatcctgttcatttacggagtgatcctgaccgcattgttcctgaggagcaagcggtcacggctgctccacagcgattacatgaatatgacaccacgaagaccgggtcctactcgcaaacactaccaaccctacgcacctccccgcgactttgcagcgtaccgatctcgggttaagttttccagatccgcagacgcacccgcttaccaacaagggcagaaccaactctacaatgaacttaatttggggcggagggaagagtacgacgttctggacaaaaggaggggacgagatcccgagatgggcggaaagcctcagcgaaggaagaatccgcaagaggggctttataacgaactccagaaagataaaatggcagaagcctatagtgagattgggatgaagggagaaaggaggaggggtaaaggtcacgatgggttgtaccaaggattgagcacagccactaaagatacctatgatgcgctccacatgcaggccctgccgccaaga

SEQ ID NO: 8469 - DNA, 2691 bp, Artificial Sequence
  Synthetic Polynucloetide
atggccttaccagtgaccgccttgctcctgccgctggccttgctgctccacgccgccaggccggacatcgtgatgacacagagccctgatagcctggccgtgtctctgggagagagagccaccatcaactgcaagagcagccagagcgtgctgtactccagcaacaacaagaactacctggcctggtatcagcagaagcccggccagcctcctaagctgctgatctactgggccagcaccagagaaagcggcgtgcccgatagattttctggcagcggctctggcaccgacttcaccctgacaattagcagcctccaggccgaggatgtggccgtgtactactgccagcagtattacagcacccctctgaccttcggccagggcaccaaggtggaaatcaaactcgaggggaaaccaattcccaaccctcttctgggactggattcaaccggcagcggcgaggacctgaagaacgtgttcccacctgaggtggccgtgttcgagcctagcgaggccgagatcagccacacccagaaagccaccctcgtgtgcctggctaccggcttctaccccgaccatgtggaactgtcttggtgggtcaacggcaaagaggtgcacagcggcgtgtctaccgacccccagccactgaaagaacagcccgccctgaacgacagccggtactgcctgagcagcagactgagagtgtccgccaccttctggcagaacccccggaaccacttcagatgccaggtgcagttctacggcctgagcgagaacgacgagtggacccaggacagagccaagcccgtgacccagatcgtgtctgccgaagcctggggcagagccgattgcggatcccagagcttcggcctgctggaccccaagctgtgctacctgctggatggcatcctgttcatctacggcgtgatcctgaccgccctgttcctgagagtgaagttcagcagaagcgccgacgcccctgcctaccagcagggacagaaccaactgtacaacgagctgaacctgggcagacgggaagagtacgacgtgctggacaagcggagaggcagggaccctgagatgggcggaaagccccagcggagaaagaacccccaggaaggactgtataacgaactccagaaagacaagatggccgaagcctacagcgagatcggcatgaagggcgagcggagaagaggcaagggccacgatggcctgtaccagggcctgagcaccgccaccaaggacacctatgacgccctgcacatgcaggccctgcctccaagaagggccaagcgatctggatctggagcaacaaacttctcactactcaaacaagcaggtgacgtggaggagaatcccgggcctactagtatggactggatttggcgcatccttttccttgtcggcgctgctaccggcgcgcattccttcgaagaagttcagctggttcagagcggagccgaagtgaagaagccaggcgagagcctgaagattagctgcaaaggctccggctacagcttcaccagctactggatcggctgggtccgacagatgcctggcaaaggactggaatggatgggcatcatctaccccggcgacagcgacaccagatacagccctagctttcagggccaagtgaccatcagcgccgacaagagcatcagcacagcctacctccagtggtcctctctgaaggccagcgataccgccatgtactattgcgccagagatgtcggcagatgggctcctggcggcttcctggattattggggacagggcacactggtcaccgtgtctagtacgcgtgagcagaaactgatctcggaagaggatctggggagcggcatccagaaccctgatcctgccgtgtaccagctgcgggatagcaagagcagcgacaagagcgtgtgtctgttcaccgacttcgacagccagaccaacgtgtcccagagcaaggactccgacgtgtacatcaccgataagaccgtgctggacatgcggagcatggacttcaagagcaactccgccgtggcctggtccaacaagtccgatttcgcctgcgccaacgccttcaacaacagcattatccccgaggacacattcttcccaagccccgagagcagctgcggtacccagagttttgggttgttggaccctaaattgtgctatctgttggacggaatcctgttcatttacggagtgatcctgaccgcattgttcctgaagagaggccggaagaagctgctgtacatcttcaagcagcctttcatgcggcccgtgcagaccacccaggaagaggacggctgctcctgccggttccccgaggaagaagaaggcggctgcgagctgcgggttaagttttccagatccgcagacgcacccgcttaccaacaagggcagaaccaactctacaatgaacttaatttggggcggagggaagagtacgacgttctggacaaaaggaggggacgagatcccgagatgggcggaaagcctcagcgaaggaagaatccgcaagaggggctttataacgaactccagaaagataaaatggcagaagcctatagtgagattgggatgaagggagaaaggaggaggggtaaaggtcacgatgggttgtaccaaggattgagcacagccactaaagatacctatgatgcgctccacatgcaggccctgccgccaaga

SEQ ID NO: 8470 - DNA, 2817 bp, Artificial Sequence
  Synthetic Polynucloetide
atggccttaccagtgaccgccttgctcctgccgctggccttgctgctccacgccgccaggccggacatcgtgatgacacagagccctgatagcctggccgtgtctctgggagagagagccaccatcaactgcaagagcagccagagcgtgctgtactccagcaacaacaagaactacctggcctggtatcagcagaagcccggccagcctcctaagctgctgatctactgggccagcaccagagaaagcggcgtgcccgatagattttctggcagcggctctggcaccgacttcaccctgacaattagcagcctccaggccgaggatgtggccgtgtactactgccagcagtattacagcacccctctgaccttcggccagggcaccaaggtggaaatcaaactcgaggggaaaccaattcccaaccctcttctgggactggattcaaccggcagcggcgaggacctgaagaacgtgttcccacctgaggtggccgtgttcgagcctagcgaggccgagatcagccacacccagaaagccaccctcgtgtgcctggctaccggcttctaccccgaccatgtggaactgtcttggtgggtcaacggcaaagaggtgcacagcggcgtgtctaccgacccccagccactgaaagaacagcccgccctgaacgacagccggtactgcctgagcagcagactgagagtgtccgccaccttctggcagaacccccggaaccacttcagatgccaggtgcagttctacggcctgagcgagaacgacgagtggacccaggacagagccaagcccgtgacccagatcgtgtctgccgaagcctggggcagagccgattgcggatcccagagcttcggcctgctggaccccaagctgtgctacctgctggatggcatcctgttcatctacggcgtgatcctgaccgccctgttcctgaaacggggcagaaagaaactcctgtatatattcaaacaaccatttatgagaccagtacaaactactcaagaggaagatggctgtagctgccgatttccagaagaagaagaaggaggatgtgaactgagagtgaagttcagcagaagcgccgacgcccctgcctaccagcagggacagaaccaactgtacaacgagctgaacctgggcagacgggaagagtacgacgtgctggacaagcggagaggcagggaccctgagatgggcggaaagccccagcggagaaagaacccccaggaaggactgtataacgaactccagaaagacaagatggccgaagcctacagcgagatcggcatgaagggcgagcggagaagaggcaagggccacgatggcctgtaccagggcctgagcaccgccaccaaggacacctatgacgccctgcacatgcaggccctgcctccaagaagggccaagcgatctggatctggagcaacaaacttctcactactcaaacaagcaggtgacgtggaggagaatcccgggcctactagtatggactggatttggcgcatccttttccttgtcggcgctgctaccggcgcgcattccttcgaagaagttcagctggttcagagcggagccgaagtgaagaagccaggcgagagcctgaagattagctgcaaaggctccggctacagcttcaccagctactggatcggctgggtccgacagatgcctggcaaaggactggaatggatgggcatcatctaccccggcgacagcgacaccagatacagccctagctttcagggccaagtgaccatcagcgccgacaagagcatcagcacagcctacctccagtggtcctctctgaaggccagcgataccgccatgtactattgcgccagagatgtcggcagatgggctcctggcggcttcctggattattggggacagggcacactggtcaccgtgtctagtacgcgtgagcagaaactgatctcggaagaggatctggggagcggcatccagaaccctgatcctgccgtgtaccagctgcgggatagcaagagcagcgacaagagcgtgtgtctgttcaccgacttcgacagccagaccaacgtgtcccagagcaaggactccgacgtgtacatcaccgataagaccgtgctggacatgcggagcatggacttcaagagcaactccgccgtggcctggtccaacaagtccgatttcgcctgcgccaacgccttcaacaacagcattatccccgaggacacattcttcccaagccccgagagcagctgcggtacccagagttttgggttgttggaccctaaattgtgctatctgttggacggaatcctgttcatttacggagtgatcctgaccgcattgttcctgaagagaggccggaagaagctgctgtacatcttcaagcagcctttcatgcggcccgtgcagaccacccaggaagaggacggctgctcctgccggttccccgaggaagaagaaggcggctgcgagctgcgggttaagttttccagatccgcagacgcacccgcttaccaacaagggcagaaccaactctacaatgaacttaatttggggcggagggaagagtacgacgttctggacaaaaggaggggacgagatcccgagatgggcggaaagcctcagcgaaggaagaatccgcaagaggggctttataacgaactccagaaagataaaatggcagaagcctatagtgagattgggatgaagggagaaaggaggaggggtaaaggtcacgatgggttgtaccaaggattgagcacagccactaaagatacctatgatgcgctccacatgcaggccctgccgccaaga

SEQ ID NO: 8471 - DNA, 2490 bp, Artificial Sequence
  Synthetic Polynucloetide
atggccttaccagtgaccgccttgctcctgccgctggccttgctgctccacgccgccaggccggacatcgtgatgacacagagccctgatagcctggccgtgtctctgggagagagagccaccatcaactgcaagagcagccagagcgtgctgtactccagcaacaacaagaactacctggcctggtatcagcagaagcccggccagcctcctaagctgctgatctactgggccagcaccagagaaagcggcgtgcccgatagattttctggcagcggctctggcaccgacttcaccctgacaattagcagcctccaggccgaggatgtggccgtgtactactgccagcagtattacagcacccctctgaccttcggccagggcaccaaggtggaaatcaaactcgagcagagcttcggcctgctggaccccaagctgtgctacctgctggatggcatcctgttcatctacggcgtgatcctgaccgccctgttcctgagagtgaagttcagcagaagcgccgacgcccctgcctaccagcagggacagaaccaactgtacaacgagctgaacctgggcagacgggaagagtacgacgtgctggacaagcggagaggcagggaccctgagatgggcggaaagccccagcggagaaagaacccccaggaaggactgtataacgaactccagaaagacaagatggccgaagcctacagcgagatcggcatgaagggcgagcggagaagaggcaagggccacgatggcctgtaccagggcctgagcaccgccaccaaggacacctatgacgccctgcacatgcaggccctgcctccaagaagggccaagcgatctggatctggagcaacaaacttctcactactcaaacaagcaggtgacgtggaggagaatcccgggcctactagtatggactggatttggcgcatccttttccttgtcggcgctgctaccggcgcgcattccttcgaagaagttcagctggttcagagcggagccgaagtgaagaagccaggcgagagcctgaagattagctgcaaaggctccggctacagcttcaccagctactggatcggctgggtccgacagatgcctggcaaaggactggaatggatgggcatcatctaccccggcgacagcgacaccagatacagccctagctttcagggccaagtgaccatcagcgccgacaagagcatcagcacagcctacctccagtggtcctctctgaaggccagcgataccgccatgtactattgcgccagagatgtcggcagatgggctcctggcggcttcctggattattggggacagggcacactggtcaccgtgtctagtacgcgtcagagttttgggttgttggaccctaaattgtgctatctgttggacggaatcctgttcatttacggagtgatcctgaccgcattgttcctgcgggttaagttttccagatccgcagacgcacccgcttaccaacaagggcagaaccaactctacaatgaacttaatttggggcggagggaagagtacgacgttctggacaaaaggaggggacgagatcccgagatgggcggaaagcctcagcgaaggaagaatccgcaagaggggctttataacgaactccagaaagataaaatggcagaagcctatagtgagattgggatgaagggagaaaggaggaggggtaaaggtcacgatgggttgtaccaaggattgagcacagccactaaagatacctatgatgcgctccacatgcaggccctgccgccaagacgcgccaagagaagcggatctggcgtgaagcagaccctgaatttcgacctgctgaagctggctggcgacgtggaatccaacccaggcccttctagaggccatatgaccgagtacaagcccacggtgcgcctcgccacccgcgacgacgtccccagggccgtacgcaccctcgccgccgcgttcgccgactaccccgccacgcgccacaccgtcgatccggaccgccacatcgagcgggtcaccgagctgcaagaactcttcctcacgcgcgtcgggctcgacatcggcaaggtgtgggtcgcggacgacggcgccgcggtggcggtctggaccacgccggagagcgtcgaagcgggggcggtgttcgccgagatcggcccgcgcatggccgagttgagcggttcccggctggccgcgcagcaacagatggaaggcctcctggcgccgcaccggcccaaggagcccgcgtggttcctggccaccgtcggcgtctcgcccgaccaccagggcaagggtctgggcagcgccgtcgtgctccccggagtggaggcggccgagcgcgccggggtgcccgccttcctggagacctccgcgccccgcaacctccccttctacgagcggctcggcttcaccgtcaccgccgacgtcgaggtgcccgaaggaccgcgcacctggtgcatgacccgcaagcccggtgcctga

SEQ ID NO: 8472 - DNA, 1962 bp, Artificial Sequence
  Synthetic Polynucloetide
atggccttaccagtgaccgccttgctcctgccgctggccttgctgctccacgccgccaggccggacatcgtgatgacacagagccctgatagcctggccgtgtctctgggagagagagccaccatcaactgcaagagcagccagagcgtgctgtactccagcaacaacaagaactacctggcctggtatcagcagaagcccggccagcctcctaagctgctgatctactgggccagcaccagagaaagcggcgtgcccgatagattttctggcagcggctctggcaccgacttcaccctgacaattagcagcctccaggccgaggatgtggccgtgtactactgccagcagtattacagcacccctctgaccttcggccagggcaccaaggtggaaatcaaactcgagggacagcctaaggccaatcctaccgtgacactgttccctccaagcagcgaagaactccaggccaacaaggccacacttgtgtgcctgatctccgacttctaccctggggctgtgacagtggcttggaaggccgatggatctcctgtgaaagccggcgtggaaaccaccaagccatccaagcagagcaacaacaaatacgccgccagctcctacctgagcctgacacctgagcagtggaagtcccacagatcctacagctgccaagtgacccacgaaggcagcaccgtggaaaagacagtggcccctacagagtgcagccccatcaagaccgatgtgattacaatggaccccaaggacaactgctccaaggacgccaacgataccctgctgctccagctgaccaacaccagcgcctactacatgtacttgttgctgctgctgaagtccgtggtgtacttcgccatcatcacatgctgcctgctgcggagaaccgccttctgctgcaacggcgagaagtctagggccaagcgatctggatctggagcaacaaacttctcactactcaaacaagcaggtgacgtggaggagaatcccgggcctactagtatggactggatttggcgcatccttttccttgtcggcgctgctaccggcgcgcattccttcgaagaagttcagctggttcagagcggagccgaagtgaagaagccaggcgagagcctgaagattagctgcaaaggctccggctacagcttcaccagctactggatcggctgggtccgacagatgcctggcaaaggactggaatggatgggcatcatctaccccggcgacagcgacaccagatacagccctagctttcagggccaagtgaccatcagcgccgacaagagcatcagcacagcctacctccagtggtcctctctgaaggccagcgataccgccatgtactattgcgccagagatgtcggcagatgggctcctggcggcttcctggattattggggacagggcacactggtcaccgtgtctagtacgcgtgcctctacaaagggaccctccgtgtttcctctggctcccagcagcaagtctacaagcggaggaacagccgctctgggctgcctggtcaaggattactttcccgagcctgtgaccgtgtcctggaatagcggagcactgacaagcggcgtgcacacctttccagccgtgctgcaaagcagcggcctgtactctctgagcagcgtggtcacagtgcctagctctagcctgggcacccagacctacatctgcaatgtgaaccacaagcctagcaacaccaaggtggacaagagagtggaacccaagagctgtgaagtgaaaaccgactccaccgaccacgtgaagcccaaagagacagagaacaccaagcagcccagcaagagctgccacaagcccaaggccatcgtgcacaccgagaaagtgaacatgatgagcctgaccgtgctgggcctgcggatgctgttcgccaaaaccgtggccgtgaacttcctgctgaccgccaagctgttcttcctc

SEQ ID NO: 8473 - DNA, 1896 bp, Artificial Sequence
  Synthetic Polynucloetide
atggccttaccagtgaccgccttgctcctgccgctggccttgctgctccacgccgccaggccggacatcgtgatgacacagagccctgatagcctggccgtgtctctgggagagagagccaccatcaactgcaagagcagccagagcgtgctgtactccagcaacaacaagaactacctggcctggtatcagcagaagcccggccagcctcctaagctgctgatctactgggccagcaccagagaaagcggcgtgcccgatagattttctggcagcggctctggcaccgacttcaccctgacaattagcagcctccaggccgaggatgtggccgtgtactactgccagcagtattacagcacccctctgaccttcggccagggcaccaaggtggaaatcaaactcgagggacagcctaaggccaatcctaccgtgacactgttccctccaagcagcgaagaactccaggccaacaaggccacacttgtgtgcctgatctccgacttctaccctggggctgtgacagtggcttggaaggccgatggatctcctgtgaaagccggcgtggaaaccaccaagccatccaagcagagcaacaacaaatacgccgccagctcctacctgagcctgacacctgagcagtggaagtcccacagatcctacagctgccaagtgacccacgaaggcagcaccgtggaaaagacagtggcccctacagagtgcagcggcagagccgattgcggcatcaccagcgccagctaccaccagggcgtgctgagcgccaccatcctgtacgagatcctgctgggcaaggccaccctgtacgccgtgctggtgtctgccctggtgctgatggctatggtcaagcggaaggacagccggggaagggccaagcgatctggatctggagcaacaaacttctcactactcaaacaagcaggtgacgtggaggagaatcccgggcctactagtatggactggatttggcgcatccttttccttgtcggcgctgctaccggcgcgcattccttcgaagaagttcagctggttcagagcggagccgaagtgaagaagccaggcgagagcctgaagattagctgcaaaggctccggctacagcttcaccagctactggatcggctgggtccgacagatgcctggcaaaggactggaatggatgggcatcatctaccccggcgacagcgacaccagatacagccctagctttcagggccaagtgaccatcagcgccgacaagagcatcagcacagcctacctccagtggtcctctctgaaggccagcgataccgccatgtactattgcgccagagatgtcggcagatgggctcctggcggcttcctggattattggggacagggcacactggtcaccgtgtctagtacgcgtgcctctacaaagggaccctccgtgtttcctctggctcccagcagcaagtctacaagcggaggaacagccgctctgggctgcctggtcaaggattactttcccgagcctgtgaccgtgtcctggaatagcggagcactgacaagcggcgtgcacacctttccagccgtgctgcaaagcagcggcctgtactctctgagcagcgtggtcacagtgcctagctctagcctgggcacccagacctacatctgcaatgtgaaccacaagcctagcaacaccaaggtggacaagagagtggaacccaagagctgtatccccgaggacacattcttcccaagcagcgacgtgccctgcgacgtgaagctggtggaaaagagcttcgagacagacaccaacctgaacttccagaacctgagcgtgatcggcttcagaatcctgctgctgaaagtggccggctttaacctgctgatgaccctgcggctgtggtccagc

SEQ ID NO: 8474 - DNA, 1896 bp, Artificial Sequence
  Synthetic Polynucloetide
atggccttaccagtgaccgccttgctcctgccgctggccttgctgctccacgccgccaggccggacatcgtgatgacacagagccctgatagcctggccgtgtctctgggagagagagccaccatcaactgcaagagcagccagagcgtgctgtactccagcaacaacaagaactacctggcctggtatcagcagaagcccggccagcctcctaagctgctgatctactgggccagcaccagagaaagcggcgtgcccgatagattttctggcagcggctctggcaccgacttcaccctgacaattagcagcctccaggccgaggatgtggccgtgtactactgccagcagtattacagcacccctctgaccttcggccagggcaccaaggtggaaatcaaactcgagggacagcctaaggccaatcctaccgtgacactgttccctccaagcagcgaagaactccaggccaacaaggccacacttgtgtgcctgatctccgacttctaccctggggctgtgacagtggcttggaaggccgatggatctcctgtgaaagccggcgtggaaaccaccaagccatccaagcagagcaacaacaaatacgccgccagctcctacctgagcctgacacctgagcagtggaagtcccacagatcctacagctgccaagtgacccacgaaggcagcaccgtggaaaagacagtggcccctacagagtgcagcggcagagccgattgcggctttaccagcgagagctaccagcagggcgtgctgagcgccaccatcctgtacgagatcctgctgggcaaggccaccctgtacgccgtgctggtgtctgccctggtgctgatggctatggtcaagcggaaggacagccggggaagggccaagcgatctggatctggagcaacaaacttctcactactcaaacaagcaggtgacgtggaggagaatcccgggcctactagtatggactggatttggcgcatccttttccttgtcggcgctgctaccggcgcgcattccttcgaagaagttcagctggttcagagcggagccgaagtgaagaagccaggcgagagcctgaagattagctgcaaaggctccggctacagcttcaccagctactggatcggctgggtccgacagatgcctggcaaaggactggaatggatgggcatcatctaccccggcgacagcgacaccagatacagccctagctttcagggccaagtgaccatcagcgccgacaagagcatcagcacagcctacctccagtggtcctctctgaaggccagcgataccgccatgtactattgcgccagagatgtcggcagatgggctcctggcggcttcctggattattggggacagggcacactggtcaccgtgtctagtacgcgtgcctctacaaagggaccctccgtgtttcctctggctcccagcagcaagtctacaagcggaggaacagccgctctgggctgcctggtcaaggattactttcccgagcctgtgaccgtgtcctggaatagcggagcactgacaagcggcgtgcacacctttccagccgtgctgcaaagcagcggcctgtactctctgagcagcgtggtcacagtgcctagctctagcctgggcacccagacctacatctgcaatgtgaaccacaagcctagcaacaccaaggtggacaagagagtggaacccaagagctgtatccccgaggacacattcttcccaagccccgagagcagctgcgacgtgaagctggtggaaaagagcttcgagacagacaccaacctgaacttccagaacctgagcgtgatcggcttcagaatcctgctgctgaaagtggccggctttaacctgctgatgaccctgcggctgtggtccagc

SEQ ID NO: 8475 - DNA, 1374 bp, Artificial Sequence
  Synthetic Polynucloetide
atggccttaccagtgaccgccttgctcctgccgctggccttgctgctccacgccgccaggccggacatcgtgatgacacagagccctgatagcctggccgtgtctctgggagagagagccaccatcaactgcaagagcagccagagcgtgctgtactccagcaacaacaagaactacctggcctggtatcagcagaagcccggccagcctcctaagctgctgatctactgggccagcaccagagaaagcggcgtgcccgatagattttctggcagcggctctggcaccgacttcaccctgacaattagcagcctccaggccgaggatgtggccgtgtactactgccagcagtattacagcacccctctgaccttcggccagggcaccaaggtggaaatcaaaggcggaggcggaagtggaggcggaggatctggcggcggaggctctgaagttcagctggttcagagcggagccgaagtgaagaagccaggcgagagcctgaagattagctgcaaaggctccggctacagcttcaccagctactggatcggctgggtccgacagatgcctggcaaaggactggaatggatgggcatcatctaccccggcgacagcgacaccagatacagccctagctttcagggccaagtgaccatcagcgccgacaagagcatcagcacagcctacctccagtggtcctctctgaaggccagcgataccgccatgtactattgcgccagagatgtcggcagatgggctcctggcggcttcctggattattggggacagggcacactggtcaccgtgtctagtacgcgtgacggtaacgaggagatgggaggaatcactcaaaccccttacaaagtctcaatttcaggaacaactgttatccttacatgtccccagtatcctggcagcgagatcctttggcagcataacgacaagaatatagggggagatgaagacgataagaatatcggatctgacgaggatcacttgagcctgaaagagttctccgagcttgaacaaagcggatattatgtgtgctatccgcgcgggtcaaagccggaagacgctaacttttacctttatctccgagccagagtgtgcgaaaattgcatggaaatggacgttatgtccgttgctacaatagttatcgtagatatatgcatcacgggtggactgcttctgctggtttattattggtccaagaatagaaaggccaaagctaaacccgtgaccagaggcgctggcgcaggcggaaggcaaaggggacaaaacaaagaacggccaccaccagtgccaaatccagattatgagcctattcggaaaggacagagggacctgtactctggcctgaatcagagaagaatc

SEQ ID NO: 8476 - DNA, 1269 bp, Artificial Sequence
  Synthetic Polynucloetide
atggccttaccagtgaccgccttgctcctgccgctggccttgctgctccacgccgccaggccggacatcgtgatgacacagagccctgatagcctggccgtgtctctgggagagagagccaccatcaactgcaagagcagccagagcgtgctgtactccagcaacaacaagaactacctggcctggtatcagcagaagcccggccagcctcctaagctgctgatctactgggccagcaccagagaaagcggcgtgcccgatagattttctggcagcggctctggcaccgacttcaccctgacaattagcagcctccaggccgaggatgtggccgtgtactactgccagcagtattacagcacccctctgaccttcggccagggcaccaaggtggaaatcaaaggcggaggcggaagtggaggcggaggatctggcggcggaggctctgaagttcagctggttcagagcggagccgaagtgaagaagccaggcgagagcctgaagattagctgcaaaggctccggctacagcttcaccagctactggatcggctgggtccgacagatgcctggcaaaggactggaatggatgggcatcatctaccccggcgacagcgacaccagatacagccctagctttcagggccaagtgaccatcagcgccgacaagagcatcagcacagcctacctccagtggtcctctctgaaggccagcgataccgccatgtactattgcgccagagatgtcggcagatgggctcctggcggcttcctggattattggggacagggcacactggtcaccgtgtctagtacgcgtttcaagatccccatcgaggaactggaagatcgggtgttcgtgaactgcaacacctctatcacctgggtggaaggcaccgtgggaacactgctgagcgacatcaccagactggacctcggcaagcggattctggaccctcggggcatctacagatgcaacggcaccgacatctacaaggacaaagaaagcaccgtgcaggtccactacagaatgtgccagtcctgcgtggaactggaccctgctacagtggccggcatcatcgtgaccgatgtgatcgctactctgctgctggctctgggagtgttctgcttcgccggacacgaaacaggcagactgtctggcgctgccgatacacaggccctgctgagaaacgaccaagtgtatcagcccctgcgcgacagagatgatgcccagtattctcacctcggcggcaactgggctagaaacaag

SEQ ID NO: 8477 - DNA, 1299 bp, Artificial Sequence
  Synthetic Polynucloetide
atggccttaccagtgaccgccttgctcctgccgctggccttgctgctccacgccgccaggccggacatcgtgatgacacagagccctgatagcctggccgtgtctctgggagagagagccaccatcaactgcaagagcagccagagcgtgctgtactccagcaacaacaagaactacctggcctggtatcagcagaagcccggccagcctcctaagctgctgatctactgggccagcaccagagaaagcggcgtgcccgatagattttctggcagcggctctggcaccgacttcaccctgacaattagcagcctccaggccgaggatgtggccgtgtactactgccagcagtattacagcacccctctgaccttcggccagggcaccaaggtggaaatcaaaggcggaggcggaagtggaggcggaggatctggcggcggaggctctgaagttcagctggttcagagcggagccgaagtgaagaagccaggcgagagcctgaagattagctgcaaaggctccggctacagcttcaccagctactggatcggctgggtccgacagatgcctggcaaaggactggaatggatgggcatcatctaccccggcgacagcgacaccagatacagccctagctttcagggccaagtgaccatcagcgccgacaagagcatcagcacagcctacctccagtggtcctctctgaaggccagcgataccgccatgtactattgcgccagagatgtcggcagatgggctcctggcggcttcctggattattggggacagggcacactggtcaccgtgtctagtacgcgtcagagcatcaagggcaaccacctggtcaaggtgtacgactaccaagaggacggcagcgtgctgctgacatgtgatgccgaggccaagaacatcacctggtttaaggacggcaagatgatcggcttcctgaccgaggacaagaagaagtggaacctgggcagcaacgctaaggaccccagaggcatgtatcagtgcaagggcagccagaacaagagcaagcccctccaggtgtactaccggatgtgccagaactgcatcgagctgaacgccgctaccatcagcggctttctgttcgccgagatcgtgtccatcttcgtgctggccgtgggcgtgtactttatcgctggacaggatggcgtgcggcagagcagagcttccgataagcaaaccctgctgcctaacgaccagctgtaccagcctctgaaggacagagaggacgaccagtacagccacctccagggcaatcagctgagaagaaac

SEQ ID NO: 8478 - DNA, 1248 bp, Artificial Sequence
  Synthetic Polynucloetide
atggccttaccagtgaccgccttgctcctgccgctggccttgctgctccacgccgccaggccggacatcgtgatgacacagagccctgatagcctggccgtgtctctgggagagagagccaccatcaactgcaagagcagccagagcgtgctgtactccagcaacaacaagaactacctggcctggtatcagcagaagcccggccagcctcctaagctgctgatctactgggccagcaccagagaaagcggcgtgcccgatagattttctggcagcggctctggcaccgacttcaccctgacaattagcagcctccaggccgaggatgtggccgtgtactactgccagcagtattacagcacccctctgaccttcggccagggcaccaaggtggaaatcaaaggcggaggcggaagtggaggcggaggatctggcggcggaggctctgaagttcagctggttcagagcggagccgaagtgaagaagccaggcgagagcctgaagattagctgcaaaggctccggctacagcttcaccagctactggatcggctgggtccgacagatgcctggcaaaggactggaatggatgggcatcatctaccccggcgacagcgacaccagatacagccctagctttcagggccaagtgaccatcagcgccgacaagagcatcagcacagcctacctccagtggtcctctctgaaggccagcgataccgccatgtactattgcgccagagatgtcggcagatgggctcctggcggcttcctggattattggggacagggcacactggtcaccgtgtctagtacgcgtcagagttttgggttgttggaccctaaattgtgctatctgttggacggaatcctgttcatttacggagtgatcctgaccgcattgttcctgcgggttaagttttccagatccgcagacgcacccgcttaccaacaagggcagaaccaactctacaatgaacttaatttggggcggagggaagagtacgacgttctggacaaaaggaggggacgagatcccgagatgggcggaaagcctcagcgaaggaagaatccgcaagaggggctttataacgaactccagaaagataaaatggcagaagcctatagtgagattgggatgaagggagaaaggaggaggggtaaaggtcacgatgggttgtaccaaggattgagcacagccactaaagatacctatgatgcgctccacatgcaggccctgccgccaaga

SEQ ID NO: 8479 - DNA, 1374 bp, Artificial Sequence
  Synthetic Polynucloetide
atggccttaccagtgaccgccttgctcctgccgctggccttgctgctccacgccgccaggccggaagttcagctggttcagagcggagccgaagtgaagaagccaggcgagagcctgaagattagctgcaaaggctccggctacagcttcaccagctactggatcggctgggtccgacagatgcctggcaaaggactggaatggatgggcatcatctaccccggcgacagcgacaccagatacagccctagctttcagggccaagtgaccatcagcgccgacaagagcatcagcacagcctacctccagtggtcctctctgaaggccagcgataccgccatgtactattgcgccagagatgtcggcagatgggctcctggcggcttcctggattattggggacagggcacactggtcaccgtgtctagtggcggaggcggaagtggaggcggaggatctggcggcggaggctctgacatcgtgatgacacagagccctgatagcctggccgtgtctctgggagagagagccaccatcaactgcaagagcagccagagcgtgctgtactccagcaacaacaagaactacctggcctggtatcagcagaagcccggccagcctcctaagctgctgatctactgggccagcaccagagaaagcggcgtgcccgatagattttctggcagcggctctggcaccgacttcaccctgacaattagcagcctccaggccgaggatgtggccgtgtactactgccagcagtattacagcacccctctgaccttcggccagggcaccaaggtggaaatcaaaacgcgtgacggtaacgaggagatgggaggaatcactcaaaccccttacaaagtctcaatttcaggaacaactgttatccttacatgtccccagtatcctggcagcgagatcctttggcagcataacgacaagaatatagggggagatgaagacgataagaatatcggatctgacgaggatcacttgagcctgaaagagttctccgagcttgaacaaagcggatattatgtgtgctatccgcgcgggtcaaagccggaagacgctaacttttacctttatctccgagccagagtgtgcgaaaattgcatggaaatggacgttatgtccgttgctacaatagttatcgtagatatatgcatcacgggtggactgcttctgctggtttattattggtccaagaatagaaaggccaaagctaaacccgtgaccagaggcgctggcgcaggcggaaggcaaaggggacaaaacaaagaacggccaccaccagtgccaaatccagattatgagcctattcggaaaggacagagggacctgtactctggcctgaatcagagaagaatc

SEQ ID NO: 8480 - DNA, 1269 bp, Artificial Sequence
  Synthetic Polynucloetide
atggccttaccagtgaccgccttgctcctgccgctggccttgctgctccacgccgccaggccggaagttcagctggttcagagcggagccgaagtgaagaagccaggcgagagcctgaagattagctgcaaaggctccggctacagcttcaccagctactggatcggctgggtccgacagatgcctggcaaaggactggaatggatgggcatcatctaccccggcgacagcgacaccagatacagccctagctttcagggccaagtgaccatcagcgccgacaagagcatcagcacagcctacctccagtggtcctctctgaaggccagcgataccgccatgtactattgcgccagagatgtcggcagatgggctcctggcggcttcctggattattggggacagggcacactggtcaccgtgtctagtggcggaggcggaagtggaggcggaggatctggcggcggaggctctgacatcgtgatgacacagagccctgatagcctggccgtgtctctgggagagagagccaccatcaactgcaagagcagccagagcgtgctgtactccagcaacaacaagaactacctggcctggtatcagcagaagcccggccagcctcctaagctgctgatctactgggccagcaccagagaaagcggcgtgcccgatagattttctggcagcggctctggcaccgacttcaccctgacaattagcagcctccaggccgaggatgtggccgtgtactactgccagcagtattacagcacccctctgaccttcggccagggcaccaaggtggaaatcaaaacgcgtttcaagatccccatcgaggaactggaagatcgggtgttcgtgaactgcaacacctctatcacctgggtggaaggcaccgtgggaacactgctgagcgacatcaccagactggacctcggcaagcggattctggaccctcggggcatctacagatgcaacggcaccgacatctacaaggacaaagaaagcaccgtgcaggtccactacagaatgtgccagtcctgcgtggaactggaccctgctacagtggccggcatcatcgtgaccgatgtgatcgctactctgctgctggctctgggagtgttctgcttcgccggacacgaaacaggcagactgtctggcgctgccgatacacaggccctgctgagaaacgaccaagtgtatcagcccctgcgcgacagagatgatgcccagtattctcacctcggcggcaactgggctagaaacaag

SEQ ID NO: 8481 - DNA, 1299 bp, Artificial Sequence
  Synthetic Polynucloetide
atggccttaccagtgaccgccttgctcctgccgctggccttgctgctccacgccgccaggccggaagttcagctggttcagagcggagccgaagtgaagaagccaggcgagagcctgaagattagctgcaaaggctccggctacagcttcaccagctactggatcggctgggtccgacagatgcctggcaaaggactggaatggatgggcatcatctaccccggcgacagcgacaccagatacagccctagctttcagggccaagtgaccatcagcgccgacaagagcatcagcacagcctacctccagtggtcctctctgaaggccagcgataccgccatgtactattgcgccagagatgtcggcagatgggctcctggcggcttcctggattattggggacagggcacactggtcaccgtgtctagtggcggaggcggaagtggaggcggaggatctggcggcggaggctctgacatcgtgatgacacagagccctgatagcctggccgtgtctctgggagagagagccaccatcaactgcaagagcagccagagcgtgctgtactccagcaacaacaagaactacctggcctggtatcagcagaagcccggccagcctcctaagctgctgatctactgggccagcaccagagaaagcggcgtgcccgatagattttctggcagcggctctggcaccgacttcaccctgacaattagcagcctccaggccgaggatgtggccgtgtactactgccagcagtattacagcacccctctgaccttcggccagggcaccaaggtggaaatcaaaacgcgtcagagcatcaagggcaaccacctggtcaaggtgtacgactaccaagaggacggcagcgtgctgctgacatgtgatgccgaggccaagaacatcacctggtttaaggacggcaagatgatcggcttcctgaccgaggacaagaagaagtggaacctgggcagcaacgctaaggaccccagaggcatgtatcagtgcaagggcagccagaacaagagcaagcccctccaggtgtactaccggatgtgccagaactgcatcgagctgaacgccgctaccatcagcggctttctgttcgccgagatcgtgtccatcttcgtgctggccgtgggcgtgtactttatcgctggacaggatggcgtgcggcagagcagagcttccgataagcaaaccctgctgcctaacgaccagctgtaccagcctctgaaggacagagaggacgaccagtacagccacctccagggcaatcagctgagaagaaac

SEQ ID NO: 8482 - DNA, 1248 bp, Artificial Sequence
  Synthetic Polynucloetide
atggccttaccagtgaccgccttgctcctgccgctggccttgctgctccacgccgccaggccggaagttcagctggttcagagcggagccgaagtgaagaagccaggcgagagcctgaagattagctgcaaaggctccggctacagcttcaccagctactggatcggctgggtccgacagatgcctggcaaaggactggaatggatgggcatcatctaccccggcgacagcgacaccagatacagccctagctttcagggccaagtgaccatcagcgccgacaagagcatcagcacagcctacctccagtggtcctctctgaaggccagcgataccgccatgtactattgcgccagagatgtcggcagatgggctcctggcggcttcctggattattggggacagggcacactggtcaccgtgtctagtggcggaggcggaagtggaggcggaggatctggcggcggaggctctgacatcgtgatgacacagagccctgatagcctggccgtgtctctgggagagagagccaccatcaactgcaagagcagccagagcgtgctgtactccagcaacaacaagaactacctggcctggtatcagcagaagcccggccagcctcctaagctgctgatctactgggccagcaccagagaaagcggcgtgcccgatagattttctggcagcggctctggcaccgacttcaccctgacaattagcagcctccaggccgaggatgtggccgtgtactactgccagcagtattacagcacccctctgaccttcggccagggcaccaaggtggaaatcaaaacgcgtcagagttttgggttgttggaccctaaattgtgctatctgttggacggaatcctgttcatttacggagtgatcctgaccgcattgttcctgcgggttaagttttccagatccgcagacgcacccgcttaccaacaagggcagaaccaactctacaatgaacttaatttggggcggagggaagagtacgacgttctggacaaaaggaggggacgagatcccgagatgggcggaaagcctcagcgaaggaagaatccgcaagaggggctttataacgaactccagaaagataaaatggcagaagcctatagtgagattgggatgaagggagaaaggaggaggggtaaaggtcacgatgggttgtaccaaggattgagcacagccactaaagatacctatgatgcgctccacatgcaggccctgccgccaaga

SEQ ID NO: 8483 - DNA, 1950 bp, Artificial Sequence
  Synthetic Polynucloetide
atggccttaccagtgaccgccttgctcctgccgctggccttgctgctccacgccgccaggccggacatcgtgatgacacagagccctgatagcctggccgtgtctctgggagagagagccaccatcaactgcaagagcagccagagcgtgctgtactccagcaacaacaagaactacctggcctggtatcagcagaagcccggccagcctcctaagctgctgatctactgggccagcaccagagaaagcggcgtgcccgatagattttctggcagcggctctggcaccgacttcaccctgacaattagcagcctccaggccgaggatgtggccgtgtactactgccagcagtattacagcacccctctgaccttcggccagggcaccaaggtggaaatcaaaggcggaggcggaagtggaggcggaggatctggcggcggaggctctgaagttcagctggttcagagcggagccgaagtgaagaagccaggcgagagcctgaagattagctgcaaaggctccggctacagcttcaccagctactggatcggctgggtccgacagatgcctggcaaaggactggaatggatgggcatcatctaccccggcgacagcgacaccagatacagccctagctttcagggccaagtgaccatcagcgccgacaagagcatcagcacagcctacctccagtggtcctctctgaaggccagcgataccgccatgtactattgcgccagagatgtcggcagatgggctcctggcggcttcctggattattggggacagggcacactggtcaccgtgtctagtacgcgtgggagcggcatccagaaccctgatcctgccgtgtaccagctgcgggatagcaagagcagcgacaagagcgtgtgtctgttcaccgacttcgacagccagaccaacgtgtcccagagcaaggactccgacgtgtacatcaccgataagaccgtgctggacatgcggagcatggacttcaagagcaactccgccgtggcctggtccaacaagtccgatttcgcctgcgccaacgccttcaacaacagcattatccccgaggacacattcttcccaagccccgagagcagctgcgacgtgaagctggtggaaaagagcttcgagacagacaccaacctgaacttccagaacctgagcgtgatcggcttcagaatcctgctgctgaaagtggccggctttaacctgctgatgaccctgcggctgtggtccagccgcgccaagagaagcggatctggcgtgaagcagaccctgaatttcgacctgctgaagctggctggcgacgtggaatccaacccaggcccttctagaggccatatgaccgagtacaagcccacggtgcgcctcgccacccgcgacgacgtccccagggccgtacgcaccctcgccgccgcgttcgccgactaccccgccacgcgccacaccgtcgatccggaccgccacatcgagcgggtcaccgagctgcaagaactcttcctcacgcgcgtcgggctcgacatcggcaaggtgtgggtcgcggacgacggcgccgcggtggcggtctggaccacgccggagagcgtcgaagcgggggcggtgttcgccgagatcggcccgcgcatggccgagttgagcggttcccggctggccgcgcagcaacagatggaaggcctcctggcgccgcaccggcccaaggagcccgcgtggttcctggccaccgtcggcgtctcgcccgaccaccagggcaagggtctgggcagcgccgtcgtgctccccggagtggaggcggccgagcgcgccggggtgcccgccttcctggagacctccgcgccccgcaacctccccttctacgagcggctcggcttcaccgtcaccgccgacgtcgaggtgcccgaaggaccgcgcacctggtgcatgacccgcaagcccggtgcctga

SEQ ID NO: 8484 - DNA, 2046 bp, Artificial Sequence
  Synthetic Polynucloetide
atggccttaccagtgaccgccttgctcctgccgctggccttgctgctccacgccgccaggccggacatcgtgatgacacagagccctgatagcctggccgtgtctctgggagagagagccaccatcaactgcaagagcagccagagcgtgctgtactccagcaacaacaagaactacctggcctggtatcagcagaagcccggccagcctcctaagctgctgatctactgggccagcaccagagaaagcggcgtgcccgatagattttctggcagcggctctggcaccgacttcaccctgacaattagcagcctccaggccgaggatgtggccgtgtactactgccagcagtattacagcacccctctgaccttcggccagggcaccaaggtggaaatcaaaggcggaggcggaagtggaggcggaggatctggcggcggaggctctgaagttcagctggttcagagcggagccgaagtgaagaagccaggcgagagcctgaagattagctgcaaaggctccggctacagcttcaccagctactggatcggctgggtccgacagatgcctggcaaaggactggaatggatgggcatcatctaccccggcgacagcgacaccagatacagccctagctttcagggccaagtgaccatcagcgccgacaagagcatcagcacagcctacctccagtggtcctctctgaaggccagcgataccgccatgtactattgcgccagagatgtcggcagatgggctcctggcggcttcctggattattggggacagggcacactggtcaccgtgtctagtctcgaggacctgaagaacgtgttcccacctgaggtggccgtgttcgagcctagcgaggccgagatcagccacacccagaaagccaccctcgtgtgcctggctaccggcttctaccccgaccatgtggaactgtcttggtgggtcaacggcaaagaggtgcacagcggcgtgtctaccgacccccagccactgaaagaacagcccgccctgaacgacagccggtactgcctgagcagcagactgagagtgtccgccaccttctggcagaacccccggaaccacttcagatgccaggtgcagttctacggcctgagcgagaacgacgagtggacccaggacagagccaagcccgtgacccagatcgtgtctgccgaagcctggggcagagccgattgcggctttaccagcgagagctaccagcagggcgtgctgagcgccaccatcctgtacgagatcctgctgggcaaggccaccctgtacgccgtgctggtgtctgccctggtgctgatggctatggtcaagcggaaggacagccggggaagggccaagcgatctggatctggagcaacaaacttctcactactcaaacaagcaggtgacgtggaggagaatcccgggcctactagaggccatatgaccgagtacaagcccacggtgcgcctcgccacccgcgacgacgtccccagggccgtacgcaccctcgccgccgcgttcgccgactaccccgccacgcgccacaccgtcgatccggaccgccacatcgagcgggtcaccgagctgcaagaactcttcctcacgcgcgtcgggctcgacatcggcaaggtgtgggtcgcggacgacggcgccgcggtggcggtctggaccacgccggagagcgtcgaagcgggggcggtgttcgccgagatcggcccgcgcatggccgagttgagcggttcccggctggccgcgcagcaacagatggaaggcctcctggcgccgcaccggcccaaggagcccgcgtggttcctggccaccgtcggcgtctcgcccgaccaccagggcaagggtctgggcagcgccgtcgtgctccccggagtggaggcggccgagcgcgccggggtgcccgccttcctggagacctccgcgccccgcaacctccccttctacgagcggctcggcttcaccgtcaccgccgacgtcgaggtgcccgaaggaccgcgcacctggtgcatgacccgcaagcccggtgcctga

SEQ ID NO: 8485 - DNA, 2196 bp, Artificial Sequence
  Synthetic Polynucloetide
atggccttaccagtgaccgccttgctcctgccgctggccttgctgctccacgccgccaggccggacatcgtgatgacacagagccctgatagcctggccgtgtctctgggagagagagccaccatcaactgcaagagcagccagagcgtgctgtactccagcaacaacaagaactacctggcctggtatcagcagaagcccggccagcctcctaagctgctgatctactgggccagcaccagagaaagcggcgtgcccgatagattttctggcagcggctctggcaccgacttcaccctgacaattagcagcctccaggccgaggatgtggccgtgtactactgccagcagtattacagcacccctctgaccttcggccagggcaccaaggtggaaatcaaaggcggaggcggaagtggaggcggaggatctggcggcggaggctctgaagttcagctggttcagagcggagccgaagtgaagaagccaggcgagagcctgaagattagctgcaaaggctccggctacagcttcaccagctactggatcggctgggtccgacagatgcctggcaaaggactggaatggatgggcatcatctaccccggcgacagcgacaccagatacagccctagctttcagggccaagtgaccatcagcgccgacaagagcatcagcacagcctacctccagtggtcctctctgaaggccagcgataccgccatgtactattgcgccagagatgtcggcagatgggctcctggcggcttcctggattattggggacagggcacactggtcaccgtgtctagtacgcgtgagcagaaactgatctcggaagaggatctggggagcggcaccccattcccttctctggcccctcccatcatgctgctggtggacggcaagcagcagatggtggtcgtgtgcctggtgctggatgtggccccacctggactggacagccccatctggtttagcgccggcaatggctctgccctggacgcctttacctacggcccaagccctgccaccgatggcacctggacaaatctggcccacctgagcctgcccagcgaggaactggcttcttgggagcctctcgtgtgccacacaggacctggcgctgagggacacagcagatccacccagcctatgcacctgtctggcgaggccagcaccgccagaacctgtcctcaggaacctctgagaggcacccctggcggagcactgtggctgggagtgctgagactgctgctgttcaagctgctgctgtttgacctgctgctgacctgctcctgtctgtgcgatcctgccggccctctgccttctcctgccaccaccacaagactgagagccctgggcagccacagactgcaccctgccacagagacaggcggcagagaggccacaagcagccctagaccccagcccagagacagaagatggggcgataccccccctggcagaaagcctggatctccagtccgcgccaagagaagcggatctggcgtgaagcagaccctgaatttcgacctgctgaagctggctggcgacgtggaatccaacccaggcccttctagatctagaggccatatgaccgagtacaagcccacggtgcgcctcgccacccgcgacgacgtccccagggccgtacgcaccctcgccgccgcgttcgccgactaccccgccacgcgccacaccgtcgatccggaccgccacatcgagcgggtcaccgagctgcaagaactcttcctcacgcgcgtcgggctcgacatcggcaaggtgtgggtcgcggacgacggcgccgcggtggcggtctggaccacgccggagagcgtcgaagcgggggcggtgttcgccgagatcggcccgcgcatggccgagttgagcggttcccggctggccgcgcagcaacagatggaaggcctcctggcgccgcaccggcccaaggagcccgcgtggttcctggccaccgtcggcgtctcgcccgaccaccagggcaagggtctgggcagcgccgtcgtgctccccggagtggaggcggccgagcgcgccggggtgcccgccttcctggagacctccgcgccccgcaacctccccttctacgagcggctcggcttcaccgtcaccgccgacgtcgaggtgcccgaaggaccgcgcacctggtgcatgacccgcaagcccggtgcctga

SEQ ID NO: 8486 - DNA, 1635 bp, Artificial Sequence
  Synthetic Polynucloetide
atggccttaccagtgaccgccttgctcctgccgctggccttgctgctccacgccgccaggccggacatcgtgatgacacagagccctgatagcctggccgtgtctctgggagagagagccaccatcaactgcaagagcagccagagcgtgctgtactccagcaacaacaagaactacctggcctggtatcagcagaagcccggccagcctcctaagctgctgatctactgggccagcaccagagaaagcggcgtgcccgatagattttctggcagcggctctggcaccgacttcaccctgacaattagcagcctccaggccgaggatgtggccgtgtactactgccagcagtattacagcacccctctgaccttcggccagggcaccaaggtggaaatcaaactcgaggacctgaagaacgtgttcccacctgaggtggccgtgttcgagcctagcgaggccgagatcagccacacccagaaagccaccctcgtgtgcctggctaccggcttctaccccgaccatgtggaactgtcttggtgggtcaacggcaaagaggtgcacagcggcgtgtctaccgacccccagccactgaaagaacagcccgccctgaacgacagccggtactgcctgagcagcagactgagagtgtccgccaccttctggcagaacccccggaaccacttcagatgccaggtgcagttctacggcctgagcgagaacgacgagtggacccaggacagagccaagcccgtgacccagatcgtgtctgccgaagcctggggcagagccgattgcggctttaccagcgagagctaccagcagggcgtgctgagcgccaccatcctgtacgagatcctgctgggcaaggccaccctgtacgccgtgctggtgtctgccctggtgctgatggctatggtcaagcggaaggacagccggggaagggccaagcgatctggatctggagcaacaaacttctcactactcaaacaagcaggtgacgtggaggagaatcccgggcctactagaggccatatgaccgagtacaagcccacggtgcgcctcgccacccgcgacgacgtccccagggccgtacgcaccctcgccgccgcgttcgccgactaccccgccacgcgccacaccgtcgatccggaccgccacatcgagcgggtcaccgagctgcaagaactcttcctcacgcgcgtcgggctcgacatcggcaaggtgtgggtcgcggacgacggcgccgcggtggcggtctggaccacgccggagagcgtcgaagcgggggcggtgttcgccgagatcggcccgcgcatggccgagttgagcggttcccggctggccgcgcagcaacagatggaaggcctcctggcgccgcaccggcccaaggagcccgcgtggttcctggccaccgtcggcgtctcgcccgaccaccagggcaagggtctgggcagcgccgtcgtgctccccggagtggaggcggccgagcgcgccggggtgcccgccttcctggagacctccgcgccccgcaacctccccttctacgagcggctcggcttcaccgtcaccgccgacgtcgaggtgcccgaaggaccgcgcacctggtgcatgacccgcaagcccggtgcctga

SEQ ID NO: 8487 - DNA, 942 bp, Artificial Sequence
  Synthetic Polynucloetide
atggccttaccagtgaccgccttgctcctgccgctggccttgctgctccacgccgccaggccggacatcgtgatgacacagagccctgatagcctggccgtgtctctgggagagagagccaccatcaactgcaagagcagccagagcgtgctgtactccagcaacaacaagaactacctggcctggtatcagcagaagcccggccagcctcctaagctgctgatctactgggccagcaccagagaaagcggcgtgcccgatagattttctggcagcggctctggcaccgacttcaccctgacaattagcagcctccaggccgaggatgtggccgtgtactactgccagcagtattacagcacccctctgaccttcggccagggcaccaaggtggaaatcaaactcgaggacctgaagaacgtgttcccacctgaggtggccgtgttcgagcctagcgaggccgagatcagccacacccagaaagccaccctcgtgtgcctggctaccggcttctaccccgaccatgtggaactgtcttggtgggtcaacggcaaagaggtgcacagcggcgtgtctaccgacccccagccactgaaagaacagcccgccctgaacgacagccggtactgcctgagcagcagactgagagtgtccgccaccttctggcagaacccccggaaccacttcagatgccaggtgcagttctacggcctgagcgagaacgacgagtggacccaggacagagccaagcccgtgacccagatcgtgtctgccgaagcctggggcagagccgattgcggctttaccagcgagagctaccagcagggcgtgctgagcgccaccatcctgtacgagatcctgctgggcaaggccaccctgtacgccgtgctggtgtctgccctggtgctgatggctatggtcaagcggaaggacagccgggga

SEQ ID NO: 8488 - DNA, 1356 bp, Artificial Sequence
  Synthetic Polynucloetide
atggactggatttggcgcatccttttccttgtcggcgctgctaccggcgcgcattccttcgaagaagttcagctggttcagagcggagccgaagtgaagaagccaggcgagagcctgaagattagctgcaaaggctccggctacagcttcaccagctactggatcggctgggtccgacagatgcctggcaaaggactggaatggatgggcatcatctaccccggcgacagcgacaccagatacagccctagctttcagggccaagtgaccatcagcgccgacaagagcatcagcacagcctacctccagtggtcctctctgaaggccagcgataccgccatgtactattgcgccagagatgtcggcagatgggctcctggcggcttcctggattattggggacagggcacactggtcaccgtgtctagtacgcgtatccagaaccctgatcctgccgtgtaccagctgcgggatagcaagagcagcgacaagagcgtgtgtctgttcaccgacttcgacagccagaccaacgtgtcccagagcaaggactccgacgtgtacatcaccgataagaccgtgctggacatgcggagcatggacttcaagagcaactccgccgtggcctggtccaacaagtccgatttcgcctgcgccaacgccttcaacaacagcattatccccgaggacacattcttcccaagccccgagagcagctgcgacgtgaagctggtggaaaagagcttcgagacagacaccaacctgaacttccagaacctgagcgtgatcggcttcagaatcctgctgctgaaagtggccggctttaacctgctgatgaccctgcggctgtggtccagccgcgccaagagaagcggatctggcgtgaagcagaccctgaatttcgacctgctgaagctggctggcgacgtggaatccaacccaggcccttctagaggccatatggccaagcctttgtctcaagaagaatccaccctcattgaaagagcaacggctacaatcaacagcatccccatctctgaagactacagcgtcgccagcgcagctctctctagcgacggccgcatcttcactggtgtcaatgtatatcattttactgggggaccttgtgcagaactcgtggtgctgggcactgctgctgctgcggcagctggcaacctgacttgtatcgtcgcgatcggaaatgagaacaggggcatcttgagcccctgcggacggtgccgacaggtgcttctcgatctgcatcctgggatcaaagccatagtgaaggacagtgatggacagccgacggcagttgggattcgtgaattgctgccctctggttatgtgtgggagggctga

SEQ ID NO: 8489 - DNA, 855 bp, Artificial Sequence
  Synthetic Polynucloetide
atggactggatttggcgcatccttttccttgtcggcgctgctaccggcgcgcattccttcgaagaagttcagctggttcagagcggagccgaagtgaagaagccaggcgagagcctgaagattagctgcaaaggctccggctacagcttcaccagctactggatcggctgggtccgacagatgcctggcaaaggactggaatggatgggcatcatctaccccggcgacagcgacaccagatacagccctagctttcagggccaagtgaccatcagcgccgacaagagcatcagcacagcctacctccagtggtcctctctgaaggccagcgataccgccatgtactattgcgccagagatgtcggcagatgggctcctggcggcttcctggattattggggacagggcacactggtcaccgtgtctagtacgcgtatccagaaccctgatcctgccgtgtaccagctgcgggatagcaagagcagcgacaagagcgtgtgtctgttcaccgacttcgacagccagaccaacgtgtcccagagcaaggactccgacgtgtacatcaccgataagaccgtgctggacatgcggagcatggacttcaagagcaactccgccgtggcctggtccaacaagtccgatttcgcctgcgccaacgccttcaacaacagcattatccccgaggacacattcttcccaagccccgagagcagctgcgacgtgaagctggtggaaaagagcttcgagacagacaccaacctgaacttccagaacctgagcgtgatcggcttcagaatcctgctgctgaaagtggccggctttaacctgctgatgaccctgcggctgtggtccagc

SEQ ID NO: 8490 - DNA, 1689 bp, Artificial Sequence
  Synthetic Polynucloetide
atggccttaccagtgaccgccttgctcctgccgctggccttgctgctccacgccgccaggccggacatcgtgatgacacagagccctgatagcctggccgtgtctctgggagagagagccaccatcaactgcaagagcagccagagcgtgctgtactccagcaacaacaagaactacctggcctggtatcagcagaagcccggccagcctcctaagctgctgatctactgggccagcaccagagaaagcggcgtgcccgatagattttctggcagcggctctggcaccgacttcaccctgacaattagcagcctccaggccgaggatgtggccgtgtactactgccagcagtattacagcacccctctgaccttcggccagggcaccaaggtggaaatcaaactcgaggggaaaccaattcccaaccctcttctgggactggattcaaccggcagcggcgaggacctgaagaacgtgttcccacctgaggtggccgtgttcgagcctagcgaggccgagatcagccacacccagaaagccaccctcgtgtgcctggctaccggcttctaccccgaccatgtggaactgtcttggtgggtcaacggcaaagaggtgcacagcggcgtgtgtaccgacccccagccactgaaagaacagcccgccctgaacgacagccggtactgcctgagcagcagactgagagtgtccgccaccttctggcagaacccccggaaccacttcagatgccaggtgcagttctacggcctgagcgagaacgacgagtggacccaggacagagccaagcccgtgacccagatcgtgtctgccgaagcctggggcagagccgattgcggctttaccagcgagagctaccagcagggcgtgctgagcgccaccatcctgtacgagatcctgctgggcaaggccaccctgtacgccgtgctggtgtctgccctggtgctgatggctatggtcaagcggaaggacagccggggaagggccaagcgatctggatctggagcaacaaacttctcactactcaaacaagcaggtgacgtggaggagaatcccgggcctactagaggccatatgaccgagtacaagcccacggtgcgcctcgccacccgcgacgacgtccccagggccgtacgcaccctcgccgccgcgttcgccgactaccccgccacgcgccacaccgtcgatccggaccgccacatcgagcgggtcaccgagctgcaagaactcttcctcacgcgcgtcgggctcgacatcggcaaggtgtgggtcgcggacgacggcgccgcggtggcggtctggaccacgccggagagcgtcgaagcgggggcggtgttcgccgagatcggcccgcgcatggccgagttgagcggttcccggctggccgcgcagcaacagatggaaggcctcctggcgccgcaccggcccaaggagcccgcgtggttcctggccaccgtcggcgtctcgcccgaccaccagggcaagggtctgggcagcgccgtcgtgctccccggagtggaggcggccgagcgcgccggggtgcccgccttcctggagacctccgcgccccgcaacctccccttctacgagcggctcggcttcaccgtcaccgccgacgtcgaggtgcccgaaggaccgcgcacctggtgcatgacccgcaagcccggtgcctga

SEQ ID NO: 8491 - DNA, 999 bp, Artificial Sequence
  Synthetic Polynucloetide
atggccttaccagtgaccgccttgctcctgccgctggccttgctgctccacgccgccaggccggacatcgtgatgacacagagccctgatagcctggccgtgtctctgggagagagagccaccatcaactgcaagagcagccagagcgtgctgtactccagcaacaacaagaactacctggcctggtatcagcagaagcccggccagcctcctaagctgctgatctactgggccagcaccagagaaagcggcgtgcccgatagattttctggcagcggctctggcaccgacttcaccctgacaattagcagcctccaggccgaggatgtggccgtgtactactgccagcagtattacagcacccctctgaccttcggccagggcaccaaggtggaaatcaaactcgaggggaaaccaattcccaaccctcttctgggactggattcaaccggcagcggcgaggacctgaagaacgtgttcccacctgaggtggccgtgttcgagcctagcgaggccgagatcagccacacccagaaagccaccctcgtgtgcctggctaccggcttctaccccgaccatgtggaactgtcttggtgggtcaacggcaaagaggtgcacagcggcgtgtgtaccgacccccagccactgaaagaacagcccgccctgaacgacagccggtactgcctgagcagcagactgagagtgtccgccaccttctggcagaacccccggaaccacttcagatgccaggtgcagttctacggcctgagcgagaacgacgagtggacccaggacagagccaagcccgtgacccagatcgtgtctgccgaagcctggggcagagccgattgcggctttaccagcgagagctaccagcagggcgtgctgagcgccaccatcctgtacgagatcctgctgggcaaggccaccctgtacgccgtgctggtgtctgccctggtgctgatggctatggtcaagcggaaggacagccggggatga

SEQ ID NO: 8492 - DNA, 1392 bp, Artificial Sequence
  Synthetic Polynucloetide
atggactggatttggcgcatccttttccttgtcggcgctgctaccggcgcgcattccttcgaagaagttcagctggttcagagcggagccgaagtgaagaagccaggcgagagcctgaagattagctgcaaaggctccggctacagcttcaccagctactggatcggctgggtccgacagatgcctggcaaaggactggaatggatgggcatcatctaccccggcgacagcgacaccagatacagccctagctttcagggccaagtgaccatcagcgccgacaagagcatcagcacagcctacctccagtggtcctctctgaaggccagcgataccgccatgtactattgcgccagagatgtcggcagatgggctcctggcggcttcctggattattggggacagggcacactggtcaccgtgtctagtacgcgtgagcagaaactgatctcggaagaggatgggagcggcatccagaaccctgatcctgccgtgtaccagctgcgggatagcaagagcagcgacaagagcgtgtgtctgttcaccgacttcgacagccagaccaacgtgtcccagagcaaggactccgacgtgtacatcaccgataagtgcgtgctggacatgcggagcatggacttcaagagcaactccgccgtggcctggtccaacaagtccgatttcgcctgcgccaacgccttcaacaacagcattatccccgaggacacattcttcccaagccccgagagcagctgcgacgtgaagctggtggaaaagagcttcgagacagacaccaacctgaacttccagaacctgagcgtgatcggcttcagaatcctgctgctgaaagtggccggctttaacctgctgatgaccctgcggctgtggtccagccgcgccaagagaagcggatctggcgtgaagcagaccctgaatttcgacctgctgaagctggctggcgacgtggaatccaacccaggcccttctagaggccatatggccaagcctttgtctcaagaagaatccaccctcattgaaagagcaacggctacaatcaacagcatccccatctctgaagactacagcgtcgccagcgcagctctctctagcgacggccgcatcttcactggtgtcaatgtatatcattttactgggggaccttgtgcagaactcgtggtgctgggcactgctgctgctgcggcagctggcaacctgacttgtatcgtcgcgatcggaaatgagaacaggggcatcttgagcccctgcggacggtgccgacaggtgcttctcgatctgcatcctgggatcaaagccatagtgaaggacagtgatggacagccgacggcagttgggattcgtgaattgctgccctctggttatgtgtgggagggctga

SEQ ID NO: 8493 - DNA, 894 bp, Artificial Sequence
  Synthetic Polynucloetide
atggactggatttggcgcatccttttccttgtcggcgctgctaccggcgcgcattccttcgaagaagttcagctggttcagagcggagccgaagtgaagaagccaggcgagagcctgaagattagctgcaaaggctccggctacagcttcaccagctactggatcggctgggtccgacagatgcctggcaaaggactggaatggatgggcatcatctaccccggcgacagcgacaccagatacagccctagctttcagggccaagtgaccatcagcgccgacaagagcatcagcacagcctacctccagtggtcctctctgaaggccagcgataccgccatgtactattgcgccagagatgtcggcagatgggctcctggcggcttcctggattattggggacagggcacactggtcaccgtgtctagtacgcgtgagcagaaactgatctcggaagaggatgggagcggcatccagaaccctgatcctgccgtgtaccagctgcgggatagcaagagcagcgacaagagcgtgtgtctgttcaccgacttcgacagccagaccaacgtgtcccagagcaaggactccgacgtgtacatcaccgataagtgcgtgctggacatgcggagcatggacttcaagagcaactccgccgtggcctggtccaacaagtccgatttcgcctgcgccaacgccttcaacaacagcattatccccgaggacacattcttcccaagccccgagagcagctgcgacgtgaagctggtggaaaagagcttcgagacagacaccaacctgaacttccagaacctgagcgtgatcggcttcagaatcctgctgctgaaagtggccggctttaacctgctgatgaccctgcggctgtggtccagctga

SEQ ID NO: 8494 - DNA, 1950 bp, Artificial Sequence
  Synthetic Polynucloetide
atggccttaccagtgaccgccttgctcctgccgctggccttgctgctccacgccgccaggccggacatcgtgatgacacagagccctgatagcctggccgtgtctctgggagagagagccaccatcaactgcaagagcagccagagcgtgctgtactccagcaacaacaagaactacctggcctggtatcagcagaagcccggccagcctcctaagctgctgatctactgggccagcaccagagaaagcggcgtgcccgatagattttctggcagcggctctggcaccgacttcaccctgacaattagcagcctccaggccgaggatgtggccgtgtactactgccagcagtattacagcacccctctgaccttcggccagggcaccaaggtggaaatcaaaggcggaggcggaagtggaggcggaggatctggcggcggaggctctgaagttcagctggttcagagcggagccgaagtgaagaagccaggcgagagcctgaagattagctgcaaaggctccggctacagcttcaccagctactggatcggctgggtccgacagatgcctggcaaaggactggaatggatgggcatcatctaccccggcgacagcgacaccagatacagccctagctttcagggccaagtgaccatcagcgccgacaagagcatcagcacagcctacctccagtggtcctctctgaaggccagcgataccgccatgtactattgcgccagagatgtcggcagatgggctcctggcggcttcctggattattggggacagggcacactggtcaccgtgtctagtacgcgtgggagcggcatccagaaccctgatcctgccgtgtaccagctgcgggatagcaagagcagcgacaagagcgtgtgtctgttcaccgacttcgacagccagaccaacgtgtcccagagcaaggactccgacgtgtacatcaccgataagaccgtgctggacatgcggagcatggacttcaagagcaactccgccgtggcctggtccaacaagtccgatttcgcctgcgccaacgccttcaacaacagcattatccccgaggacacattcttcccaagcagcgacgtgccctgcgacgtgaagctggtggaaaagagcttcgagacagacaccaacctgaacttccagaacctgagcgtgatcggcttcagaatcctgctgctgaaagtggccggctttaacctgctgatgaccctgcggctgtggtccagccgcgccaagagaagcggatctggcgtgaagcagaccctgaatttcgacctgctgaagctggctggcgacgtggaatccaacccaggcccttctagaggccatatgaccgagtacaagcccacggtgcgcctcgccacccgcgacgacgtccccagggccgtacgcaccctcgccgccgcgttcgccgactaccccgccacgcgccacaccgtcgatccggaccgccacatcgagcgggtcaccgagctgcaagaactcttcctcacgcgcgtcgggctcgacatcggcaaggtgtgggtcgcggacgacggcgccgcggtggcggtctggaccacgccggagagcgtcgaagcgggggcggtgttcgccgagatcggcccgcgcatggccgagttgagcggttcccggctggccgcgcagcaacagatggaaggcctcctggcgccgcaccggcccaaggagcccgcgtggttcctggccaccgtcggcgtctcgcccgaccaccagggcaagggtctgggcagcgccgtcgtgctccccggagtggaggcggccgagcgcgccggggtgcccgccttcctggagacctccgcgccccgcaacctccccttctacgagcggctcggcttcaccgtcaccgccgacgtcgaggtgcccgaaggaccgcgcacctggtgcatgacccgcaagcccggtgcctga

SEQ ID NO: 8495 - DNA, 2046 bp, Artificial Sequence
  Synthetic Polynucloetide
atggccttaccagtgaccgccttgctcctgccgctggccttgctgctccacgccgccaggccggacatcgtgatgacacagagccctgatagcctggccgtgtctctgggagagagagccaccatcaactgcaagagcagccagagcgtgctgtactccagcaacaacaagaactacctggcctggtatcagcagaagcccggccagcctcctaagctgctgatctactgggccagcaccagagaaagcggcgtgcccgatagattttctggcagcggctctggcaccgacttcaccctgacaattagcagcctccaggccgaggatgtggccgtgtactactgccagcagtattacagcacccctctgaccttcggccagggcaccaaggtggaaatcaaaggcggaggcggaagtggaggcggaggatctggcggcggaggctctgaagttcagctggttcagagcggagccgaagtgaagaagccaggcgagagcctgaagattagctgcaaaggctccggctacagcttcaccagctactggatcggctgggtccgacagatgcctggcaaaggactggaatggatgggcatcatctaccccggcgacagcgacaccagatacagccctagctttcagggccaagtgaccatcagcgccgacaagagcatcagcacagcctacctccagtggtcctctctgaaggccagcgataccgccatgtactattgcgccagagatgtcggcagatgggctcctggcggcttcctggattattggggacagggcacactggtcaccgtgtctagtctcgaggacctgaagaacgtgttcccacctgaggtggccgtgttcgagcctagcaaggccgagatcgcccacacccagaaagccaccctcgtgtgcctggctaccggcttctaccccgaccatgtggaactgtcttggtgggtcaacggcaaagaggtgcacagcggcgtgtctaccgacccccagccactgaaagaacagcccgccctgaacgacagccggtactgcctgagcagcagactgagagtgtccgccaccttctggcagaacccccggaaccacttcagatgccaggtgcagttctacggcctgagcgagaacgacgagtggacccaggacagagccaagcccgtgacccagatcgtgtctgccgaagcctggggcagagccgattgcggcatcaccagcgccagctaccaccagggcgtgctgagcgccaccatcctgtacgagatcctgctgggcaaggccaccctgtacgccgtgctggtgtctgccctggtgctgatggctatggtcaagcggaaggacagccggggaagggccaagcgatctggatctggagcaacaaacttctcactactcaaacaagcaggtgacgtggaggagaatcccgggcctactagaggccatatgaccgagtacaagcccacggtgcgcctcgccacccgcgacgacgtccccagggccgtacgcaccctcgccgccgcgttcgccgactaccccgccacgcgccacaccgtcgatccggaccgccacatcgagcgggtcaccgagctgcaagaactcttcctcacgcgcgtcgggctcgacatcggcaaggtgtgggtcgcggacgacggcgccgcggtggcggtctggaccacgccggagagcgtcgaagcgggggcggtgttcgccgagatcggcccgcgcatggccgagttgagcggttcccggctggccgcgcagcaacagatggaaggcctcctggcgccgcaccggcccaaggagcccgcgtggttcctggccaccgtcggcgtctcgcccgaccaccagggcaagggtctgggcagcgccgtcgtgctccccggagtggaggcggccgagcgcgccggggtgcccgccttcctggagacctccgcgccccgcaacctccccttctacgagcggctcggcttcaccgtcaccgccgacgtcgaggtgcccgaaggaccgcgcacctggtgcatgacccgcaagcccggtgcctga

SEQ ID NO: 8496 - DNA, 2115 bp, Artificial Sequence
  Synthetic Polynucloetide
atggccttaccagtgaccgccttgctcctgccgctggccttgctgctccacgccgccaggccggacatcgtgatgacacagagccctgatagcctggccgtgtctctgggagagagagccaccatcaactgcaagagcagccagagcgtgctgtactccagcaacaacaagaactacctggcctggtatcagcagaagcccggccagcctcctaagctgctgatctactgggccagcaccagagaaagcggcgtgcccgatagattttctggcagcggctctggcaccgacttcaccctgacaattagcagcctccaggccgaggatgtggccgtgtactactgccagcagtattacagcacccctctgaccttcggccagggcaccaaggtggaaatcaaaggcggaggcggaagtggaggcggaggatctggcggcggaggctctgaagttcagctggttcagagcggagccgaagtgaagaagccaggcgagagcctgaagattagctgcaaaggctccggctacagcttcaccagctactggatcggctgggtccgacagatgcctggcaaaggactggaatggatgggcatcatctaccccggcgacagcgacaccagatacagccctagctttcagggccaagtgaccatcagcgccgacaagagcatcagcacagcctacctccagtggtcctctctgaaggccagcgataccgccatgtactattgcgccagagatgtcggcagatgggctcctggcggcttcctggattattggggacagggcacactggtcaccgtgtctagtacgcgtgggtctggaggcggaggcagcggcggaggcgggagcggcgacggtaacgaggagatgggaggaatcactcaaaccccttacaaagtctcaatttcaggaacaactgttatccttacatgtccccagtatcctggcagcgagatcctttggcagcataacgacaagaatatagggggagatgaagacgataagaatatcggatctgacgaggatcacttgagcctgaaagagttctccgagcttgaacaaagcggatattatgtgtgctatccgcgcgggtcaaagccggaagacgctaacttttacctttatctccgagccagagtgtgcgaaaattgcatggaaatggacgttatgtccgttgctacaatagttatcgtagatatatgcatcacgggtggactgcttctgctggtttattattggtccaagaatagaaaggccaaagctaaacccgtgaccagaggcgctggcgcaggcggaaggcaaaggggacaaaacaaagaacggccaccaccagtgccaaatccagattatgagcctattcggaaaggacagagggacctgtactctggcctgaatcagagaagaatccgcgccaagagaagcggatctggcgtgaagcagaccctgaatttcgacctgctgaagctggctggcgacgtggaatccaacccaggcccttctagaggccatatgaccgagtacaagcccacggtgcgcctcgccacccgcgacgacgtccccagggccgtacgcaccctcgccgccgcgttcgccgactaccccgccacgcgccacaccgtcgatccggaccgccacatcgagcgggtcaccgagctgcaagaactcttcctcacgcgcgtcgggctcgacatcggcaaggtgtgggtcgcggacgacggcgccgcggtggcggtctggaccacgccggagagcgtcgaagcgggggcggtgttcgccgagatcggcccgcgcatggccgagttgagcggttcccggctggccgcgcagcaacagatggaaggcctcctggcgccgcaccggcccaaggagcccgcgtggttcctggccaccgtcggcgtctcgcccgaccaccagggcaagggtctgggcagcgccgtcgtgctccccggagtggaggcggccgagcgcgccggggtgcccgccttcctggagacctccgcgccccgcaacctccccttctacgagcggctcggcttcaccgtcaccgccgacgtcgaggtgcccgaaggaccgcgcacctggtgcatgacccgcaagcccggtgcctga

SEQ ID NO: 8497 - DNA, 2010 bp, Artificial Sequence
  Synthetic Polynucloetide
atggccttaccagtgaccgccttgctcctgccgctggccttgctgctccacgccgccaggccggacatcgtgatgacacagagccctgatagcctggccgtgtctctgggagagagagccaccatcaactgcaagagcagccagagcgtgctgtactccagcaacaacaagaactacctggcctggtatcagcagaagcccggccagcctcctaagctgctgatctactgggccagcaccagagaaagcggcgtgcccgatagattttctggcagcggctctggcaccgacttcaccctgacaattagcagcctccaggccgaggatgtggccgtgtactactgccagcagtattacagcacccctctgaccttcggccagggcaccaaggtggaaatcaaaggcggaggcggaagtggaggcggaggatctggcggcggaggctctgaagttcagctggttcagagcggagccgaagtgaagaagccaggcgagagcctgaagattagctgcaaaggctccggctacagcttcaccagctactggatcggctgggtccgacagatgcctggcaaaggactggaatggatgggcatcatctaccccggcgacagcgacaccagatacagccctagctttcagggccaagtgaccatcagcgccgacaagagcatcagcacagcctacctccagtggtcctctctgaaggccagcgataccgccatgtactattgcgccagagatgtcggcagatgggctcctggcggcttcctggattattggggacagggcacactggtcaccgtgtctagtacgcgtgggtctggaggcggaggcagcggcggaggcgggagcggcttcaagatccccatcgaggaactggaagatcgggtgttcgtgaactgcaacacctctatcacctgggtggaaggcaccgtgggaacactgctgagcgacatcaccagactggacctcggcaagcggattctggaccctcggggcatctacagatgcaacggcaccgacatctacaaggacaaagaaagcaccgtgcaggtccactacagaatgtgccagtcctgcgtggaactggaccctgctacagtggccggcatcatcgtgaccgatgtgatcgctactctgctgctggctctgggagtgttctgcttcgccggacacgaaacaggcagactgtctggcgctgccgatacacaggccctgctgagaaacgaccaagtgtatcagcccctgcgcgacagagatgatgcccagtattctcacctcggcggcaactgggctagaaacaagcgcgccaagagaagcggatctggcgtgaagcagaccctgaatttcgacctgctgaagctggctggcgacgtggaatccaacccaggcccttctagaggccatatgaccgagtacaagcccacggtgcgcctcgccacccgcgacgacgtccccagggccgtacgcaccctcgccgccgcgttcgccgactaccccgccacgcgccacaccgtcgatccggaccgccacatcgagcgggtcaccgagctgcaagaactcttcctcacgcgcgtcgggctcgacatcggcaaggtgtgggtcgcggacgacggcgccgcggtggcggtctggaccacgccggagagcgtcgaagcgggggcggtgttcgccgagatcggcccgcgcatggccgagttgagcggttcccggctggccgcgcagcaacagatggaaggcctcctggcgccgcaccggcccaaggagcccgcgtggttcctggccaccgtcggcgtctcgcccgaccaccagggcaagggtctgggcagcgccgtcgtgctccccggagtggaggcggccgagcgcgccggggtgcccgccttcctggagacctccgcgccccgcaacctccccttctacgagcggctcggcttcaccgtcaccgccgacgtcgaggtgcccgaaggaccgcgcacctggtgcatgacccgcaagcccggtgcctga

SEQ ID NO: 8498 - DNA, 2040 bp, Artificial Sequence
  Synthetic Polynucloetide
atggccttaccagtgaccgccttgctcctgccgctggccttgctgctccacgccgccaggccggacatcgtgatgacacagagccctgatagcctggccgtgtctctgggagagagagccaccatcaactgcaagagcagccagagcgtgctgtactccagcaacaacaagaactacctggcctggtatcagcagaagcccggccagcctcctaagctgctgatctactgggccagcaccagagaaagcggcgtgcccgatagattttctggcagcggctctggcaccgacttcaccctgacaattagcagcctccaggccgaggatgtggccgtgtactactgccagcagtattacagcacccctctgaccttcggccagggcaccaaggtggaaatcaaaggcggaggcggaagtggaggcggaggatctggcggcggaggctctgaagttcagctggttcagagcggagccgaagtgaagaagccaggcgagagcctgaagattagctgcaaaggctccggctacagcttcaccagctactggatcggctgggtccgacagatgcctggcaaaggactggaatggatgggcatcatctaccccggcgacagcgacaccagatacagccctagctttcagggccaagtgaccatcagcgccgacaagagcatcagcacagcctacctccagtggtcctctctgaaggccagcgataccgccatgtactattgcgccagagatgtcggcagatgggctcctggcggcttcctggattattggggacagggcacactggtcaccgtgtctagtacgcgtgggtctggaggcggaggcagcggcggaggcgggagcggccagagcatcaagggcaaccacctggtcaaggtgtacgactaccaagaggacggcagcgtgctgctgacatgtgatgccgaggccaagaacatcacctggtttaaggacggcaagatgatcggcttcctgaccgaggacaagaagaagtggaacctgggcagcaacgctaaggaccccagaggcatgtatcagtgcaagggcagccagaacaagagcaagcccctccaggtgtactaccggatgtgccagaactgcatcgagctgaacgccgctaccatcagcggctttctgttcgccgagatcgtgtccatcttcgtgctggccgtgggcgtgtactttatcgctggacaggatggcgtgcggcagagcagagcttccgataagcaaaccctgctgcctaacgaccagctgtaccagcctctgaaggacagagaggacgaccagtacagccacctccagggcaatcagctgagaagaaaccgcgccaagagaagcggatctggcgtgaagcagaccctgaatttcgacctgctgaagctggctggcgacgtggaatccaacccaggcccttctagaggccatatgaccgagtacaagcccacggtgcgcctcgccacccgcgacgacgtccccagggccgtacgcaccctcgccgccgcgttcgccgactaccccgccacgcgccacaccgtcgatccggaccgccacatcgagcgggtcaccgagctgcaagaactcttcctcacgcgcgtcgggctcgacatcggcaaggtgtgggtcgcggacgacggcgccgcggtggcggtctggaccacgccggagagcgtcgaagcgggggcggtgttcgccgagatcggcccgcgcatggccgagttgagcggttcccggctggccgcgcagcaacagatggaaggcctcctggcgccgcaccggcccaaggagcccgcgtggttcctggccaccgtcggcgtctcgcccgaccaccagggcaagggtctgggcagcgccgtcgtgctccccggagtggaggcggccgagcgcgccggggtgcccgccttcctggagacctccgcgccccgcaacctccccttctacgagcggctcggcttcaccgtcaccgccgacgtcgaggtgcccgaaggaccgcgcacctggtgcatgacccgcaagcccggtgcctga

SEQ ID NO: 8499 - DNA, 1989 bp, Artificial Sequence
  Synthetic Polynucloetide
atggccttaccagtgaccgccttgctcctgccgctggccttgctgctccacgccgccaggccggacatcgtgatgacacagagccctgatagcctggccgtgtctctgggagagagagccaccatcaactgcaagagcagccagagcgtgctgtactccagcaacaacaagaactacctggcctggtatcagcagaagcccggccagcctcctaagctgctgatctactgggccagcaccagagaaagcggcgtgcccgatagattttctggcagcggctctggcaccgacttcaccctgacaattagcagcctccaggccgaggatgtggccgtgtactactgccagcagtattacagcacccctctgaccttcggccagggcaccaaggtggaaatcaaaggcggaggcggaagtggaggcggaggatctggcggcggaggctctgaagttcagctggttcagagcggagccgaagtgaagaagccaggcgagagcctgaagattagctgcaaaggctccggctacagcttcaccagctactggatcggctgggtccgacagatgcctggcaaaggactggaatggatgggcatcatctaccccggcgacagcgacaccagatacagccctagctttcagggccaagtgaccatcagcgccgacaagagcatcagcacagcctacctccagtggtcctctctgaaggccagcgataccgccatgtactattgcgccagagatgtcggcagatgggctcctggcggcttcctggattattggggacagggcacactggtcaccgtgtctagtacgcgtgggtctggaggcggaggcagcggcggaggcgggagcggccagagttttgggttgttggaccctaaattgtgctatctgttggacggaatcctgttcatttacggagtgatcctgaccgcattgttcctgcgggttaagttttccagatccgcagacgcacccgcttaccaacaagggcagaaccaactctacaatgaacttaatttggggcggagggaagagtacgacgttctggacaaaaggaggggacgagatcccgagatgggcggaaagcctcagcgaaggaagaatccgcaagaggggctttataacgaactccagaaagataaaatggcagaagcctatagtgagattgggatgaagggagaaaggaggaggggtaaaggtcacgatgggttgtaccaaggattgagcacagccactaaagatacctatgatgcgctccacatgcaggccctgccgccaagacgcgccaagagaagcggatctggcgtgaagcagaccctgaatttcgacctgctgaagctggctggcgacgtggaatccaacccaggcccttctagaggccatatgaccgagtacaagcccacggtgcgcctcgccacccgcgacgacgtccccagggccgtacgcaccctcgccgccgcgttcgccgactaccccgccacgcgccacaccgtcgatccggaccgccacatcgagcgggtcaccgagctgcaagaactcttcctcacgcgcgtcgggctcgacatcggcaaggtgtgggtcgcggacgacggcgccgcggtggcggtctggaccacgccggagagcgtcgaagcgggggcggtgttcgccgagatcggcccgcgcatggccgagttgagcggttcccggctggccgcgcagcaacagatggaaggcctcctggcgccgcaccggcccaaggagcccgcgtggttcctggccaccgtcggcgtctcgcccgaccaccagggcaagggtctgggcagcgccgtcgtgctccccggagtggaggcggccgagcgcgccggggtgcccgccttcctggagacctccgcgccccgcaacctccccttctacgagcggctcggcttcaccgtcaccgccgacgtcgaggtgcccgaaggaccgcgcacctggtgcatgacccgcaagcccggtgcctga

SEQ ID NO: 8500 - DNA, 2289 bp, Artificial Sequence
  Synthetic Polynucloetide
atggccttaccagtgaccgccttgctcctgccgctggccttgctgctccacgccgccaggccggaagtgcagctggttgaatctggcggaggactggttcagcctggcggatctctgagactgtcttgtgccgccagcggcttcagcttcagcgacttttggatgagctgggtccgacaggcccctggcaaaggacttgaatgggtcgccacaatcagccaggccggcagcgagaaggactacgtggactctgtgaagggcagattcaccatcagccgggacaacgccaagaagtccctgtacctccagatgaacagcctgagagccgaggacaccgccgtgtactattgtgcctctggcgtgtacagcttcgactacagaggccagggcaccctggtcacagtctcttctggtaccggcggaggcggatctggcggcggaggtagcggtggcggaggatctgaattcgacatcgtgatgacacagagccctgatagcctggccgtgtctctgggagagagagccaccatcaactgcaagagcagccagagcgtgctgtactccagcaacaacaagaactacctggcctggtatcagcagaagcccggccagcctcctaagctgctgatctactgggccagcaccagagaaagcggcgtgcccgatagattttctggcagcggctctggcaccgacttcaccctgacaattagcagcctccaggccgaggatgtggccgtgtactactgccagcagtattacagcacccctctgaccttcggccagggcaccaaggtggaaatcaaactcgaggacctgaagaacgtgttcccacctgaggtggccgtgttcgagcctagcgaggccgagatcagccacacccagaaagccaccctcgtgtgcctggctaccggcttctaccccgaccatgtggaactgtcttggtgggtcaacggcaaagaggtgcacagcggcgtgtgtaccgacccccagccactgaaagaacagcccgccctgaacgacagccggtactgcctgagcagcagactgagagtgtccgccaccttctggcagaacccccggaaccacttcagatgccaggtgcagttctacggcctgagcgagaacgacgagtggacccaggacagagccaagcccgtgacccagatcgtgtctgccgaagcctggggcagagccgattgcggctttaccagcgagagctaccagcagggcgtgctgagcgccaccatcctgtacgagatcctgctgggcaaggccaccctgtacgccgtgctggtgtctgccctggtgctgatggctatggtcaagcggaaggacagccggggaagggccaagcgatctggatctggagcaacaaacttctcactactcaaacaagcaggtgacgtggaggagaatcccgggcctactagtatggactggatttggcgcatccttttccttgtcggcgctgctaccggcgcgcattccttcgaagaagttcagctggttcagagcggagccgaagtgaagaagccaggcgagagcctgaagattagctgcaaaggctccggctacagcttcaccagctactggatcggctgggtccgacagatgcctggcaaaggactggaatggatgggcatcatctaccccggcgacagcgacaccagatacagccctagctttcagggccaagtgaccatcagcgccgacaagagcatcagcacagcctacctccagtggtcctctctgaaggccagcgataccgccatgtactattgcgccagagatgtcggcagatgggctcctggcggcttcctggattattggggacagggcacactggtcaccgtgtctagtacgcgtatccagaaccctgatcctgccgtgtaccagctgcgggatagcaagagcagcgacaagagcgtgtgtctgttcaccgacttcgacagccagaccaacgtgtcccagagcaaggactccgacgtgtacatcaccgataagtgcgtgctggacatgcggagcatggacttcaagagcaactccgccgtggcctggtccaacaagtccgatttcgcctgcgccaacgccttcaacaacagcattatccccgaggacacattcttcccaagccccgagagcagctgcgacgtgaagctggtggaaaagagcttcgagacagacaccaacctgaacttccagaacctgagcgtgatcggcttcagaatcctgctgctgaaagtggccggctttaacctgctgatgaccctgcggctgtggtccagc

SEQ ID NO: 8501 - DNA, 2301 bp, Artificial Sequence
  Synthetic Polynucloetide
atggccttaccagtgaccgccttgctcctgccgctggccttgctgctccacgccgccaggccggaagtgcagctggttgaatctggcggaggactggttcagcctggcggatctctgagactgtcttgtgccgccagcggcttcagcttcagcgacttttggatgagctgggtccgacaggcccctggcaaaggacttgaatgggtcgccacaatcagccaggccggcagcgagaaggactacgtggactctgtgaagggcagattcaccatcagccgggacaacgccaagaagtccctgtacctccagatgaacagcctgagagccgaggacaccgccgtgtactattgtgcctctggcgtgtacagcttcgactacagaggccagggcaccctggtcacagtctcttctggtaccggcggaggcggatctggcggcggaggtagcggtggcggaggatctgaattcgacatcgtgatgacacagagccctgatagcctggccgtgtctctgggagagagagccaccatcaactgcaagagcagccagagcgtgctgtactccagcaacaacaagaactacctggcctggtatcagcagaagcccggccagcctcctaagctgctgatctactgggccagcaccagagaaagcggcgtgcccgatagattttctggcagcggctctggcaccgacttcaccctgacaattagcagcctccaggccgaggatgtggccgtgtactactgccagcagtattacagcacccctctgaccttcggccagggcaccaaggtggaaatcaaactcgagatccagaaccctgatcctgccgtgtaccagctgcgggatagcaagagcagcgacaagagcgtgtgtctgttcaccgacttcgacagccagaccaacgtgtcccagagcaaggactccgacgtgtacatcaccgataagtgcgtgctggacatgcggagcatggacttcaagagcaactccgccgtggcctggtccaacaagtccgatttcgcctgcgccaacgccttcaacaacagcattatccccgaggacacattcttcccaagccccgagagcagctgcgacgtgaagctggtggaaaagagcttcgagacagacaccaacctgaacttccagaacctgagcgtgatcggcttcagaatcctgctgctgaaagtggccggctttaacctgctgatgaccctgcggctgtggtccagccgcgccaagagaagcggatctggcgtgaagcagaccctgaatttcgacctgctgaagctggctggcgacgtggaatccaacccaggccctactagtatggactggatttggcgcatccttttccttgtcggcgctgctaccggcgcgcattccttcgaagaagttcagctggttcagagcggagccgaagtgaagaagccaggcgagagcctgaagattagctgcaaaggctccggctacagcttcaccagctactggatcggctgggtccgacagatgcctggcaaaggactggaatggatgggcatcatctaccccggcgacagcgacaccagatacagccctagctttcagggccaagtgaccatcagcgccgacaagagcatcagcacagcctacctccagtggtcctctctgaaggccagcgataccgccatgtactattgcgccagagatgtcggcagatgggctcctggcggcttcctggattattggggacagggcacactggtcaccgtgtctagtacgcgtgaggacctgaagaacgtgttcccacctgaggtggccgtgttcgagcctagcgaggccgagatcagccacacccagaaagccaccctcgtgtgcctggctaccggcttctaccccgaccatgtggaactgtcttggtgggtcaacggcaaagaggtgcacagcggcgtgtgtaccgacccccagccactgaaagaacagcccgccctgaacgacagccggtactgcctgagcagcagactgagagtgtccgccaccttctggcagaacccccggaaccacttcagatgccaggtgcagttctacggcctgagcgagaacgacgagtggacccaggacagagccaagcccgtgacccagatcgtgtctgccgaagcctggggcagagccgattgcggctttaccagcgagagctaccagcagggcgtgctgagcgccaccatcctgtacgagatcctgctgggcaaggccaccctgtacgccgtgctggtgtctgccctggtgctgatggctatggtcaagcggaaggacagccgggga

SEQ ID NO: 8502 - DNA, 2877 bp, Artificial Sequence
  Synthetic Polynucloetide
atggccttaccagtgaccgccttgctcctgccgctggccttgctgctccacgccgccaggccggaagtgcagctggttgaatctggcggaggactggttcagcctggcggatctctgagactgtcttgtgccgccagcggcttcagcttcagcgacttttggatgagctgggtccgacaggcccctggcaaaggacttgaatgggtcgccacaatcagccaggccggcagcgagaaggactacgtggactctgtgaagggcagattcaccatcagccgggacaacgccaagaagtccctgtacctccagatgaacagcctgagagccgaggacaccgccgtgtactattgtgcctctggcgtgtacagcttcgactacagaggccagggcaccctggtcacagtctcttctggtaccggcggaggcggatctggcggcggaggtagcggtggcggaggatctgaattcgacatcgtgatgacacagagccctgatagcctggccgtgtctctgggagagagagccaccatcaactgcaagagcagccagagcgtgctgtactccagcaacaacaagaactacctggcctggtatcagcagaagcccggccagcctcctaagctgctgatctactgggccagcaccagagaaagcggcgtgcccgatagattttctggcagcggctctggcaccgacttcaccctgacaattagcagcctccaggccgaggatgtggccgtgtactactgccagcagtattacagcacccctctgaccttcggccagggcaccaaggtggaaatcaaactcgaggacctgaagaacgtgttcccacctgaggtggccgtgttcgagcctagcgaggccgagatcagccacacccagaaagccaccctcgtgtgcctggctaccggcttctaccccgaccatgtggaactgtcttggtgggtcaacggcaaagaggtgcacagcggcgtgtctaccgacccccagccactgaaagaacagcccgccctgaacgacagccggtactgcctgagcagcagactgagagtgtccgccaccttctggcagaacccccggaaccacttcagatgccaggtgcagttctacggcctgagcgagaacgacgagtggacccaggacagagccaagcccgtgacccagatcgtgtctgccgaagcctggggcagagccgattgcggatcccagagcttcggcctgctggaccccaagctgtgctacctgctggatggcatcctgttcatctacggcgtgatcctgaccgccctgttcctgagagtgaagttcagcagaagcgccgacgcccctgcctaccagcagggacagaaccaactgtacaacgagctgaacctgggcagacgggaagagtacgacgtgctggacaagcggagaggcagggaccctgagatgggcggaaagccccagcggagaaagaacccccaggaaggactgtataacgaactccagaaagacaagatggccgaagcctacagcgagatcggcatgaagggcgagcggagaagaggcaagggccacgatggcctgtaccagggcctgagcaccgccaccaaggacacctatgacgccctgcacatgcaggccctgcctccaagaagggccaagcgatctggatctggagcaacaaacttctcactactcaaacaagcaggtgacgtggaggagaatcccgggcctactagtatggactggatttggcgcatccttttccttgtcggcgctgctaccggcgcgcattccttcgaagaagttcagctggttcagagcggagccgaagtgaagaagccaggcgagagcctgaagattagctgcaaaggctccggctacagcttcaccagctactggatcggctgggtccgacagatgcctggcaaaggactggaatggatgggcatcatctaccccggcgacagcgacaccagatacagccctagctttcagggccaagtgaccatcagcgccgacaagagcatcagcacagcctacctccagtggtcctctctgaaggccagcgataccgccatgtactattgcgccagagatgtcggcagatgggctcctggcggcttcctggattattggggacagggcacactggtcaccgtgtctagtacgcgtatccagaaccctgatcctgccgtgtaccagctgcgggatagcaagagcagcgacaagagcgtgtgtctgttcaccgacttcgacagccagaccaacgtgtcccagagcaaggactccgacgtgtacatcaccgataagaccgtgctggacatgcggagcatggacttcaagagcaactccgccgtggcctggtccaacaagtccgatttcgcctgcgccaacgccttcaacaacagcattatccccgaggacacattcttcccaagccccgagagcagctgcggtacccagagttttgggttgttggaccctaaattgtgctatctgttggacggaatcctgttcatttacggagtgatcctgaccgcattgttcctgcgggttaagttttccagatccgcagacgcacccgcttaccaacaagggcagaaccaactctacaatgaacttaatttggggcggagggaagagtacgacgttctggacaaaaggaggggacgagatcccgagatgggcggaaagcctcagcgaaggaagaatccgcaagaggggctttataacgaactccagaaagataaaatggcagaagcctatagtgagattgggatgaagggagaaaggaggaggggtaaaggtcacgatgggttgtaccaaggattgagcacagccactaaagatacctatgatgcgctccacatgcaggccctgccgccaaga

SEQ ID NO: 8503 - DNA, 2367 bp, Artificial Sequence
  Synthetic Polynucloetide
atggccttaccagtgaccgccttgctcctgccgctggccttgctgctccacgccgccaggccggaagtgcagctggttgaatctggcggaggactggttcagcctggcggatctctgagactgtcttgtgccgccagcggcttcagcttcagcgacttttggatgagctgggtccgacaggcccctggcaaaggacttgaatgggtcgccacaatcagccaggccggcagcgagaaggactacgtggactctgtgaagggcagattcaccatcagccgggacaacgccaagaagtccctgtacctccagatgaacagcctgagagccgaggacaccgccgtgtactattgtgcctctggcgtgtacagcttcgactacagaggccagggcaccctggtcacagtctcttctggtaccggcggaggcggatctggcggcggaggtagcggtggcggaggatctgaattcgacatcgtgatgacacagagccctgatagcctggccgtgtctctgggagagagagccaccatcaactgcaagagcagccagagcgtgctgtactccagcaacaacaagaactacctggcctggtatcagcagaagcccggccagcctcctaagctgctgatctactgggccagcaccagagaaagcggcgtgcccgatagattttctggcagcggctctggcaccgacttcaccctgacaattagcagcctccaggccgaggatgtggccgtgtactactgccagcagtattacagcacccctctgaccttcggccagggcaccaaggtggaaatcaaactcgagggacagcctaaggccaatcctaccgtgacactgttccctccaagcagcgaagaactccaggccaacaaggccacacttgtgtgcctgatctccgacttctaccctggggctgtgacagtggcttggaaggccgatggatctcctgtgaaagccggcgtggaaaccaccaagccatccaagcagagcaacaacaaatacgccgccagctcctacctgagcctgacacctgagcagtggaagtcccacagatcctacagctgccaagtgacccacgaaggcagcaccgtggaaaagacagtggcccctacagagtgcagccccatcaagaccgatgtgattacaatggaccccaaggacaactgctccaaggacgccaacgataccctgctgctccagctgaccaacaccagcgcctactacatgtacttgttgctgctgctgaagtccgtggtgtacttcgccatcatcacatgctgcctgctgcggagaaccgccttctgctgcaacggcgagaagtctagggccaagcgatctggatctggagcaacaaacttctcactactcaaacaagcaggtgacgtggaggagaatcccgggcctactagtatggactggatttggcgcatccttttccttgtcggcgctgctaccggcgcgcattccttcgaagaagttcagctggttcagagcggagccgaagtgaagaagccaggcgagagcctgaagattagctgcaaaggctccggctacagcttcaccagctactggatcggctgggtccgacagatgcctggcaaaggactggaatggatgggcatcatctaccccggcgacagcgacaccagatacagccctagctttcagggccaagtgaccatcagcgccgacaagagcatcagcacagcctacctccagtggtcctctctgaaggccagcgataccgccatgtactattgcgccagagatgtcggcagatgggctcctggcggcttcctggattattggggacagggcacactggtcaccgtgtctagtacgcgtgcctctacaaagggaccctccgtgtttcctctggctcccagcagcaagtctacaagcggaggaacagccgctctgggctgcctggtcaaggattactttcccgagcctgtgaccgtgtcctggaatagcggagcactgacaagcggcgtgcacacctttccagccgtgctgcaaagcagcggcctgtactctctgagcagcgtggtcacagtgcctagctctagcctgggcacccagacctacatctgcaatgtgaaccacaagcctagcaacaccaaggtggacaagagagtggaacccaagagctgtgaagtgaaaaccgactccaccgaccacgtgaagcccaaagagacagagaacaccaagcagcccagcaagagctgccacaagcccaaggccatcgtgcacaccgagaaagtgaacatgatgagcctgaccgtgctgggcctgcggatgctgttcgccaaaaccgtggccgtgaacttcctgctgaccgccaagctgttcttcctc

SEQ ID NO: 8504 - DNA, 2310 bp, Artificial Sequence
  Synthetic Polynucloetide
atggccttaccagtgaccgccttgctcctgccgctggccttgctgctccacgccgccaggccggaagtgcagctggttgaatctggcggaggactggttcagcctggcggatctctgagactgtcttgtgccgccagcggcttcagcttcagcgacttttggatgagctgggtccgacaggcccctggcaaaggacttgaatgggtcgccacaatcagccaggccggcagcgagaaggactacgtggactctgtgaagggcagattcaccatcagccgggacaacgccaagaagtccctgtacctccagatgaacagcctgagagccgaggacaccgccgtgtactattgtgcctctggcgtgtacagcttcgactacagaggccagggcaccctggtcacagtctcttctggtaccggcggaggcggatctggcggcggaggtagcggtggcggaggatctgaattcgacatcgtgatgacacagagccctgatagcctggccgtgtctctgggagagagagccaccatcaactgcaagagcagccagagcgtgctgtactccagcaacaacaagaactacctggcctggtatcagcagaagcccggccagcctcctaagctgctgatctactgggccagcaccagagaaagcggcgtgcccgatagattttctggcagcggctctggcaccgacttcaccctgacaattagcagcctccaggccgaggatgtggccgtgtactactgccagcagtattacagcacccctctgaccttcggccagggcaccaaggtggaaatcaaactcgagggacagcctaaggccaatcctaccgtgacactgttccctccaagcagcgaagaactccaggccaacaaggccacacttgtgtgcctgatctccgacttctaccctggggctgtgacagtggcttggaaggccgatggatctcctgtgaaagccggcgtggaaaccaccaagccatccaagcagagcaacaacaaatacgccgccagctcctacctgagcctgacacctgagcagtggaagtcccacagatcctacagctgccaagtgacccacgaaggcagcaccgtggaaaagacagtggcccctacagagtgcagcggcagagccgattgcggctttaccagcgagagctaccagcagggcgtgctgagcgccaccatcctgtacgagatcctgctgggcaaggccaccctgtacgccgtgctggtgtctgccctggtgctgatggctatggtcaagcggaaggacagccggggacgcgccaagagaagcggatctggcgtgaagcagaccctgaatttcgacctgctgaagctggctggcgacgtggaatccaacccaggccctactagtatggactggatttggcgcatccttttccttgtcggcgctgctaccggcgcgcattccttcgaagaagttcagctggttcagagcggagccgaagtgaagaagccaggcgagagcctgaagattagctgcaaaggctccggctacagcttcaccagctactggatcggctgggtccgacagatgcctggcaaaggactggaatggatgggcatcatctaccccggcgacagcgacaccagatacagccctagctttcagggccaagtgaccatcagcgccgacaagagcatcagcacagcctacctccagtggtcctctctgaaggccagcgataccgccatgtactattgcgccagagatgtcggcagatgggctcctggcggcttcctggattattggggacagggcacactggtcaccgtgtctagtacgcgtgcctctacaaagggaccctccgtgtttcctctggctcccagcagcaagtctacaagcggaggaacagccgctctgggctgcctggtcaaggattactttcccgagcctgtgaccgtgtcctggaatagcggagcactgacaagcggcgtgcacacctttccagccgtgctgcaaagcagcggcctgtactctctgagcagcgtggtcacagtgcctagctctagcctgggcacccagacctacatctgcaatgtgaaccacaagcctagcaacaccaaggtggacaagagagtggaacccaagagctgtatccccgaggacacattcttcccaagccccgagagcagctgcgacgtgaagctggtggaaaagagcttcgagacagacaccaacctgaacttccagaacctgagcgtgatcggcttcagaatcctgctgctgaaagtggccggctttaacctgctgatgaccctgcggctgtggtccagc

SEQ ID NO: 8505 - DNA, 2712 bp, Artificial Sequence
  Synthetic Polynucloetide
atggccttaccagtgaccgccttgctcctgccgctggccttgctgctccacgccgccaggccggaagtgcagctggttgaatctggcggaggactggttcagcctggcggatctctgagactgtcttgtgccgccagcggcttcagcttcagcgacttttggatgagctgggtccgacaggcccctggcaaaggacttgaatgggtcgccacaatcagccaggccggcagcgagaaggactacgtggactctgtgaagggcagattcaccatcagccgggacaacgccaagaagtccctgtacctccagatgaacagcctgagagccgaggacaccgccgtgtactattgtgcctctggcgtgtacagcttcgactacagaggccagggcaccctggtcacagtctcttctggtaccggcggaggcggatctggcggcggaggtagcggtggcggaggatctgaattcgacatcgtgatgacacagagccctgatagcctggccgtgtctctgggagagagagccaccatcaactgcaagagcagccagagcgtgctgtactccagcaacaacaagaactacctggcctggtatcagcagaagcccggccagcctcctaagctgctgatctactgggccagcaccagagaaagcggcgtgcccgatagattttctggcagcggctctggcaccgacttcaccctgacaattagcagcctccaggccgaggatgtggccgtgtactactgccagcagtattacagcacccctctgaccttcggccagggcaccaaggtggaaatcaaactcgagatccagaaccctgatcctgccgtgtaccagctgcgggatagcaagagcagcgacaagagcgtgtgtctgttcaccgacttcgacagccagaccaacgtgtcccagagcaaggactccgacgtgtacatcaccgataagtgcgtgctggacatgcggagcatggacttcaagagcaactccgccgtggcctggtccaacaagtccgatttcgcctgcgccaacgccttcaacaacagcattatccccgaggacacattcttcccaagccccgagagcagctgcgacgtgaagctggtggaaaagagcttcgagacagacaccaacctgaacttccagaacctgagcgtgatcggcttcagaatcctgctgctgaaagtggccggctttaacctgctgatgaccctgcggctgtggtccagccgcgccaagagaagcggatctggcgtgaagcagaccctgaatttcgacctgctgaagctggctggcgacgtggaatccaacccaggccctactagtatggactggatttggcgcatccttttccttgtcggcgctgctaccggcgcgcattccgggccccagctccagctgcaagagtctggacctggcctggtcaagcctagcgagacactgagcctgacctgtaccgtgtccggcgatagcatcagcagcggcgattactactggggctggatcagacagcctcctggcaaaggactggaatggatcggccacatctactacagcggcgtgacctactacaaccccagcctgaagtccagagtgaccatcagcgtggacaccagccggaaccagttctccctgaagctgtctagcgtgacagccgccgataccgccgtgtactactgcaccagagaggacagcagcaactggcggagtagaggccagggaacactggtcacagttagctctggatccggcggaggcggaagtggaggcggaggatctggcggcggaggctctttcgaagaagttcagctggttcagagcggagccgaagtgaagaagccaggcgagagcctgaagattagctgcaaaggctccggctacagcttcaccagctactggatcggctgggtccgacagatgcctggcaaaggactggaatggatgggcatcatctaccccggcgacagcgacaccagatacagccctagctttcagggccaagtgaccatcagcgccgacaagagcatcagcacagcctacctccagtggtcctctctgaaggccagcgataccgccatgtactattgcgccagagatgtcggcagatgggctcctggcggcttcctggattattggggacagggcacactggtcaccgtgtctagtacgcgtgaggacctgaagaacgtgttcccacctgaggtggccgtgttcgagcctagcgaggccgagatcagccacacccagaaagccaccctcgtgtgcctggctaccggcttctaccccgaccatgtggaactgtcttggtgggtcaacggcaaagaggtgcacagcggcgtgtgtaccgacccccagccactgaaagaacagcccgccctgaacgacagccggtactgcctgagcagcagactgagagtgtccgccaccttctggcagaacccccggaaccacttcagatgccaggtgcagttctacggcctgagcgagaacgacgagtggacccaggacagagccaagcccgtgacccagatcgtgtctgccgaagcctggggcagagccgattgcggctttaccagcgagagctaccagcagggcgtgctgagcgccaccatcctgtacgagatcctgctgggcaaggccaccctgtacgccgtgctggtgtctgccctggtgctgatggctatggtcaagcggaaggacagccgggga

SEQ ID NO: 8506 - DNA, 3288 bp, Artificial Sequence
  Synthetic Polynucloetide
atggccttaccagtgaccgccttgctcctgccgctggccttgctgctccacgccgccaggccggaagtgcagctggttgaatctggcggaggactggttcagcctggcggatctctgagactgtcttgtgccgccagcggcttcagcttcagcgacttttggatgagctgggtccgacaggcccctggcaaaggacttgaatgggtcgccacaatcagccaggccggcagcgagaaggactacgtggactctgtgaagggcagattcaccatcagccgggacaacgccaagaagtccctgtacctccagatgaacagcctgagagccgaggacaccgccgtgtactattgtgcctctggcgtgtacagcttcgactacagaggccagggcaccctggtcacagtctcttctggtaccggcggaggcggatctggcggcggaggtagcggtggcggaggatctgaattcgacatcgtgatgacacagagccctgatagcctggccgtgtctctgggagagagagccaccatcaactgcaagagcagccagagcgtgctgtactccagcaacaacaagaactacctggcctggtatcagcagaagcccggccagcctcctaagctgctgatctactgggccagcaccagagaaagcggcgtgcccgatagattttctggcagcggctctggcaccgacttcaccctgacaattagcagcctccaggccgaggatgtggccgtgtactactgccagcagtattacagcacccctctgaccttcggccagggcaccaaggtggaaatcaaactcgaggacctgaagaacgtgttcccacctgaggtggccgtgttcgagcctagcgaggccgagatcagccacacccagaaagccaccctcgtgtgcctggctaccggcttctaccccgaccatgtggaactgtcttggtgggtcaacggcaaagaggtgcacagcggcgtgtctaccgacccccagccactgaaagaacagcccgccctgaacgacagccggtactgcctgagcagcagactgagagtgtccgccaccttctggcagaacccccggaaccacttcagatgccaggtgcagttctacggcctgagcgagaacgacgagtggacccaggacagagccaagcccgtgacccagatcgtgtctgccgaagcctggggcagagccgattgcggatcccagagcttcggcctgctggaccccaagctgtgctacctgctggatggcatcctgttcatctacggcgtgatcctgaccgccctgttcctgagagtgaagttcagcagaagcgccgacgcccctgcctaccagcagggacagaaccaactgtacaacgagctgaacctgggcagacgggaagagtacgacgtgctggacaagcggagaggcagggaccctgagatgggcggaaagccccagcggagaaagaacccccaggaaggactgtataacgaactccagaaagacaagatggccgaagcctacagcgagatcggcatgaagggcgagcggagaagaggcaagggccacgatggcctgtaccagggcctgagcaccgccaccaaggacacctatgacgccctgcacatgcaggccctgcctccaagaagggccaagcgatctggatctggagcaacaaacttctcactactcaaacaagcaggtgacgtggaggagaatcccgggcctactagtatggactggatttggcgcatccttttccttgtcggcgctgctaccggcgcgcattccgggccccagctccagctgcaagagtctggacctggcctggtcaagcctagcgagacactgagcctgacctgtaccgtgtccggcgatagcatcagcagcggcgattactactggggctggatcagacagcctcctggcaaaggactggaatggatcggccacatctactacagcggcgtgacctactacaaccccagcctgaagtccagagtgaccatcagcgtggacaccagccggaaccagttctccctgaagctgtctagcgtgacagccgccgataccgccgtgtactactgcaccagagaggacagcagcaactggcggagtagaggccagggaacactggtcacagttagctctggatccggcggaggcggaagtggaggcggaggatctggcggcggaggctctttcgaagaagttcagctggttcagagcggagccgaagtgaagaagccaggcgagagcctgaagattagctgcaaaggctccggctacagcttcaccagctactggatcggctgggtccgacagatgcctggcaaaggactggaatggatgggcatcatctaccccggcgacagcgacaccagatacagccctagctttcagggccaagtgaccatcagcgccgacaagagcatcagcacagcctacctccagtggtcctctctgaaggccagcgataccgccatgtactattgcgccagagatgtcggcagatgggctcctggcggcttcctggattattggggacagggcacactggtcaccgtgtctagtacgcgtatccagaaccctgatcctgccgtgtaccagctgcgggatagcaagagcagcgacaagagcgtgtgtctgttcaccgacttcgacagccagaccaacgtgtcccagagcaaggactccgacgtgtacatcaccgataagaccgtgctggacatgcggagcatggacttcaagagcaactccgccgtggcctggtccaacaagtccgatttcgcctgcgccaacgccttcaacaacagcattatccccgaggacacattcttcccaagccccgagagcagctgcggtacccagagttttgggttgttggaccctaaattgtgctatctgttggacggaatcctgttcatttacggagtgatcctgaccgcattgttcctgcgggttaagttttccagatccgcagacgcacccgcttaccaacaagggcagaaccaactctacaatgaacttaatttggggcggagggaagagtacgacgttctggacaaaaggaggggacgagatcccgagatgggcggaaagcctcagcgaaggaagaatccgcaagaggggctttataacgaactccagaaagataaaatggcagaagcctatagtgagattgggatgaagggagaaaggaggaggggtaaaggtcacgatgggttgtaccaaggattgagcacagccactaaagatacctatgatgcgctccacatgcaggccctgccgccaaga

SEQ ID NO: 8507 - DNA, 2778 bp, Artificial Sequence
  Synthetic Polynucloetide
atggccttaccagtgaccgccttgctcctgccgctggccttgctgctccacgccgccaggccggaagtgcagctggttgaatctggcggaggactggttcagcctggcggatctctgagactgtcttgtgccgccagcggcttcagcttcagcgacttttggatgagctgggtccgacaggcccctggcaaaggacttgaatgggtcgccacaatcagccaggccggcagcgagaaggactacgtggactctgtgaagggcagattcaccatcagccgggacaacgccaagaagtccctgtacctccagatgaacagcctgagagccgaggacaccgccgtgtactattgtgcctctggcgtgtacagcttcgactacagaggccagggcaccctggtcacagtctcttctggtaccggcggaggcggatctggcggcggaggtagcggtggcggaggatctgaattcgacatcgtgatgacacagagccctgatagcctggccgtgtctctgggagagagagccaccatcaactgcaagagcagccagagcgtgctgtactccagcaacaacaagaactacctggcctggtatcagcagaagcccggccagcctcctaagctgctgatctactgggccagcaccagagaaagcggcgtgcccgatagattttctggcagcggctctggcaccgacttcaccctgacaattagcagcctccaggccgaggatgtggccgtgtactactgccagcagtattacagcacccctctgaccttcggccagggcaccaaggtggaaatcaaactcgagggacagcctaaggccaatcctaccgtgacactgttccctccaagcagcgaagaactccaggccaacaaggccacacttgtgtgcctgatctccgacttctaccctggggctgtgacagtggcttggaaggccgatggatctcctgtgaaagccggcgtggaaaccaccaagccatccaagcagagcaacaacaaatacgccgccagctcctacctgagcctgacacctgagcagtggaagtcccacagatcctacagctgccaagtgacccacgaaggcagcaccgtggaaaagacagtggcccctacagagtgcagccccatcaagaccgatgtgattacaatggaccccaaggacaactgctccaaggacgccaacgataccctgctgctccagctgaccaacaccagcgcctactacatgtacttgttgctgctgctgaagtccgtggtgtacttcgccatcatcacatgctgcctgctgcggagaaccgccttctgctgcaacggcgagaagtctagggccaagcgatctggatctggagcaacaaacttctcactactcaaacaagcaggtgacgtggaggagaatcccgggcctactagtatggactggatttggcgcatccttttccttgtcggcgctgctaccggcgcgcattccgggccccagctccagctgcaagagtctggacctggcctggtcaagcctagcgagacactgagcctgacctgtaccgtgtccggcgatagcatcagcagcggcgattactactggggctggatcagacagcctcctggcaaaggactggaatggatcggccacatctactacagcggcgtgacctactacaaccccagcctgaagtccagagtgaccatcagcgtggacaccagccggaaccagttctccctgaagctgtctagcgtgacagccgccgataccgccgtgtactactgcaccagagaggacagcagcaactggcggagtagaggccagggaacactggtcacagttagctctggatccggcggaggcggaagtggaggcggaggatctggcggcggaggctctttcgaagaagttcagctggttcagagcggagccgaagtgaagaagccaggcgagagcctgaagattagctgcaaaggctccggctacagcttcaccagctactggatcggctgggtccgacagatgcctggcaaaggactggaatggatgggcatcatctaccccggcgacagcgacaccagatacagccctagctttcagggccaagtgaccatcagcgccgacaagagcatcagcacagcctacctccagtggtcctctctgaaggccagcgataccgccatgtactattgcgccagagatgtcggcagatgggctcctggcggcttcctggattattggggacagggcacactggtcaccgtgtctagtacgcgtgcctctacaaagggaccctccgtgtttcctctggctcccagcagcaagtctacaagcggaggaacagccgctctgggctgcctggtcaaggattactttcccgagcctgtgaccgtgtcctggaatagcggagcactgacaagcggcgtgcacacctttccagccgtgctgcaaagcagcggcctgtactctctgagcagcgtggtcacagtgcctagctctagcctgggcacccagacctacatctgcaatgtgaaccacaagcctagcaacaccaaggtggacaagagagtggaacccaagagctgtgaagtgaaaaccgactccaccgaccacgtgaagcccaaagagacagagaacaccaagcagcccagcaagagctgccacaagcccaaggccatcgtgcacaccgagaaagtgaacatgatgagcctgaccgtgctgggcctgcggatgctgttcgccaaaaccgtggccgtgaacttcctgctgaccgccaagctgttcttcctc

SEQ ID NO: 8508 - DNA, 2721 bp, Artificial Sequence
  Synthetic Polynucloetide
atggccttaccagtgaccgccttgctcctgccgctggccttgctgctccacgccgccaggccggaagtgcagctggttgaatctggcggaggactggttcagcctggcggatctctgagactgtcttgtgccgccagcggcttcagcttcagcgacttttggatgagctgggtccgacaggcccctggcaaaggacttgaatgggtcgccacaatcagccaggccggcagcgagaaggactacgtggactctgtgaagggcagattcaccatcagccgggacaacgccaagaagtccctgtacctccagatgaacagcctgagagccgaggacaccgccgtgtactattgtgcctctggcgtgtacagcttcgactacagaggccagggcaccctggtcacagtctcttctggtaccggcggaggcggatctggcggcggaggtagcggtggcggaggatctgaattcgacatcgtgatgacacagagccctgatagcctggccgtgtctctgggagagagagccaccatcaactgcaagagcagccagagcgtgctgtactccagcaacaacaagaactacctggcctggtatcagcagaagcccggccagcctcctaagctgctgatctactgggccagcaccagagaaagcggcgtgcccgatagattttctggcagcggctctggcaccgacttcaccctgacaattagcagcctccaggccgaggatgtggccgtgtactactgccagcagtattacagcacccctctgaccttcggccagggcaccaaggtggaaatcaaactcgagggacagcctaaggccaatcctaccgtgacactgttccctccaagcagcgaagaactccaggccaacaaggccacacttgtgtgcctgatctccgacttctaccctggggctgtgacagtggcttggaaggccgatggatctcctgtgaaagccggcgtggaaaccaccaagccatccaagcagagcaacaacaaatacgccgccagctcctacctgagcctgacacctgagcagtggaagtcccacagatcctacagctgccaagtgacccacgaaggcagcaccgtggaaaagacagtggcccctacagagtgcagcggcagagccgattgcggctttaccagcgagagctaccagcagggcgtgctgagcgccaccatcctgtacgagatcctgctgggcaaggccaccctgtacgccgtgctggtgtctgccctggtgctgatggctatggtcaagcggaaggacagccggggacgcgccaagagaagcggatctggcgtgaagcagaccctgaatttcgacctgctgaagctggctggcgacgtggaatccaacccaggccctactagtatggactggatttggcgcatccttttccttgtcggcgctgctaccggcgcgcattccgggccccagctccagctgcaagagtctggacctggcctggtcaagcctagcgagacactgagcctgacctgtaccgtgtccggcgatagcatcagcagcggcgattactactggggctggatcagacagcctcctggcaaaggactggaatggatcggccacatctactacagcggcgtgacctactacaaccccagcctgaagtccagagtgaccatcagcgtggacaccagccggaaccagttctccctgaagctgtctagcgtgacagccgccgataccgccgtgtactactgcaccagagaggacagcagcaactggcggagtagaggccagggaacactggtcacagttagctctggatccggcggaggcggaagtggaggcggaggatctggcggcggaggctctttcgaagaagttcagctggttcagagcggagccgaagtgaagaagccaggcgagagcctgaagattagctgcaaaggctccggctacagcttcaccagctactggatcggctgggtccgacagatgcctggcaaaggactggaatggatgggcatcatctaccccggcgacagcgacaccagatacagccctagctttcagggccaagtgaccatcagcgccgacaagagcatcagcacagcctacctccagtggtcctctctgaaggccagcgataccgccatgtactattgcgccagagatgtcggcagatgggctcctggcggcttcctggattattggggacagggcacactggtcaccgtgtctagtacgcgtgcctctacaaagggaccctccgtgtttcctctggctcccagcagcaagtctacaagcggaggaacagccgctctgggctgcctggtcaaggattactttcccgagcctgtgaccgtgtcctggaatagcggagcactgacaagcggcgtgcacacctttccagccgtgctgcaaagcagcggcctgtactctctgagcagcgtggtcacagtgcctagctctagcctgggcacccagacctacatctgcaatgtgaaccacaagcctagcaacaccaaggtggacaagagagtggaacccaagagctgtatccccgaggacacattcttcccaagccccgagagcagctgcgacgtgaagctggtggaaaagagcttcgagacagacaccaacctgaacttccagaacctgagcgtgatcggcttcagaatcctgctgctgaaagtggccggctttaacctgctgatgaccctgcggctgtggtccagc

SEQ ID NO: 8509 - DNA, 2292 bp, Artificial Sequence
  Synthetic Polynucloetide
atggccttaccagtgaccgccttgctcctgccgctggccttgctgctccacgccgccaggccggaagtgcaggttttggagtctggcggaggactggttcagcctggcggatctctgagactgtcttgtgccgccagcggcttcaccttcagcaactttgccatgagctgggtccgacaggcccctggcaaaggacttgaatgggtgtccacaatcagcggcagcgccggcacaacagattacgccgattctgtgaagggcagattcaccatcagccgggacaacagcaagaaaaccctgtacctccagatgaacagcctgcgcgtggaagataccgccgtgtactactgtgccgatggcagaggccccttcttcgattatcgcggccagggcacactggtcaccgtttcttctggtaccggcggaggcggatctggcggcggaggtagcggtggcggaggatctgaattcgacatcgtgatgacacagagccctgatagcctggccgtgtctctgggagagagagccaccatcaactgcaagagcagccagagcgtgctgtactccagcaacaacaagaactacctggcctggtatcagcagaagcccggccagcctcctaagctgctgatctactgggccagcaccagagaaagcggcgtgcccgatagattttctggcagcggctctggcaccgacttcaccctgacaattagcagcctccaggccgaggatgtggccgtgtactactgccagcagtattacagcacccctctgaccttcggccagggcaccaaggtggaaatcaaactcgaggacctgaagaacgtgttcccacctgaggtggccgtgttcgagcctagcgaggccgagatcagccacacccagaaagccaccctcgtgtgcctggctaccggcttctaccccgaccatgtggaactgtcttggtgggtcaacggcaaagaggtgcacagcggcgtgtgtaccgacccccagccactgaaagaacagcccgccctgaacgacagccggtactgcctgagcagcagactgagagtgtccgccaccttctggcagaacccccggaaccacttcagatgccaggtgcagttctacggcctgagcgagaacgacgagtggacccaggacagagccaagcccgtgacccagatcgtgtctgccgaagcctggggcagagccgattgcggctttaccagcgagagctaccagcagggcgtgctgagcgccaccatcctgtacgagatcctgctgggcaaggccaccctgtacgccgtgctggtgtctgccctggtgctgatggctatggtcaagcggaaggacagccggggaagggccaagcgatctggatctggagcaacaaacttctcactactcaaacaagcaggtgacgtggaggagaatcccgggcctactagtatggactggatttggcgcatccttttccttgtcggcgctgctaccggcgcgcattccttcgaagaagttcagctggttcagagcggagccgaagtgaagaagccaggcgagagcctgaagattagctgcaaaggctccggctacagcttcaccagctactggatcggctgggtccgacagatgcctggcaaaggactggaatggatgggcatcatctaccccggcgacagcgacaccagatacagccctagctttcagggccaagtgaccatcagcgccgacaagagcatcagcacagcctacctccagtggtcctctctgaaggccagcgataccgccatgtactattgcgccagagatgtcggcagatgggctcctggcggcttcctggattattggggacagggcacactggtcaccgtgtctagtacgcgtatccagaaccctgatcctgccgtgtaccagctgcgggatagcaagagcagcgacaagagcgtgtgtctgttcaccgacttcgacagccagaccaacgtgtcccagagcaaggactccgacgtgtacatcaccgataagtgcgtgctggacatgcggagcatggacttcaagagcaactccgccgtggcctggtccaacaagtccgatttcgcctgcgccaacgccttcaacaacagcattatccccgaggacacattcttcccaagccccgagagcagctgcgacgtgaagctggtggaaaagagcttcgagacagacaccaacctgaacttccagaacctgagcgtgatcggcttcagaatcctgctgctgaaagtggccggctttaacctgctgatgaccctgcggctgtggtccagc

SEQ ID NO: 8510 - DNA, 2295 bp, Artificial Sequence
  Synthetic Polynucloetide
atggccttaccagtgaccgccttgctcctgccgctggccttgctgctccacgccgccaggccggacatcgtgatgacacagagccctgatagcctggccgtgtctctgggagagagagccaccatcaactgcaagagcagccagagcgtgctgtactccagcaacaacaagaactacctggcctggtatcagcagaagcccggccagcctcctaagctgctgatctactgggccagcaccagagaaagcggcgtgcccgatagattttctggcagcggctctggcaccgacttcaccctgacaattagcagcctccaggccgaggatgtggccgtgtactactgccagcagtattacagcacccctctgaccttcggccagggcaccaaggtggaaatcaaactcgaggacctgaagaacgtgttcccacctgaggtggccgtgttcgagcctagcgaggccgagatcagccacacccagaaagccaccctcgtgtgcctggctaccggcttctaccccgaccatgtggaactgtcttggtgggtcaacggcaaagaggtgcacagcggcgtgtgtaccgacccccagccactgaaagaacagcccgccctgaacgacagccggtactgcctgagcagcagactgagagtgtccgccaccttctggcagaacccccggaaccacttcagatgccaggtgcagttctacggcctgagcgagaacgacgagtggacccaggacagagccaagcccgtgacccagatcgtgtctgccgaagcctggggcagagccgattgcggctttaccagcgagagctaccagcagggcgtgctgagcgccaccatcctgtacgagatcctgctgggcaaggccaccctgtacgccgtgctggtgtctgccctggtgctgatggctatggtcaagcggaaggacagccggggaagggccaagcgatctggatctggagcaacaaacttctcactactcaaacaagcaggtgacgtggaggagaatcccgggcctactagtatggactggatttggcgcatccttttccttgtcggcgctgctaccggcgcccattccgggcccgaagtgcagctggttgaatctggcggaggactggttcaggctggcggatctctgagactgtcttgtgccgccagcggcagaacctttagcatgggctggtttagacaggcccctggcaaagagagagagttcgtcgccgccatcacatactctggcggcagcccttactacgccgactctgtgaagggcagattcaccatcagccgggacaacgccaagaacaccgtgtacctccagatgaacagcctgaagcctgaggacaccgccgtgtactactgcgccgccaatccaacatacggcagcgactggaacgccgagaattggggccagggaacccaagtgacagtgtctagcggatccggcggcggaggatctggcggaggcggatctgggggcggaggctctttcgaagaagttcagctggttcagagcggagccgaagtgaagaagccaggcgagagcctgaagattagctgcaaaggctccggctacagcttcaccagctactggatcggctgggtccgacagatgcctggcaaaggactggaatggatgggcatcatctaccccggcgacagcgacaccagatacagccctagctttcagggccaagtgaccatcagcgccgacaagagcatcagcacagcctacctccagtggtcctctctgaaggccagcgataccgccatgtactattgcgccagagatgtcggcagatgggctcctggcggcttcctggattattggggacagggcacactggtcaccgtgtctagtacgcgtatccagaaccctgatcctgccgtgtaccagctgcgggatagcaagagcagcgacaagagcgtgtgtctgttcaccgacttcgacagccagaccaacgtgtcccagagcaaggactccgacgtgtacatcaccgataagtgcgtgctggacatgcggagcatggacttcaagagcaactccgccgtggcctggtccaacaagtccgatttcgcctgcgccaacgccttcaacaacagcattatccccgaggacacattcttcccaagccccgagagcagctgcgacgtgaagctggtggaaaagagcttcgagacagacaccaacctgaacttccagaacctgagcgtgatcggcttcagaatcctgctgctgaaagtggccggctttaacctgctgatgaccctgcggctgtggtccagc

SEQ ID NO: 8511 - DNA, 2676 bp, Artificial Sequence
  Synthetic Polynucloetide
atggccttaccagtgaccgccttgctcctgccgctggccttgctgctccacgccgccaggccggacatcgtgatgacacagagccctgatagcctggccgtgtctctgggagagagagccaccatcaactgcaagagcagccagagcgtgctgtactccagcaacaacaagaactacctggcctggtatcagcagaagcccggccagcctcctaagctgctgatctactgggccagcaccagagaaagcggcgtgcccgatagattttctggcagcggctctggcaccgacttcaccctgacaattagcagcctccaggccgaggatgtggccgtgtactactgccagcagtattacagcacccctctgaccttcggccagggcaccaaggtggaaatcaaactcgaggacctgaagaacgtgttcccacctgaggtggccgtgttcgagcctagcgaggccgagatcagccacacccagaaagccaccctcgtgtgcctggctaccggcttctaccccgaccatgtggaactgtcttggtgggtcaacggcaaagaggtgcacagcggcgtgtgtaccgacccccagccactgaaagaacagcccgccctgaacgacagccggtactgcctgagcagcagactgagagtgtccgccaccttctggcagaacccccggaaccacttcagatgccaggtgcagttctacggcctgagcgagaacgacgagtggacccaggacagagccaagcccgtgacccagatcgtgtctgccgaagcctggggcagagccgattgcggctttaccagcgagagctaccagcagggcgtgctgagcgccaccatcctgtacgagatcctgctgggcaaggccaccctgtacgccgtgctggtgtctgccctggtgctgatggctatggtcaagcggaaggacagccggggaagggccaagcgatctggatctggagcaacaaacttctcactactcaaacaagcaggtgacgtggaggagaatcccgggcctactagtatggactggatttggcgcatccttttccttgtcggcgctgctaccggcgcccattcccaactgcaactgcaagagtctggccctggcctggtcaagccttctgaaaccctgagcctgacctgtaccgtgtccggcggctctatcagcagcggcgattactactggggctggatcagacagcctccaggcaagggactcgaatggatcggcagcatcagctacagcggctccacctactacaacccaagcctgaagtccagagtgaccatcagcgtggacaccagcagaaaccagttctccctgaagctgagcagcgtgacagccgccgatacagccgtgtattattgcaccagagaggacagcagcaactggcggagtagaggacagggcacactggtcacagtgtcctcttctggaggcggtggaagcggtggaggaggatctgaagtgcagctggttgaatctggcggaggactggttcaggctggcggatctctgagactgtcttgtgccgccagcggcagaacctttagcatgggctggtttagacaggcccctggcaaagagagagagttcgtcgccgccatcacatactctggcggcagcccttactacgccgactctgtgaagggcagattcaccatcagccgggacaacgccaagaacaccgtgtacctccagatgaacagcctgaagcctgaggacaccgccgtgtactactgcgccgccaatccaacatacggcagcgactggaacgccgagaattggggccagggaacccaagtgacagtgtctagcggatccggcggcggaggatctggcggaggcggatctgggggcggaggctctttcgaagaagttcagctggttcagagcggagccgaagtgaagaagccaggcgagagcctgaagattagctgcaaaggctccggctacagcttcaccagctactggatcggctgggtccgacagatgcctggcaaaggactggaatggatgggcatcatctaccccggcgacagcgacaccagatacagccctagctttcagggccaagtgaccatcagcgccgacaagagcatcagcacagcctacctccagtggtcctctctgaaggccagcgataccgccatgtactattgcgccagagatgtcggcagatgggctcctggcggcttcctggattattggggacagggcacactggtcaccgtgtctagtacgcgtatccagaaccctgatcctgccgtgtaccagctgcgggatagcaagagcagcgacaagagcgtgtgtctgttcaccgacttcgacagccagaccaacgtgtcccagagcaaggactccgacgtgtacatcaccgataagtgcgtgctggacatgcggagcatggacttcaagagcaactccgccgtggcctggtccaacaagtccgatttcgcctgcgccaacgccttcaacaacagcattatccccgaggacacattcttcccaagccccgagagcagctgcgacgtgaagctggtggaaaagagcttcgagacagacaccaacctgaacttccagaacctgagcgtgatcggcttcagaatcctgctgctgaaagtggccggctttaacctgctgatgaccctgcggctgtggtccagc

SEQ ID NO: 8512 - DNA, 2703 bp, Artificial Sequence
  Synthetic Polynucloetide
atggccttaccagtgaccgccttgctcctgccgctggccttgctgctccacgccgccaggccggaagtgcaggttttggagtctggcggaggactggttcagcctggcggatctctgagactgtcttgtgccgccagcggcttcaccttcagcaactttgccatgagctgggtccgacaggcccctggcaaaggacttgaatgggtgtccacaatcagcggcagcgccggcacaacagattacgccgattctgtgaagggcagattcaccatcagccgggacaacagcaagaaaaccctgtacctccagatgaacagcctgcgcgtggaagataccgccgtgtactactgtgccgatggcagaggccccttcttcgattatcgcggccagggcacactggtcaccgtttcttctggtaccggcggaggcggatctggcggcggaggtagcggtggcggaggatctgaattcgacatcgtgatgacacagagccctgatagcctggccgtgtctctgggagagagagccaccatcaactgcaagagcagccagagcgtgctgtactccagcaacaacaagaactacctggcctggtatcagcagaagcccggccagcctcctaagctgctgatctactgggccagcaccagagaaagcggcgtgcccgatagattttctggcagcggctctggcaccgacttcaccctgacaattagcagcctccaggccgaggatgtggccgtgtactactgccagcagtattacagcacccctctgaccttcggccagggcaccaaggtggaaatcaaactcgaggacctgaagaacgtgttcccacctgaggtggccgtgttcgagcctagcgaggccgagatcagccacacccagaaagccaccctcgtgtgcctggctaccggcttctaccccgaccatgtggaactgtcttggtgggtcaacggcaaagaggtgcacagcggcgtgtgtaccgacccccagccactgaaagaacagcccgccctgaacgacagccggtactgcctgagcagcagactgagagtgtccgccaccttctggcagaacccccggaaccacttcagatgccaggtgcagttctacggcctgagcgagaacgacgagtggacccaggacagagccaagcccgtgacccagatcgtgtctgccgaagcctggggcagagccgattgcggctttaccagcgagagctaccagcagggcgtgctgagcgccaccatcctgtacgagatcctgctgggcaaggccaccctgtacgccgtgctggtgtctgccctggtgctgatggctatggtcaagcggaaggacagccggggaagggccaagcgatctggatctggagcaacaaacttctcactactcaaacaagcaggtgacgtggaggagaatcccgggcctactagtatggactggatttggcgcatccttttccttgtcggcgctgctaccggcgcccattccgggcccgaagtgcagctggttgaatctggcggaggactggttcaggctggcggatctctgagactgtcttgtgccgccagcggcagaacctttagcatgggctggtttagacaggcccctggcaaagagagagagttcgtcgccgccatcacatacagcggcggcagcccttactacgcctcttctgtcagaggccggttcaccatcagccgggacaacgccaagaacaccgtgtacctccagatgaacagcctgaagccagaggacaccgccgtgtactactgtgccgccaatccaacctacggcagcgactggaatgccgagaattggggccagggcacccaagtgacagtgtctagtggatccggcggcggaggatctggcggaggcggatctgggggcggaggctctttcgaagaagttcagctggttcagagcggagccgaagtgaagaagccaggcgagagcctgaagattagctgcaaaggctccggctacagcttcaccagctactggatcggctgggtccgacagatgcctggcaaaggactggaatggatgggcatcatctaccccggcgacagcgacaccagatacagccctagctttcagggccaagtgaccatcagcgccgacaagagcatcagcacagcctacctccagtggtcctctctgaaggccagcgataccgccatgtactattgcgccagagatgtcggcagatgggctcctggcggcttcctggattattggggacagggcacactggtcaccgtgtctagtacgcgtatccagaaccctgatcctgccgtgtaccagctgcgggatagcaagagcagcgacaagagcgtgtgtctgttcaccgacttcgacagccagaccaacgtgtcccagagcaaggactccgacgtgtacatcaccgataagtgcgtgctggacatgcggagcatggacttcaagagcaactccgccgtggcctggtccaacaagtccgatttcgcctgcgccaacgccttcaacaacagcattatccccgaggacacattcttcccaagccccgagagcagctgcgacgtgaagctggtggaaaagagcttcgagacagacaccaacctgaacttccagaacctgagcgtgatcggcttcagaatcctgctgctgaaagtggccggctttaacctgctgatgaccctgcggctgtggtccagc

SEQ ID NO: 8513 - DNA, 2172 bp, Artificial Sequence
  Synthetic Polynucloetide
atggccttaccagtgaccgccttgctcctgccgctggccttgctgctccacgccgccaggccggacatccagatgacacagagccctagcagcctgtctgccagcgtgggagacagagtgaccatcacctgtagagccagccagagcatcaacaagtggctgaactggtatcagcagaagcccggcaaggcccctaagctgctgatctatgccgccagctctctccagagcggagtgcctagcagattttctggcagcggctccggcaccgatttcaccctgacaatatccagcctccagcctgaggacttcgccacctactactgccagcaggactacaacttcccctacaccttcggccagggcaccaaggtggaaatcaaaagaggcggaggcggaagtggaggcggaggatctggcggcggaggctctcaagttcagctggttcagagcggcgctgaagtgaagaaacctggcagcagcgtgaaggtgtcctgcaaagcaagcggcggcacctttagcagctacggcatctcttgggtccgacaggctcctggacaaggactggaatggatgggctggatcagcgccatcttcggcacagccaattacgcccagaaattccagggccgcgtgacaatcacagccgacgagtctacaagcaccgcctacatggaactgagcagcctgagaagcgaggacaccgccgtgtactattgtgccagaggcgtggcctcctggtatctggattattggggccagggaaccctggtcaccgtgtcatctacgcgtgagcagaaactgatctcggaagaggatctggcgaagcccaccacgacgccagcgccgcgaccaccaacaccggcgcccaccatcgcgtcgcagcccctgtccctgcgcccagaggcgtgccggccagcggcggggggcgcagtgcacacgagggggctggacttcgcctgtgacatctacatctgggcgcccttggccgggacttgtggggtccttctcctgtcactggttatcaccctttactgcaaacggggcagaaagaaactcctgtatatattcaaacaaccatttatgagaccagtacaaactactcaagaggaagatggctgtagctgccgatttccagaagaagaagaaggaggatgtgaactgagagtgaagttcagcaggagcgcagacgcccccgcgtaccagcagggccagaaccagctctataacgagctgaatctaggacgaagagaggagtacgatgttttggacaagagacgtggccgggaccctgagatggggggaaagccgagaaggaagaaccctcaggaaggcctgtacaatgaactgcagaaagataagatggcggaggcctacagtgagattgggatgaaaggcgagcgccggaggggcaaggggcacgatggcctttaccagggtctcagtacagccaccaaggacacctacgacgcccttcacatgcaggccctgccccctcgctctagtggctccggcgagggcagaggaagtctactaacctgcggagatgtggaagaaaatcctggcccacatatgaccgagtacaagcccacggtgcgcctcgccacccgcgacgacgtccccagggccgtacgcaccctcgccgccgcgttcgccgactaccccgccacgcgccacaccgtcgatccggaccgccacatcgagcgggtcaccgagctgcaagaactcttcctcacgcgcgtcgggctcgacatcggcaaggtgtgggtcgcggacgacggcgccgcggtggcggtctggaccacgccggagagcgtcgaagcgggggcggtgttcgccgagatcggcccgcgcatggccgagttgagcggttcccggctggccgcgcagcaacagatggaaggcctcctggcgccgcaccggcccaaggagcccgcgtggttcctggccaccgtcggcgtctcgcccgaccaccagggcaagggtctgggcagcgccgtcgtgctccccggagtggaggcggccgagcgcgccggggtgcccgccttcctggagacctccgcgccccgcaacctccccttctacgagcggctcggcttcaccgtcaccgccgacgtcgaggtgcccgaaggaccgcgcacctggtgcatgacccgcaagcccggtgcctga

SEQ ID NO: 8514 - DNA, 2154 bp, Artificial Sequence
  Synthetic Polynucloetide
atggccttaccagtgaccgccttgctcctgccgctggccttgctgctccacgccgccaggccggacatccagatgacacagagccctagcagcctgtctgccagcgtgggagacagagtgaccatcacctgtagagccagccagagcatcaacaagtggctgaactggtatcagcagaagcccggcaaggcccctaagctgctgatctatgccgccagctctctccagagcggagtgcctagcagattttctggcagcggctccggcaccgatttcaccctgacaatatccagcctccagcctgaggacttcgccacctactactgccagcaggactacaacttcccctacaccttcggccagggcaccaaggtggaaatcaaaagaggcggaggcggaagtggaggcggaggatctggcggcggaggctctcaagttcagctggttcagagcggcgctgaagtgaagaaacctggcagcagcgtgaaggtgtcctgcaaagcaagcggcggcacctttagcagctacggcatctcttgggtccgacaggctcctggacaaggactggaatggatgggctggatcagcgccatcttcggcacagccaattacgcccagaaattccagggccgcgtgacaatcacagccgacgagtctacaagcaccgcctacatggaactgagcagcctgagaagcgaggacaccgccgtgtactattgtgccagaggcgtggcctcctggtatctggattattggggccagggaaccctggtcaccgtgtcatctacgcgtgagcagaaactgatctcggaagaggatctgaaaattgaagttatgtatcctcctccttacctagacaatgagaagagcaatggaaccattatccatgtgaaagggaaacacctttgtccaagtcccctatttcccggaccttctaagcccttttgggtgctggtggtggttgggggagtcctggcttgctatagcttgctagtaacagtggcctttattattttctgggtgaggagtaagaggagcaggctcctgcacagtgactacatgaacatgactccacgccgccccggacccacccgcaagcattaccagccctatgccccaccacgcgacttcgcagcctatcgctccagagtgaagttcagcaggagcgcagacgcccccgcgtaccagcagggccagaaccagctctataacgagctcaatctaggacgaagagaggagtacgatgttttggacaagagacgtggccgggaccctgagatggggggaaagccgagaaggaagaaccctcaggaaggcctgtacaatgaactgcagaaagataagatggcggaggcctacagtgagattgggatgaaaggcgagcgccggaggggcaaggggcacgatggcctttaccagggtctcagtacagccaccaaggacacctacgacgcccttcacatgcaggccctgccccctcgctctagtggctccggcgagggcagaggaagtctactaacctgcggagatgtggaagaaaatcctggcccacatatgaccgagtacaagcccacggtgcgcctcgccacccgcgacgacgtccccagggccgtacgcaccctcgccgccgcgttcgccgactaccccgccacgcgccacaccgtcgatccggaccgccacatcgagcgggtcaccgagctgcaagaactcttcctcacgcgcgtcgggctcgacatcggcaaggtgtgggtcgcggacgacggcgccgcggtggcggtctggaccacgccggagagcgtcgaagcgggggcggtgttcgccgagatcggcccgcgcatggccgagttgagcggttcccggctggccgcgcagcaacagatggaaggcctcctggcgccgcaccggcccaaggagcccgcgtggttcctggccaccgtcggcgtctcgcccgaccaccagggcaagggtctgggcagcgccgtcgtgctccccggagtggaggcggccgagcgcgccggggtgcccgccttcctggagacctccgcgccccgcaacctccccttctacgagcggctcggcttcaccgtcaccgccgacgtcgaggtgcccgaaggaccgcgcacctggtgcatgacccgcaagcccggtgcctga

SEQ ID NO: 8515 - DNA, 1482 bp, Artificial Sequence
  Synthetic Polynucloetide
atggccttaccagtgaccgccttgctcctgccgctggccttgctgctccacgccgccaggccggacatccagatgacacagagccctagcagcctgtctgccagcgtgggagacagagtgaccatcacctgtagagccagccagagcatcaacaagtggctgaactggtatcagcagaagcccggcaaggcccctaagctgctgatctatgccgccagctctctccagagcggagtgcctagcagattttctggcagcggctccggcaccgatttcaccctgacaatatccagcctccagcctgaggacttcgccacctactactgccagcaggactacaacttcccctacaccttcggccagggcaccaaggtggaaatcaaaagaggcggaggcggaagtggaggcggaggatctggcggcggaggctctcaagttcagctggttcagagcggcgctgaagtgaagaaacctggcagcagcgtgaaggtgtcctgcaaagcaagcggcggcacctttagcagctacggcatctcttgggtccgacaggctcctggacaaggactggaatggatgggctggatcagcgccatcttcggcacagccaattacgcccagaaattccagggccgcgtgacaatcacagccgacgagtctacaagcaccgcctacatggaactgagcagcctgagaagcgaggacaccgccgtgtactattgtgccagaggcgtggcctcctggtatctggattattggggccagggaaccctggtcaccgtgtcatctacgcgtgagcagaaactgatctcggaagaggatctgaaaattgaagttatgtatcctcctccttacctagacaatgagaagagcaatggaaccattatccatgtgaaagggaaacacctttgtccaagtcccctatttcccggaccttctaagcccttttgggtgctggtggtggttgggggagtcctggcttgctatagcttgctagtaacagtggcctttattattttctgggtgaggagtaagaggagcaggctcctgcacagtgactacatgaacatgactccacgccgccccggacccacccgcaagcattaccagccctatgccccaccacgcgacttcgcagcctatcgctccagagtgaagttcagcaggagcgcagacgcccccgcgtaccagcagggccagaaccagctctataacgagctcaatctaggacgaagagaggagtacgatgttttggacaagagacgtggccgggaccctgagatggggggaaagccgagaaggaagaaccctcaggaaggcctgtacaatgaactgcagaaagataagatggcggaggcctacagtgagattgggatgaaaggcgagcgccggaggggcaaggggcacgatggcctttaccagggtctcagtacagccaccaaggacacctacgacgcccttcacatgcaggccctgccccctcgc

SEQ ID NO: 8516 - DNA, 1503 bp, Artificial Sequence
  Synthetic Polynucloetide
atggccttaccagtgaccgccttgctcctgccgctggccttgctgctccacgccgccaggccggacatccagatgacacagagccctagcagcctgtctgccagcgtgggagacagagtgaccatcacctgtagagccagccagagcatcaacaagtggctgaactggtatcagcagaagcccggcaaggcccctaagctgctgatctatgccgccagctctctccagagcggagtgcctagcagattttctggcagcggctccggcaccgatttcaccctgacaatatccagcctccagcctgaggacttcgccacctactactgccagcaggactacaacttcccctacaccttcggccagggcaccaaggtggaaatcaaaagaggcggaggcggaagtggaggcggaggatctggcggcggaggctctcaagttcagctggttcagagcggcgctgaagtgaagaaacctggcagcagcgtgaaggtgtcctgcaaagcaagcggcggcacctttagcagctacggcatctcttgggtccgacaggctcctggacaaggactggaatggatgggctggatcagcgccatcttcggcacagccaattacgcccagaaattccagggccgcgtgacaatcacagccgacgagtctacaagcaccgcctacatggaactgagcagcctgagaagcgaggacaccgccgtgtactattgtgccagaggcgtggcctcctggtatctggattattggggccagggaaccctggtcaccgtgtcatctacgcgtgagcagaaactgatctcggaagaggatctggcgaagcccaccacgacgccagcgccgcgaccaccaacaccggcgcccaccatcgcgtcgcagcccctgtccctgcgcccagaggcgtgccggccagcggcggggggcgcagtgcacacgagggggctggacttcgcctgtgacatctacatctgggcgcccttggccgggacttgtggggtccttctcctgtcactggttatcaccctttactgcaaacggggcagaaagaaactcctgtatatattcaaacaaccatttatgagaccagtacaaactactcaagaggaagatggctgtagctgccgatttccagaagaagaagaaggaggatgtgaactgagagtgaagttcagcaggagcgcagacgcccccgcgtaccagcagggccagaaccagctctataacgagctgaatctaggacgaagagaggagtacgatgttttggacaagagacgtggccgggaccctgagatggggggaaagccgagaaggaagaaccctcaggaaggcctgtacaatgaactgcagaaagataagatggcggaggcctacagtgagattgggatgaaaggcgagcgccggaggggcaaggggcacgatggcctttaccagggtctcagtacagccaccaaggacacctacgacgcccttcacatgcaggccctgccccctcgctga

SEQ ID NO: 8517 - DNA, 1503 bp, Artificial Sequence
  Synthetic Polynucloetide
atggccttaccagtgaccgccttgctcctgccgctggccttgctgctccacgccgccaggccgcaagttcagctggttcagagcggcgctgaagtgaagaaacctggcagcagcgtgaaggtgtcctgcaaagcaagcggcggcacctttagcagctacggcatctcttgggtccgacaggctcctggacaaggactggaatggatgggctggatcagcgccatcttcggcacagccaattacgcccagaaattccagggccgcgtgacaatcacagccgacgagtctacaagcaccgcctacatggaactgagcagcctgagaagcgaggacaccgccgtgtactattgtgccagaggcgtggcctcctggtatctggattattggggccagggaaccctggtcaccgtgtcatctggcggaggcggaagtggaggcggaggatctggcggcggaggctctgacatccagatgacacagagccctagcagcctgtctgccagcgtgggagacagagtgaccatcacctgtagagccagccagagcatcaacaagtggctgaactggtatcagcagaagcccggcaaggcccctaagctgctgatctatgccgccagctctctccagagcggagtgcctagcagattttctggcagcggctccggcaccgatttcaccctgacaatatccagcctccagcctgaggacttcgccacctactactgccagcaggactacaacttcccctacaccttcggccagggcaccaaggtggaaatcaaaagaacgcgtgagcagaaactgatctcggaagaggatctggcgaagcccaccacgacgccagcgccgcgaccaccaacaccggcgcccaccatcgcgtcgcagcccctgtccctgcgcccagaggcgtgccggccagcggcggggggcgcagtgcacacgagggggctggacttcgcctgtgacatctacatctgggcgcccttggccgggacttgtggggtccttctcctgtcactggttatcaccctttactgcaaacggggcagaaagaaactcctgtatatattcaaacaaccatttatgagaccagtacaaactactcaagaggaagatggctgtagctgccgatttccagaagaagaagaaggaggatgtgaactgagagtgaagttcagcaggagcgcagacgcccccgcgtaccagcagggccagaaccagctctataacgagctgaatctaggacgaagagaggagtacgatgttttggacaagagacgtggccgggaccctgagatggggggaaagccgagaaggaagaaccctcaggaaggcctgtacaatgaactgcagaaagataagatggcggaggcctacagtgagattgggatgaaaggcgagcgccggaggggcaaggggcacgatggcctttaccagggtctcagtacagccaccaaggacacctacgacgcccttcacatgcaggccctgccccctcgctga

SEQ ID NO: 8518 - DNA, 2742 bp, Artificial Sequence
  Synthetic Polynucloetide
atggccttaccagtgaccgccttgctcctgccgctggccttgctgctccacgccgccaggccggacatccagatgacacagagccctagcagcctgtctgccagcgtgggagacagagtgaccatcacctgtagagccagccagagcatcaacaagtggctgaactggtatcagcagaagcccggcaaggcccctaagctgctgatctatgccgccagctctctccagagcggagtgcctagcagattttctggcagcggctccggcaccgatttcaccctgacaatatccagcctccagcctgaggacttcgccacctactactgccagcaggactacaacttcccctacaccttcggccagggcaccaaggtggaaatcaaaagaggcggaggcggaagtggaggcggaggatctggcggcggaggctctcaagttcagctggttcagagcggcgctgaagtgaagaaacctggcagcagcgtgaaggtgtcctgcaaagcaagcggcggcacctttagcagctacggcatctcttgggtccgacaggctcctggacaaggactggaatggatgggctggatcagcgccatcttcggcacagccaattacgcccagaaattccagggccgcgtgacaatcacagccgacgagtctacaagcaccgcctacatggaactgagcagcctgagaagcgaggacaccgccgtgtactattgtgccagaggcgtggcctcctggtatctggattattggggccagggaaccctggtcaccgtgtcatctacgcgtgagcagaaactgatctcggaagaggatctggcgaagcccaccacgacgccagcgccgcgaccaccaacaccggcgcccaccatcgcgtcgcagcccctgtccctgcgcccagaggcgtgccggccagcggcggggggcgcagtgcacacgagggggctggacttcgcctgtgacatctacatctgggcgcccttggccgggacttgtggggtccttctcctgtcactggttatcaccctttactgcgggcgcgccagagtgaagttcagcaggagcgcagacgcccccgcgtaccagcagggccagaaccagctctataacgagctgaatctaggacgaagagaggagtacgatgttttggacaagagacgtggccgggaccctgagatggggggaaagccgagaaggaagaaccctcaggaaggcctgtacaatgaactgcagaaagataagatggcggaggcctacagtgagattgggatgaaaggcgagcgccggaggggcaaggggcacgatggcctttaccagggtctcagtacagccaccaaggacacctacgacgcccttcacatgcaggccctgccccctcgctctagaggatctggagcaacaaacttctcactactcaaacaagcaggtgacgtggaggagaatcccgggcctgggatccacatggccacttacgaggttctctgtgaggtggcgcggaaactgggcacggatgacagggaagtggtattgttcctcctaaacgtgttcatacctcaacccacactggcccaattaattggagctcttagagctttaaaggaggagggcaggttaacgtttcccctgttagcggaatgtctgtttcgtgcaggtcgcagagacctcttgcgcgacctgcttcacttagacccgcgttttttagagcgccacctagcgggcacaatgagttatttcagcccttatcagctcactgttctccacgtagacggggagctgtgtgcgagggatattaggtctttgatatttttaagcaaggacactatagggtctcgcagcacaccacagacattcttacactgggtgtactgtatggaaaacttagacctactgggtcccactgacgtggatgccctaatgtcaatgcttagatctttgtcaagagtagacctacagcgccaagtgcaaaccctaatgggccttcacctttccggcccatcacactcccaacactatcgccatacaccactcgagaccgatttctacgactacaaggacgacgatgacaagactagtggctccggcgagggcagaggaagtctactaacctgcggagatgtggaagaaaatcctggcccacatatgaccgagtacaagcccacggtgcgcctcgccacccgcgacgacgtccccagggccgtacgcaccctcgccgccgcgttcgccgactaccccgccacgcgccacaccgtcgatccggaccgccacatcgagcgggtcaccgagctgcaagaactcttcctcacgcgcgtcgggctcgacatcggcaaggtgtgggtcgcggacgacggcgccgcggtggcggtctggaccacgccggagagcgtcgaagcgggggcggtgttcgccgagatcggcccgcgcatggccgagttgagcggttcccggctggccgcgcagcaacagatggaaggcctcctggcgccgcaccggcccaaggagcccgcgtggttcctggccaccgtcggcgtctcgcccgaccaccagggcaagggtctgggcagcgccgtcgtgctccccggagtggaggcggccgagcgcgccggggtgcccgccttcctggagacctccgcgccccgcaacctccccttctacgagcggctcggcttcaccgtcaccgccgacgtcgaggtgcccgaaggaccgcgcacctggtgcatgacccgcaagcccggtgcctga

SEQ ID NO: 8519 - DNA, 2562 bp, Artificial Sequence
  Synthetic Polynucloetide
atggccttaccagtgaccgccttgctcctgccgctggccttgctgctccacgccgccaggccggacatccagatgacacagagccctagcagcctgtctgccagcgtgggagacagagtgaccatcacctgtagagccagccagagcatcaacaagtggctgaactggtatcagcagaagcccggcaaggcccctaagctgctgatctatgccgccagctctctccagagcggagtgcctagcagattttctggcagcggctccggcaccgatttcaccctgacaatatccagcctccagcctgaggacttcgccacctactactgccagcaggactacaacttcccctacaccttcggccagggcaccaaggtggaaatcaaaagactcgagatccagaaccctgatcctgccgtgtaccagctgcgggatagcaagagcagcgacaagagcgtgtgtctgttcaccgacttcgacagccagaccaacgtgtcccagagcaaggactccgacgtgtacatcaccgataagtgcgtgctggacatgcggagcatggacttcaagagcaactccgccgtggcctggtccaacaagtccgatttcgcctgcgccaacgccttcaacaacagcattatccccgaggacacattcttcccaagcagcgacgtgccctgcgacgtgaagctggtggaaaagagcttcgagacagacaccaacctgaacttccagaacctgagcgtgatcggcttcagaatcctgctgctgaaagtggccggctttaacctgctgatgaccctgcggctgtggtccagccgcgccaagagaagcggatctggcgtgaagcagaccctgaatttcgacctgctgaagctggctggcgacgtggaatccaacccaggccctactagtatggactggatttggcgcatccttttccttgtcggcgctgctaccggcgcgcattccttcgaacaagttcagctggttcagagcggcgctgaagtgaagaaacctggcagcagcgtgaaggtgtcctgcaaagcaagcggcggcacctttagcagctacggcatctcttgggtccgacaggctcctggacaaggactggaatggatgggctggatcagcgccatcttcggcacagccaattacgcccagaaattccagggccgcgtgacaatcacagccgacgagtctacaagcaccgcctacatggaactgagcagcctgagaagcgaggacaccgccgtgtactattgtgccagaggcgtggcctcctggtatctggattattggggccagggaaccctggtcaccgtgtcatctacgcgtgaggacctgaagaacgtgttcccacctgaggtggccgtgttcgagcctagcaaggccgagatcgcccacacccagaaagccaccctcgtgtgcctggctaccggcttctaccccgaccatgtggaactgtcttggtgggtcaacggcaaagaggtgcacagcggcgtgtgtaccgacccccagccactgaaagaacagcccgccctgaacgacagccggtactgcctgagcagcagactgagagtgtccgccaccttctggcagaacccccggaaccacttcagatgccaggtgcagttctacggcctgagcgagaacgacgagtggacccaggacagagccaagcccgtgacccagatcgtgtctgccgaagcctggggcagagccgattgcggcatcaccagcgccagctaccaccagggcgtgctgagcgccaccatcctgtacgagatcctgctgggcaaggccaccctgtacgccgtgctggtgtctgccctggtgctgatggctatggtcaagcggaaggacagccggggaagggccaagcgatctggatctggagcaacaaacttctcactactcaaacaagcaggtgacgtggaggagaatcccgggccttctagaggccatatgaccgagtacaagcccacggtgcgcctcgccacccgcgacgacgtccccagggccgtacgcaccctcgccgccgcgttcgccgactaccccgccacgcgccacaccgtcgatccggaccgccacatcgagcgggtcaccgagctgcaagaactcttcctcacgcgcgtcgggctcgacatcggcaaggtgtgggtcgcggacgacggcgccgcggtggcggtctggaccacgccggagagcgtcgaagcgggggcggtgttcgccgagatcggcccgcgcatggccgagttgagcggttcccggctggccgcgcagcaacagatggaaggcctcctggcgccgcaccggcccaaggagcccgcgtggttcctggccaccgtcggcgtctcgcccgaccaccagggcaagggtctgggcagcgccgtcgtgctccccggagtggaggcggccgagcgcgccggggtgcccgccttcctggagacctccgcgccccgcaacctccccttctacgagcggctcggcttcaccgtcaccgccgacgtcgaggtgcccgaaggaccgcgcacctggtgcatgacccgcaagcccggtgcctga

SEQ ID NO: 8520 - DNA, 2559 bp, Artificial Sequence
  Synthetic Polynucloetide
atggccttaccagtgaccgccttgctcctgccgctggccttgctgctccacgccgccaggccggacatccagatgacacagagccctagcagcctgtctgccagcgtgggagacagagtgaccatcacctgtagagccagccagagcatcaacaagtggctgaactggtatcagcagaagcccggcaaggcccctaagctgctgatctatgccgccagctctctccagagcggagtgcctagcagattttctggcagcggctccggcaccgatttcaccctgacaatatccagcctccagcctgaggacttcgccacctactactgccagcaggactacaacttcccctacaccttcggccagggcaccaaggtggaaatcaaaagactcgaggacctgaagaacgtgttcccacctgaggtggccgtgttcgagcctagcaaggccgagatcgcccacacccagaaagccaccctcgtgtgcctggctaccggcttctaccccgaccatgtggaactgtcttggtgggtcaacggcaaagaggtgcacagcggcgtgtgtaccgacccccagccactgaaagaacagcccgccctgaacgacagccggtactgcctgagcagcagactgagagtgtccgccaccttctggcagaacccccggaaccacttcagatgccaggtgcagttctacggcctgagcgagaacgacgagtggacccaggacagagccaagcccgtgacccagatcgtgtctgccgaagcctggggcagagccgattgcggcatcaccagcgccagctaccaccagggcgtgctgagcgccaccatcctgtacgagatcctgctgggcaaggccaccctgtacgccgtgctggtgtctgccctggtgctgatggctatggtcaagcggaaggacagccggggaagggccaagcgatctggatctggagcaacaaacttctcactactcaaacaagcaggtgacgtggaggagaatcccgggcctactagtatggactggatttggcgcatccttttccttgtcggcgctgctaccggcgcgcattccttcgaacaagttcagctggttcagagcggcgctgaagtgaagaaacctggcagcagcgtgaaggtgtcctgcaaagcaagcggcggcacctttagcagctacggcatctcttgggtccgacaggctcctggacaaggactggaatggatgggctggatcagcgccatcttcggcacagccaattacgcccagaaattccagggccgcgtgacaatcacagccgacgagtctacaagcaccgcctacatggaactgagcagcctgagaagcgaggacaccgccgtgtactattgtgccagaggcgtggcctcctggtatctggattattggggccagggaaccctggtcaccgtgtcatctacgcgtatccagaaccctgatcctgccgtgtaccagctgcgggatagcaagagcagcgacaagagcgtgtgtctgttcaccgacttcgacagccagaccaacgtgtcccagagcaaggactccgacgtgtacatcaccgataagtgcgtgctggacatgcggagcatggacttcaagagcaactccgccgtggcctggtccaacaagtccgatttcgcctgcgccaacgccttcaacaacagcattatccccgaggacacattcttcccaagcagcgacgtgccctgcgacgtgaagctggtggaaaagagcttcgagacagacaccaacctgaacttccagaacctgagcgtgatcggcttcagaatcctgctgctgaaagtggccggctttaacctgctgatgaccctgcggctgtggtccagccgcgccaagagaagcggatctggcgtgaagcagaccctgaatttcgacctgctgaagctggctggcgacgtggaatccaacccaggcccttctagaggccatatgaccgagtacaagcccacggtgcgcctcgccacccgcgacgacgtccccagggccgtacgcaccctcgccgccgcgttcgccgactaccccgccacgcgccacaccgtcgatccggaccgccacatcgagcgggtcaccgagctgcaagaactcttcctcacgcgcgtcgggctcgacatcggcaaggtgtgggtcgcggacgacggcgccgcggtggcggtctggaccacgccggagagcgtcgaagcgggggcggtgttcgccgagatcggcccgcgcatggccgagttgagcggttcccggctggccgcgcagcaacagatggaaggcctcctggcgccgcaccggcccaaggagcccgcgtggttcctggccaccgtcggcgtctcgcccgaccaccagggcaagggtctgggcagcgccgtcgtgctccccggagtggaggcggccgagcgcgccggggtgcccgccttcctggagacctccgcgccccgcaacctccccttctacgagcggctcggcttcaccgtcaccgccgacgtcgaggtgcccgaaggaccgcgcacctggtgcatgacccgcaagcccggtgcctga

SEQ ID NO: 8521 - DNA, 1857 bp, Artificial Sequence
  Synthetic Polynucloetide
atggccttaccagtgaccgccttgctcctgccgctggccttgctgctccacgccgccaggccggacatccagatgacacagagccctagcagcctgtctgccagcgtgggagacagagtgaccatcacctgtagagccagccagagcatcaacaagtggctgaactggtatcagcagaagcccggcaaggcccctaagctgctgatctatgccgccagctctctccagagcggagtgcctagcagattttctggcagcggctccggcaccgatttcaccctgacaatatccagcctccagcctgaggacttcgccacctactactgccagcaggactacaacttcccctacaccttcggccagggcaccaaggtggaaatcaaaagactcgaggacctgaagaacgtgttcccacctgaggtggccgtgttcgagcctagcgaggccgagatcagccacacccagaaagccaccctcgtgtgcctggctaccggcttctaccccgaccatgtggaactgtcttggtgggtcaacggcaaagaggtgcacagcggcgtgtgtaccgacccccagccactgaaagaacagcccgccctgaacgacagccggtactgcctgagcagcagactgagagtgtccgccaccttctggcagaacccccggaaccacttcagatgccaggtgcagttctacggcctgagcgagaacgacgagtggacccaggacagagccaagcccgtgacccagatcgtgtctgccgaagcctggggcagagccgattgcggctttaccagcgagagctaccagcagggcgtgctgagcgccaccatcctgtacgagatcctgctgggcaaggccaccctgtacgccgtgctggtgtctgccctggtgctgatggctatggtcaagcggaaggacagccggggaagggccaagcgatctggatctggagcaacaaacttctcactactcaaacaagcaggtgacgtggaggagaatcccgggcctactagtatggactggatttggcgcatccttttccttgtcggcgctgctaccggcgcgcattccttcgaacaagttcagctggttcagagcggcgctgaagtgaagaaacctggcagcagcgtgaaggtgtcctgcaaagcaagcggcggcacctttagcagctacggcatctcttgggtccgacaggctcctggacaaggactggaatggatgggctggatcagcgccatcttcggcacagccaattacgcccagaaattccagggccgcgtgacaatcacagccgacgagtctacaagcaccgcctacatggaactgagcagcctgagaagcgaggacaccgccgtgtactattgtgccagaggcgtggcctcctggtatctggattattggggccagggaaccctggtcaccgtgtcatctacgcgtatccagaaccctgatcctgccgtgtaccagctgcgggatagcaagagcagcgacaagagcgtgtgtctgttcaccgacttcgacagccagaccaacgtgtcccagagcaaggactccgacgtgtacatcaccgataagtgcgtgctggacatgcggagcatggacttcaagagcaactccgccgtggcctggtccaacaagtccgatttcgcctgcgccaacgccttcaacaacagcattatccccgaggacacattcttcccaagccccgagagcagctgcgacgtgaagctggtggaaaagagcttcgagacagacaccaacctgaacttccagaacctgagcgtgatcggcttcagaatcctgctgctgaaagtggccggctttaacctgctgatgaccctgcggctgtggtccagc

SEQ ID NO: 8522 - DNA, 2532 bp, Artificial Sequence
  Synthetic Polynucloetide
atggccttaccagtgaccgccttgctcctgccgctggccttgctgctccacgccgccaggccggacatccagatgacacagagccctagcagcctgtctgccagcgtgggagacagagtgaccatcacctgtagagccagccagagcatcaacaagtggctgaactggtatcagcagaagcccggcaaggcccctaagctgctgatctatgccgccagctctctccagagcggagtgcctagcagattttctggcagcggctccggcaccgatttcaccctgacaatatccagcctccagcctgaggacttcgccacctactactgccagcaggactacaacttcccctacaccttcggccagggcaccaaggtggaaatcaaaagactcgaggacctgaagaacgtgttcccacctgaggtggccgtgttcgagcctagcgaggccgagatcagccacacccagaaagccaccctcgtgtgcctggctaccggcttctaccccgaccatgtggaactgtcttggtgggtcaacggcaaagaggtgcacagcggcgtgtgtaccgacccccagccactgaaagaacagcccgccctgaacgacagccggtactgcctgagcagcagactgagagtgtccgccaccttctggcagaacccccggaaccacttcagatgccaggtgcagttctacggcctgagcgagaacgacgagtggacccaggacagagccaagcccgtgacccagatcgtgtctgccgaagcctggggcagagccgattgcggctttaccagcgagagctaccagcagggcgtgctgagcgccaccatcctgtacgagatcctgctgggcaaggccaccctgtacgccgtgctggtgtctgccctggtgctgatggctatggtcaagcggaaggacagccggggaagggccaagcgatctggatctggagcaacaaacttctcactactcaaacaagcaggtgacgtggaggagaatcccgggcctactagtatggactggatttggcgcatccttttccttgtcggcgctgctaccggcgcgcattccttcgaacaagttcagctggttcagagcggcgctgaagtgaagaaacctggcagcagcgtgaaggtgtcctgcaaagcaagcggcggcacctttagcagctacggcatctcttgggtccgacaggctcctggacaaggactggaatggatgggctggatcagcgccatcttcggcacagccaattacgcccagaaattccagggccgcgtgacaatcacagccgacgagtctacaagcaccgcctacatggaactgagcagcctgagaagcgaggacaccgccgtgtactattgtgccagaggcgtggcctcctggtatctggattattggggccagggaaccctggtcaccgtgtcatctacgcgtatccagaaccctgatcctgccgtgtaccagctgcgggatagcaagagcagcgacaagagcgtgtgtctgttcaccgacttcgacagccagaccaacgtgtcccagagcaaggactccgacgtgtacatcaccgataagtgcgtgctggacatgcggagcatggacttcaagagcaactccgccgtggcctggtccaacaagtccgatttcgcctgcgccaacgccttcaacaacagcattatccccgaggacacattcttcccaagccccgagagcagctgcgacgtgaagctggtggaaaagagcttcgagacagacaccaacctgaacttccagaacctgagcgtgatcggcttcagaatcctgctgctgaaagtggccggctttaacctgctgatgaccctgcggctgtggtccagccgcgccaagagaagcggatctggcgtgaagcagaccctgaatttcgacctgctgaagctggctggcgacgtggaatccaacccaggcccttctagaggcgggatccacaccatggctacctacgaggtgctgtgcgaggtggcaagaaagctgggcaccgacgacagagaagtggtgctgttcctgctgaacgtgttcatccctcagcctacactggcccagctgatcggtgcactgagagccctgaaagaggaaggccggctgacctttcctctgctggccgaatgcctgttcagagccggaagaagggatctgctgcgggacctgctgcatctggaccccagatttctggaaagacacctggccggcaccatgagctacttcagcccttaccagctgaccgtgctgcacgttgacggcgaactgtgcgccagagatattcggagcctgatcttcctgagcaaggacaccatcggcagccggtctacccctcagacatttctgcactgggtgtactgcatggaaaacctggacctgctcggccccacagatgtggatgccctgatgtccatgctgagaagcctgagcagagtggacctccagagacaggtgcagacactgatgggactgcacctgagcggacctagccacagccagcactacagacacacccct

SEQ ID NO: 8523 - DNA, 1869 bp, Artificial Sequence
  Synthetic Polynucloetide
atggccttaccagtgaccgccttgctcctgccgctggccttgctgctccacgccgccaggccggacatccagatgacacagagccctagcagcctgtctgccagcgtgggagacagagtgaccatcacctgtagagccagccagagcatcaacaagtggctgaactggtatcagcagaagcccggcaaggcccctaagctgctgatctatgccgccagctctctccagagcggagtgcctagcagattttctggcagcggctccggcaccgatttcaccctgacaatatccagcctccagcctgaggacttcgccacctactactgccagcaggactacaacttcccctacaccttcggccagggcaccaaggtggaaatcaaaagactcgagatccagaaccctgatcctgccgtgtaccagctgcgggatagcaagagcagcgacaagagcgtgtgtctgttcaccgacttcgacagccagaccaacgtgtcccagagcaaggactccgacgtgtacatcaccgataagtgcgtgctggacatgcggagcatggacttcaagagcaactccgccgtggcctggtccaacaagtccgatttcgcctgcgccaacgccttcaacaacagcattatccccgaggacacattcttcccaagccccgagagcagctgcgacgtgaagctggtggaaaagagcttcgagacagacaccaacctgaacttccagaacctgagcgtgatcggcttcagaatcctgctgctgaaagtggccggctttaacctgctgatgaccctgcggctgtggtccagccgcgccaagagaagcggatctggcgtgaagcagaccctgaatttcgacctgctgaagctggctggcgacgtggaatccaacccaggccctactagtatggactggatttggcgcatccttttccttgtcggcgctgctaccggcgcgcattccttcgaacaagttcagctggttcagagcggcgctgaagtgaagaaacctggcagcagcgtgaaggtgtcctgcaaagcaagcggcggcacctttagcagctacggcatctcttgggtccgacaggctcctggacaaggactggaatggatgggctggatcagcgccatcttcggcacagccaattacgcccagaaattccagggccgcgtgacaatcacagccgacgagtctacaagcaccgcctacatggaactgagcagcctgagaagcgaggacaccgccgtgtactattgtgccagaggcgtggcctcctggtatctggattattggggccagggaaccctggtcaccgtgtcatctacgcgtgaggacctgaagaacgtgttcccacctgaggtggccgtgttcgagcctagcgaggccgagatcagccacacccagaaagccaccctcgtgtgcctggctaccggcttctaccccgaccatgtggaactgtcttggtgggtcaacggcaaagaggtgcacagcggcgtgtgtaccgacccccagccactgaaagaacagcccgccctgaacgacagccggtactgcctgagcagcagactgagagtgtccgccaccttctggcagaacccccggaaccacttcagatgccaggtgcagttctacggcctgagcgagaacgacgagtggacccaggacagagccaagcccgtgacccagatcgtgtctgccgaagcctggggcagagccgattgcggctttaccagcgagagctaccagcagggcgtgctgagcgccaccatcctgtacgagatcctgctgggcaaggccaccctgtacgccgtgctggtgtctgccctggtgctgatggctatggtcaagcggaaggacagccgggga

SEQ ID NO: 8524 - DNA, 2535 bp, Artificial Sequence
  Synthetic Polynucloetide
atggccttaccagtgaccgccttgctcctgccgctggccttgctgctccacgccgccaggccggacatccagatgacacagagccctagcagcctgtctgccagcgtgggagacagagtgaccatcacctgtagagccagccagagcatcaacaagtggctgaactggtatcagcagaagcccggcaaggcccctaagctgctgatctatgccgccagctctctccagagcggagtgcctagcagattttctggcagcggctccggcaccgatttcaccctgacaatatccagcctccagcctgaggacttcgccacctactactgccagcaggactacaacttcccctacaccttcggccagggcaccaaggtggaaatcaaaagactcgagatccagaaccctgatcctgccgtgtaccagctgcgggatagcaagagcagcgacaagagcgtgtgtctgttcaccgacttcgacagccagaccaacgtgtcccagagcaaggactccgacgtgtacatcaccgataagtgcgtgctggacatgcggagcatggacttcaagagcaactccgccgtggcctggtccaacaagtccgatttcgcctgcgccaacgccttcaacaacagcattatccccgaggacacattcttcccaagccccgagagcagctgcgacgtgaagctggtggaaaagagcttcgagacagacaccaacctgaacttccagaacctgagcgtgatcggcttcagaatcctgctgctgaaagtggccggctttaacctgctgatgaccctgcggctgtggtccagccgcgccaagagaagcggatctggcgtgaagcagaccctgaatttcgacctgctgaagctggctggcgacgtggaatccaacccaggccctactagtatggactggatttggcgcatccttttccttgtcggcgctgctaccggcgcgcattccttcgaacaagttcagctggttcagagcggcgctgaagtgaagaaacctggcagcagcgtgaaggtgtcctgcaaagcaagcggcggcacctttagcagctacggcatctcttgggtccgacaggctcctggacaaggactggaatggatgggctggatcagcgccatcttcggcacagccaattacgcccagaaattccagggccgcgtgacaatcacagccgacgagtctacaagcaccgcctacatggaactgagcagcctgagaagcgaggacaccgccgtgtactattgtgccagaggcgtggcctcctggtatctggattattggggccagggaaccctggtcaccgtgtcatctacgcgtgaggacctgaagaacgtgttcccacctgaggtggccgtgttcgagcctagcgaggccgagatcagccacacccagaaagccaccctcgtgtgcctggctaccggcttctaccccgaccatgtggaactgtcttggtgggtcaacggcaaagaggtgcacagcggcgtgtgtaccgacccccagccactgaaagaacagcccgccctgaacgacagccggtactgcctgagcagcagactgagagtgtccgccaccttctggcagaacccccggaaccacttcagatgccaggtgcagttctacggcctgagcgagaacgacgagtggacccaggacagagccaagcccgtgacccagatcgtgtctgccgaagcctggggcagagccgattgcggctttaccagcgagagctaccagcagggcgtgctgagcgccaccatcctgtacgagatcctgctgggcaaggccaccctgtacgccgtgctggtgtctgccctggtgctgatggctatggtcaagcggaaggacagccggggaagggccaagcgatctggatctggagcaacaaacttctcactactcaaacaagcaggtgacgtggaggagaatcccgggccttctagaggcgggatccacaccatggctacctacgaggtgctgtgcgaggtggcaagaaagctgggcaccgacgacagagaagtggtgctgttcctgctgaacgtgttcatccctcagcctacactggcccagctgatcggtgcactgagagccctgaaagaggaaggccggctgacctttcctctgctggccgaatgcctgttcagagccggaagaagggatctgctgcgggacctgctgcatctggaccccagatttctggaaagacacctggccggcaccatgagctacttcagcccttaccagctgaccgtgctgcacgttgacggcgaactgtgcgccagagatattcggagcctgatcttcctgagcaaggacaccatcggcagccggtctacccctcagacatttctgcactgggtgtactgcatggaaaacctggacctgctcggccccacagatgtggatgccctgatgtccatgctgagaagcctgagcagagtggacctccagagacaggtgcagacactgatgggactgcacctgagcggacctagccacagccagcactacagacacacccct

SEQ ID NO: 8525 - DNA, 2694 bp, Artificial Sequence
  Synthetic Polynucloetide
atggccttaccagtgaccgccttgctcctgccgctggccttgctgctccacgccgccaggccgctcgaggggaaaccaattcccaaccctcttctgggactggattcaaccggcagcggcgaggacctgaagaacgtgttcccacctgaggtggccgtgttcgagcctagcaaggccgagatcgcccacacccagaaagccaccctcgtgtgcctggctaccggcttctaccccgaccatgtggaactgtcttggtgggtcaacggcaaagaggtgcacagcggcgtgtgtaccgacccccagccactgaaagaacagcccgccctgaacgacagccggtactgcctgagcagcagactgagagtgtccgccaccttctggcagaacccccggaaccacttcagatgccaggtgcagttctacggcctgagcgagaacgacgagtggacccaggacagagccaagcccgtgacccagatcgtgtctgccgaagcctggggcagagccgattgcggcatcaccagcgccagctaccaccagggcgtgctgagcgccaccatcctgtacgagatcctgctgggcaaggccaccctgtacgccgtgctggtgtctgccctggtgctgatggctatggtcaagcggaaggacagccggggaagggccaagcgatctggatctggagcaacaaacttctcactactcaaacaagcaggtgacgtggaggagaatcccgggcctactagcatggccttaccagtgaccgccttgctcctgccgctggccttgctgctccacgccgccaggccggacatccagatgacacagagccctagcagcctgtctgccagcgtgggagacagagtgaccatcacctgtagagccagccagagcatcaacaagtggctgaactggtatcagcagaagcccggcaaggcccctaagctgctgatctatgccgccagctctctccagagcggagtgcctagcagattttctggcagcggctccggcaccgatttcaccctgacaatatccagcctccagcctgaggacttcgccacctactactgccagcaggactacaacttcccctacaccttcggccagggcaccaaggtggaaatcaaaagaggcggaggcggaagtggaggcggaggatctggcggcggaggctctcaagttcagctggttcagagcggcgctgaagtgaagaaacctggcagcagcgtgaaggtgtcctgcaaagcaagcggcggcacctttagcagctacggcatctcttgggtccgacaggctcctggacaaggactggaatggatgggctggatcagcgccatcttcggcacagccaattacgcccagaaattccagggccgcgtgacaatcacagccgacgagtctacaagcaccgcctacatggaactgagcagcctgagaagcgaggacaccgccgtgtactattgtgccagaggcgtggcctcctggtatctggattattggggccagggaaccctggtcaccgtgtcatctacgcgtgagcagaaactgatctcggaagaggatgggagcggcatccagaaccctgatcctgccgtgtaccagctgcgggatagcaagagcagcgacaagagcgtgtgtctgttcaccgacttcgacagccagaccaacgtgtcccagagcaaggactccgacgtgtacatcaccgataagtgcgtgctggacatgcggagcatggacttcaagagcaactccgccgtggcctggtccaacaagtccgatttcgcctgcgccaacgccttcaacaacagcattatccccgaggacacattcttcccaagcagcgacgtgccctgcgacgtgaagctggtggaaaagagcttcgagacagacaccaacctgaacttccagaacctgagcgtgatcggcttcagaatcctgctgctgaaagtggccggctttaacctgctgatgaccctgcggctgtggtccagccgcgccaagagaagcggatctggcgtgaagcagaccctgaatttcgacctgctgaagctggctggcgacgtggaatccaacccaggcccttctagaggccatatgaccgagtacaagcccacggtgcgcctcgccacccgcgacgacgtccccagggccgtacgcaccctcgccgccgcgttcgccgactaccccgccacgcgccacaccgtcgatccggaccgccacatcgagcgggtcaccgagctgcaagaactcttcctcacgcgcgtcgggctcgacatcggcaaggtgtgggtcgcggacgacggcgccgcggtggcggtctggaccacgccggagagcgtcgaagcgggggcggtgttcgccgagatcggcccgcgcatggccgagttgagcggttcccggctggccgcgcagcaacagatggaaggcctcctggcgccgcaccggcccaaggagcccgcgtggttcctggccaccgtcggcgtctcgcccgaccaccagggcaagggtctgggcagcgccgtcgtgctccccggagtggaggcggccgagcgcgccggggtgcccgccttcctggagacctccgcgccccgcaacctccccttctacgagcggctcggcttcaccgtcaccgccgacgtcgaggtgcccgaaggaccgcgcacctggtgcatgacccgcaagcccggtgcctga

SEQ ID NO: 8526 - DNA, 2697 bp, Artificial Sequence
  Synthetic Polynucloetide
atggccttaccagtgaccgccttgctcctgccgctggccttgctgctccacgccgccaggccgctcgagcagaaactgatctcggaagaggatctgggctccggcgatcgccctgatcctgccgtgtaccagctgcgggatagcaagagcagcgacaagagcgtgtgtctgttcaccgacttcgacagccagaccaacgtgtcccagagcaaggactccgacgtgtacatcaccgataagtgcgtgctggacatgcggagcatggacttcaagagcaactccgccgtggcctggtccaacaagtccgatttcgcctgcgccaacgccttcaacaacagcattatccccgaggacacattcttcccaagccccgagagcagctgcgacgtgaagctggtggaaaagagcttcgagacagacaccaacctgaacttccagaacctgagcgtgatcggcttcagaatcctgctgctgaaagtggccggctttaacctgctgatgaccctgcggctgtggtccagctctagtcgcgccaagagaagcggatctggcgtgaagcagaccctgaatttcgacctgctgaagctggctggcgacgtggaatccaacccaggccccactagcatggccttaccagtgaccgccttgctcctgccgctggccttgctgctccacgccgccaggccggacatccagatgacacagagccctagcagcctgtctgccagcgtgggagacagagtgaccatcacctgtagagccagccagagcatcaacaagtggctgaactggtatcagcagaagcccggcaaggcccctaagctgctgatctatgccgccagctctctccagagcggagtgcctagcagattttctggcagcggctccggcaccgatttcaccctgacaatatccagcctccagcctgaggacttcgccacctactactgccagcaggactacaacttcccctacaccttcggccagggcaccaaggtggaaatcaaaagaggcggaggcggaagtggaggcggaggatctggcggcggaggctctcaagttcagctggttcagagcggcgctgaagtgaagaaacctggcagcagcgtgaaggtgtcctgcaaagcaagcggcggcacctttagcagctacggcatctcttgggtccgacaggctcctggacaaggactggaatggatgggctggatcagcgccatcttcggcacagccaattacgcccagaaattccagggccgcgtgacaatcacagccgacgagtctacaagcaccgcctacatggaactgagcagcctgagaagcgaggacaccgccgtgtactattgtgccagaggcgtggcctcctggtatctggattattggggccagggaaccctggtcaccgtgtcatctacgcgtgggaaaccaattcccaaccctcttctgggactggattcaaccggcagcggcgaggacctgaagaacgtgttcccacctgaggtggccgtgttcgagcctagcgaggccgagatcagccacacccagaaagccaccctcgtgtgcctggctaccggcttctaccccgaccatgtggaactgtcttggtgggtcaacggcaaagaggtgcacagcggcgtgtgtaccgacccccagccactgaaagaacagcccgccctgaacgacagccggtactgcctgagcagcagactgagagtgtccgccaccttctggcagaacccccggaaccacttcagatgccaggtgcagttctacggcctgagcgagaacgacgagtggacccaggacagagccaagcccgtgacccagatcgtgtctgccgaagcctggggcagagccgattgcggctttaccagcgagagctaccagcagggcgtgctgagcgccaccatcctgtacgagatcctgctgggcaaggccaccctgtacgccgtgctggtgtctgccctggtgctgatggctatggtcaagcggaaggacagccggggaagggccaagcgatctggatctggagcaacaaacttctcactactcaaacaagcaggtgacgtggaggagaatcccgggccttctagaggccatatgaccgagtacaagcccacggtgcgcctcgccacccgcgacgacgtccccagggccgtacgcaccctcgccgccgcgttcgccgactaccccgccacgcgccacaccgtcgatccggaccgccacatcgagcgggtcaccgagctgcaagaactcttcctcacgcgcgtcgggctcgacatcggcaaggtgtgggtcgcggacgacggcgccgcggtggcggtctggaccacgccggagagcgtcgaagcgggggcggtgttcgccgagatcggcccgcgcatggccgagttgagcggttcccggctggccgcgcagcaacagatggaaggcctcctggcgccgcaccggcccaaggagcccgcgtggttcctggccaccgtcggcgtctcgcccgaccaccagggcaagggtctgggcagcgccgtcgtgctccccggagtggaggcggccgagcgcgccggggtgcccgccttcctggagacctccgcgccccgcaacctccccttctacgagcggctcggcttcaccgtcaccgccgacgtcgaggtgcccgaaggaccgcgcacctggtgcatgacccgcaagcccggtgcctga

SEQ ID NO: 8527 - DNA, 2559 bp, Artificial Sequence
  Synthetic Polynucloetide
atggccttaccagtgaccgccttgctcctgccgctggccttgctgctccacgccgccaggccggacatccagatgacacagagccctagcagcctgtctgccagcgtgggagacagagtgaccatcacctgtagagccagccagagcatcaacaagtggctgaactggtatcagcagaagcccggcaaggcccctaagctgctgatctatgccgccagctctctccagagcggagtgcctagcagattttctggcagcggctccggcaccgatttcaccctgacaatatccagcctccagcctgaggacttcgccacctactactgccagcaggactacaacttcccctacaccttcggccagggcaccaaggtggaaatcaaaagactcgaggacctgaagaacgtgttcccacctgaggtggccgtgttcgagcctagcgaggccgagatcagccacacccagaaagccaccctcgtgtgcctggctaccggcttctaccccgaccatgtggaactgtcttggtgggtcaacggcaaagaggtgcacagcggcgtgtctaccgacccccagccactgaaagaacagcccgccctgaacgacagccggtactgcctgagcagcagactgagagtgtccgccaccttctggcagaacccccggaaccacttcagatgccaggtgcagttctacggcctgagcgagaacgacgagtggacccaggacagagccaagcccgtgacccagatcgtgtctgccgaagcctggggcagagccgattgcggctttaccagcgagagctaccagcagggcgtgctgagcgccaccatcctgtacgagatcctgctgggcaaggccaccctgtacgccgtgctggtgtctgccctggtgctgatggctatggtcaagcggaaggacagccggggaagggccaagcgatctggatctggagcaacaaacttctcactactcaaacaagcaggtgacgtggaggagaatcccgggcctactagtatggactggatttggcgcatccttttccttgtcggcgctgctaccggcgcgcattccttcgaacaagttcagctggttcagagcggcgctgaagtgaagaaacctggcagcagcgtgaaggtgtcctgcaaagcaagcggcggcacctttagcagctacggcatctcttgggtccgacaggctcctggacaaggactggaatggatgggctggatcagcgccatcttcggcacagccaattacgcccagaaattccagggccgcgtgacaatcacagccgacgagtctacaagcaccgcctacatggaactgagcagcctgagaagcgaggacaccgccgtgtactattgtgccagaggcgtggcctcctggtatctggattattggggccagggaaccctggtcaccgtgtcatctacgcgtatccagaaccctgatcctgccgtgtaccagctgcgggatagcaagagcagcgacaagagcgtgtgtctgttcaccgacttcgacagccagaccaacgtgtcccagagcaaggactccgacgtgtacatcaccgataagaccgtgctggacatgcggagcatggacttcaagagcaactccgccgtggcctggtccaacaagtccgatttcgcctgcgccaacgccttcaacaacagcattatccccgaggacacattcttcccaagccccgagagcagctgcgacgtgaagctggtggaaaagagcttcgagacagacaccaacctgaacttccagaacctgagcgtgatcggcttcagaatcctgctgctgaaagtggccggctttaacctgctgatgaccctgcggctgtggtccagccgcgccaagagaagcggatctggcgtgaagcagaccctgaatttcgacctgctgaagctggctggcgacgtggaatccaacccaggcccttctagaggccatatgaccgagtacaagcccacggtgcgcctcgccacccgcgacgacgtccccagggccgtacgcaccctcgccgccgcgttcgccgactaccccgccacgcgccacaccgtcgatccggaccgccacatcgagcgggtcaccgagctgcaagaactcttcctcacgcgcgtcgggctcgacatcggcaaggtgtgggtcgcggacgacggcgccgcggtggcggtctggaccacgccggagagcgtcgaagcgggggcggtgttcgccgagatcggcccgcgcatggccgagttgagcggttcccggctggccgcgcagcaacagatggaaggcctcctggcgccgcaccggcccaaggagcccgcgtggttcctggccaccgtcggcgtctcgcccgaccaccagggcaagggtctgggcagcgccgtcgtgctccccggagtggaggcggccgagcgcgccggggtgcccgccttcctggagacctccgcgccccgcaacctccccttctacgagcggctcggcttcaccgtcaccgccgacgtcgaggtgcccgaaggaccgcgcacctggtgcatgacccgcaagcccggtgcctga

SEQ ID NO: 8528 - DNA, 2805 bp, Artificial Sequence
  Synthetic Polynucloetide
atggccttaccagtgaccgccttgctcctgccgctggccttgctgctccacgccgccaggccggacatccagatgacacagagccctagcagcctgtctgccagcgtgggagacagagtgaccatcacctgtagagccagccagagcatcaacaagtggctgaactggtatcagcagaagcccggcaaggcccctaagctgctgatctatgccgccagctctctccagagcggagtgcctagcagattttctggcagcggctccggcaccgatttcaccctgacaatatccagcctccagcctgaggacttcgccacctactactgccagcaggactacaacttcccctacaccttcggccagggcaccaaggtggaaatcaaaagactcgaggacctgaagaacgtgttcccacctgaggtggccgtgttcgagcctagcgaggccgagatcagccacacccagaaagccaccctcgtgtgcctggctaccggcttctaccccgaccatgtggaactgtcttggtgggtcaacggcaaagaggtgcacagcggcgtgtctaccgacccccagccactgaaagaacagcccgccctgaacgacagccggtactgcctgagcagcagactgagagtgtccgccaccttctggcagaacccccggaaccacttcagatgccaggtgcagttctacggcctgagcgagaacgacgagtggacccaggacagagccaagcccgtgacccagatcgtgtctgccgaagcctggggcagagccgattgcggctttaccagcgagagctaccagcagggcgtgctgagcgccaccatcctgtacgagatcctgctgggcaaggccaccctgtacgccgtgctggtgtctgccctggtgctgatggctatggtcaagcggaaggacagccggggaagggccaagcgatctggatctggagcaacaaacttctcactactcaaacaagcaggtgacgtggaggagaatcccgggcctactagtatggactggatttggcgcatccttttccttgtcggcgctgctaccggcgcgcattccttcgaacaagttcagctggttcagagcggcgctgaagtgaagaaacctggcagcagcgtgaaggtgtcctgcaaagcaagcggcggcacctttagcagctacggcatctcttgggtccgacaggctcctggacaaggactggaatggatgggctggatcagcgccatcttcggcacagccaattacgcccagaaattccagggccgcgtgacaatcacagccgacgagtctacaagcaccgcctacatggaactgagcagcctgagaagcgaggacaccgccgtgtactattgtgccagaggcgtggcctcctggtatctggattattggggccagggaaccctggtcaccgtgtcatctacgcgtgagcagaaactgatctcggaagaggatgggagcggcaccccattcccttctctggcccctcccatcatgctgctggtggacggcaagcagcagatggtggtcgtgtgcctggtgctggatgtggccccacctggactggacagccccatctggtttagcgccggcaatggctctgccctggacgcctttacctacggcccaagccctgccaccgatggcacctggacaaatctggcccacctgagcctgcccagcgaggaactggcttcttgggagcctctcgtgtgccacacaggacctggcgctgagggacacagcagatccacccagcctatgcacctgtctggcgaggccagcaccgccagaacctgtcctcaggaacctctgagaggcacccctggcggagcactgtggctgggagtgctgagactgctgctgttcaagctgctgctgtttgacctgctgctgacctgctcctgtctgtgcgatcctgccggccctctgccttctcctgccaccaccacaagactgagagccctgggcagccacagactgcaccctgccacagagacaggcggcagagaggccacaagcagccctagaccccagcccagagacagaagatggggcgataccccccctggcagaaagcctggatctccagtccgcgccaagagaagcggatctggcgtgaagcagaccctgaatttcgacctgctgaagctggctggcgacgtggaatccaacccaggcccttctagaggccatatgaccgagtacaagcccacggtgcgcctcgccacccgcgacgacgtccccagggccgtacgcaccctcgccgccgcgttcgccgactaccccgccacgcgccacaccgtcgatccggaccgccacatcgagcgggtcaccgagctgcaagaactcttcctcacgcgcgtcgggctcgacatcggcaaggtgtgggtcgcggacgacggcgccgcggtggcggtctggaccacgccggagagcgtcgaagcgggggcggtgttcgccgagatcggcccgcgcatggccgagttgagcggttcccggctggccgcgcagcaacagatggaaggcctcctggcgccgcaccggcccaaggagcccgcgtggttcctggccaccgtcggcgtctcgcccgaccaccagggcaagggtctgggcagcgccgtcgtgctccccggagtggaggcggccgagcgcgccggggtgcccgccttcctggagacctccgcgccccgcaacctccccttctacgagcggctcggcttcaccgtcaccgccgacgtcgaggtgcccgaaggaccgcgcacctggtgcatgacccgcaagcccggtgcctga

SEQ ID NO: 8529 - DNA, 2859 bp, Artificial Sequence
  Synthetic Polynucloetide
atggccttaccagtgaccgccttgctcctgccgctggccttgctgctccacgccgccaggccgctcgaggacctgaagaacgtgttcccacctgaggtggccgtgttcgagcctagcgaggccgagatcagccacacccagaaagccaccctcgtgtgcctggctaccggcttctaccccgaccatgtggaactgtcttggtgggtcaacggcaaagaggtgcacagcggcgtgtctaccgacccccagccactgaaagaacagcccgccctgaacgacagccggtactgcctgagcagcagactgagagtgtccgccaccttctggcagaacccccggaaccacttcagatgccaggtgcagttctacggcctgagcgagaacgacgagtggacccaggacagagccaagcccgtgacccagatcgtgtctgccgaagcctggggcagagccgattgcggctttaccagcgagagctaccagcagggcgtgctgagcgccaccatcctgtacgagatcctgctgggcaaggccaccctgtacgccgtgctggtgtctgccctggtgctgatggctatggtcaagcggaaggacagccggggaagggccaagcgatctggatctggagcaacaaacttctcactactcaaacaagcaggtgacgtggaggagaatcccgggcctactagcatggccttaccagtgaccgccttgctcctgccgctggccttgctgctccacgccgccaggccggacatccagatgacacagagccctagcagcctgtctgccagcgtgggagacagagtgaccatcacctgtagagccagccagagcatcaacaagtggctgaactggtatcagcagaagcccggcaaggcccctaagctgctgatctatgccgccagctctctccagagcggagtgcctagcagattttctggcagcggctccggcaccgatttcaccctgacaatatccagcctccagcctgaggacttcgccacctactactgccagcaggactacaacttcccctacaccttcggccagggcaccaaggtggaaatcaaaagaggcggaggcggaagtggaggcggaggatctggcggcggaggctctcaagttcagctggttcagagcggcgctgaagtgaagaaacctggcagcagcgtgaaggtgtcctgcaaagcaagcggcggcacctttagcagctacggcatctcttgggtccgacaggctcctggacaaggactggaatggatgggctggatcagcgccatcttcggcacagccaattacgcccagaaattccagggccgcgtgacaatcacagccgacgagtctacaagcaccgcctacatggaactgagcagcctgagaagcgaggacaccgccgtgtactattgtgccagaggcgtggcctcctggtatctggattattggggccagggaaccctggtcaccgtgtcatctacgcgtgagcagaaactgatctcggaagaggatctggggagcggcaccccattcccttctctggcccctcccatcatgctgctggtggacggcaagcagcagatggtggtcgtgtgcctggtgctggatgtggccccacctggactggacagccccatctggtttagcgccggcaatggctctgccctggacgcctttacctacggcccaagccctgccaccgatggcacctggacaaatctggcccacctgagcctgcccagcgaggaactggcttcttgggagcctctcgtgtgccacacaggacctggcgctgagggacacagcagatccacccagcctatgcacctgtctggcgaggccagcaccgccagaacctgtcctcaggaacctctgagaggcacccctggcggagcactgtggctgggagtgctgagactgctgctgttcaagctgctgctgtttgacctgctgctgacctgctcctgtctgtgcgatcctgccggccctctgccttctcctgccaccaccacaagactgagagccctgggcagccacagactgcaccctgccacagagacaggcggcagagaggccacaagcagccctagaccccagcccagagacagaagatggggcgataccccccctggcagaaagcctggatctccagtccgcgccaagagaagcggatctggcgtgaagcagaccctgaatttcgacctgctgaagctggctggcgacgtggaatccaacccaggcccttctagatctagaggccatatgaccgagtacaagcccacggtgcgcctcgccacccgcgacgacgtccccagggccgtacgcaccctcgccgccgcgttcgccgactaccccgccacgcgccacaccgtcgatccggaccgccacatcgagcgggtcaccgagctgcaagaactcttcctcacgcgcgtcgggctcgacatcggcaaggtgtgggtcgcggacgacggcgccgcggtggcggtctggaccacgccggagagcgtcgaagcgggggcggtgttcgccgagatcggcccgcgcatggccgagttgagcggttcccggctggccgcgcagcaacagatggaaggcctcctggcgccgcaccggcccaaggagcccgcgtggttcctggccaccgtcggcgtctcgcccgaccaccagggcaagggtctgggcagcgccgtcgtgctccccggagtggaggcggccgagcgcgccggggtgcccgccttcctggagacctccgcgccccgcaacctccccttctacgagcggctcggcttcaccgtcaccgccgacgtcgaggtgcccgaaggaccgcgcacctggtgcatgacccgcaagcccggtgcctga

SEQ ID NO: 8530 - DNA, 2670 bp, Artificial Sequence
  Synthetic Polynucloetide
atggccttaccagtgaccgccttgctcctgccgctggccttgctgctccacgccgccaggccggacatccagatgacacagagccctagcagcctgtctgccagcgtgggagacagagtgaccatcacctgtagagccagccagagcatcaacaagtggctgaactggtatcagcagaagcccggcaaggcccctaagctgctgatctatgccgccagctctctccagagcggagtgcctagcagattttctggcagcggctccggcaccgatttcaccctgacaatatccagcctccagcctgaggacttcgccacctactactgccagcaggactacaacttcccctacaccttcggccagggcaccaaggtggaaatcaaaagactcgaggggaaaccaattcccaaccctcttctgggactggattcaaccggcagcggcgacaagcagctggacgccgacgtgtcccccaagcctaccatcttcctgccctctatcgccgagacaaagctccagaaggccggcacctacctgtgcctgctggaaaagttcttcccagatgtgattaagatccactggcaggaaaagaagtccaacaccatcctgggcagccaggaaggcaacaccatgaagaccaacgacacctacatgaagttcagctggctgaccgtgcccgagaagtccctggacaaagaacacagatgcatcgtgcggcacgaaaacaacaagaacggcgtggaccaggaaatcatcttcccacccatcaagaccgatgtgattacaatggaccccaaggacaactgctccaaggacgccaacgataccctgctgctccagctgaccaacaccagcgcctactacatgtacttgttgctgctgctgaagtccgtggtgtacttcgccatcatcacatgctgcctgctgcggagaaccgccttctgctgcaacggcgagaagtctagggccaagcgatctggatctggagcaacaaacttctcactactcaaacaagcaggtgacgtggaggagaatcccgggcctactagtatggactggatttggcgcatccttttccttgtcggcgctgctaccggcgcgcattccttcgaacaagttcagctggttcagagcggcgctgaagtgaagaaacctggcagcagcgtgaaggtgtcctgcaaagcaagcggcggcacctttagcagctacggcatctcttgggtccgacaggctcctggacaaggactggaatggatgggctggatcagcgccatcttcggcacagccaattacgcccagaaattccagggccgcgtgacaatcacagccgacgagtctacaagcaccgcctacatggaactgagcagcctgagaagcgaggacaccgccgtgtactattgtgccagaggcgtggcctcctggtatctggattattggggccagggaaccctggtcaccgtgtcatctacgcgtgagcagaaactgatctcggaagaggatgggagcggcagccagcctcacaccaagcccagcgtgttcgtgatgaagaacggcaccaacgtggcctgcctcgtgaaagagttctaccccaaggacatcaggatcaacctggtgtccagcaagaagatcaccgagttcgaccccgccatcgtgatctcccccagcggcaagtacaacgccgtgaagctggggaagtacgaggacagcaacagcgtgacctgctccgtgcagcacgacaacaagaccgtgcacagcaccgactttgaagtgaaaaccgactccaccgaccacgtgaagcccaaagagacagagaacaccaagcagcccagcaagagctgccacaagcccaaggccatcgtgcacaccgagaaagtgaacatgatgagcctgaccgtgctgggcctgcggatgctgttcgccaaaaccgtggccgtgaacttcctgctgaccgccaagctgttcttcctccgcgccaagagaagcggatctggcgtgaagcagaccctgaatttcgacctgctgaagctggctggcgacgtggaatccaacccaggcccttctagaggccatatgaccgagtacaagcccacggtgcgcctcgccacccgcgacgacgtccccagggccgtacgcaccctcgccgccgcgttcgccgactaccccgccacgcgccacaccgtcgatccggaccgccacatcgagcgggtcaccgagctgcaagaactcttcctcacgcgcgtcgggctcgacatcggcaaggtgtgggtcgcggacgacggcgccgcggtggcggtctggaccacgccggagagcgtcgaagcgggggcggtgttcgccgagatcggcccgcgcatggccgagttgagcggttcccggctggccgcgcagcaacagatggaaggcctcctggcgccgcaccggcccaaggagcccgcgtggttcctggccaccgtcggcgtctcgcccgaccaccagggcaagggtctgggcagcgccgtcgtgctccccggagtggaggcggccgagcgcgccggggtgcccgccttcctggagacctccgcgccccgcaacctccccttctacgagcggctcggcttcaccgtcaccgccgacgtcgaggtgcccgaaggaccgcgcacctggtgcatgacccgcaagcccggtgcctga

SEQ ID NO: 8531 - DNA, 1881 bp, Artificial Sequence
  Synthetic Polynucloetide
atggccttaccagtgaccgccttgctcctgccgctggccttgctgctccacgccgccaggccggacatccagatgacacagagccctagcagcctgtctgccagcgtgggagacagagtgaccatcacctgtagagccagccagagcatcaacaagtggctgaactggtatcagcagaagcccggcaaggcccctaagctgctgatctatgccgccagctctctccagagcggagtgcctagcagattttctggcagcggctccggcaccgatttcaccctgacaatatccagcctccagcctgaggacttcgccacctactactgccagcaggactacaacttcccctacaccttcggccagggcaccaaggtggaaatcaaaagactcgagagccagcctcacaccaagcccagcgtgttcgtgatgaagaacggcaccaacgtggcctgcctcgtgaaagagttctaccccaaggacatcaggatcaacctggtgtccagcaagaagatcaccgagttcgaccccgccatcgtgatctcccccagcggcaagtacaacgccgtgaagctggggaagtacgaggacagcaacagcgtgacctgctccgtgcagcacgacaacaagaccgtgcacagcaccgactttgaagtgaaaaccgactccaccgaccacgtgaagcccaaagagacagagaacaccaagcagcccagcaagagctgccacaagcccaaggccatcgtgcacaccgagaaagtgaacatgatgagcctgaccgtgctgggcctgcggatgctgttcgccaaaaccgtggccgtgaacttcctgctgaccgccaagctgttcttcctcagggccaagcgatctggatctggagcaacaaacttctcactactcaaacaagcaggtgacgtggaggagaatcccgggcctactagtatggactggatttggcgcatccttttccttgtcggcgctgctaccggcgcgcattccttcgaacaagttcagctggttcagagcggcgctgaagtgaagaaacctggcagcagcgtgaaggtgtcctgcaaagcaagcggcggcacctttagcagctacggcatctcttgggtccgacaggctcctggacaaggactggaatggatgggctggatcagcgccatcttcggcacagccaattacgcccagaaattccagggccgcgtgacaatcacagccgacgagtctacaagcaccgcctacatggaactgagcagcctgagaagcgaggacaccgccgtgtactattgtgccagaggcgtggcctcctggtatctggattattggggccagggaaccctggtcaccgtgtcatctacgcgtgacaagcagctggacgccgacgtgtcccccaagcctaccatcttcctgccctctatcgccgagacaaagctccagaaggccggcacctacctgtgcctgctggaaaagttcttcccagatgtgattaagatccactggcaggaaaagaagtccaacaccatcctgggcagccaggaaggcaacaccatgaagaccaacgacacctacatgaagttcagctggctgaccgtgcccgagaagtccctggacaaagaacacagatgcatcgtgcggcacgaaaacaacaagaacggcgtggaccaggaaatcatcttcccacccatcaagaccgatgtgattacaatggaccccaaggacaactgctccaaggacgccaacgataccctgctgctccagctgaccaacaccagcgcctactacatgtacttgttgctgctgctgaagtccgtggtgtacttcgccatcatcacatgctgcctgctgcggagaaccgccttctgctgcaacggcgagaagtct

SEQ ID NO: 8532 - DNA, 2715 bp, Artificial Sequence
  Synthetic Polynucloetide
atggccttaccagtgaccgccttgctcctgccgctggccttgctgctccacgccgccaggccgctcgaggggaaaccaattcccaaccctcttctgggactggattcaaccggcagcggcgacaagcagctggacgccgacgtgtcccccaagcctaccatcttcctgccctctatcgccgagacaaagctccagaaggccggcacctacctgtgcctgctggaaaagttcttcccagatgtgattaagatccactggcaggaaaagaagtccaacaccatcctgggcagccaggaaggcaacaccatgaagaccaacgacacctacatgaagttcagctggctgaccgtgcccgagaagtccctggacaaagaacacagatgcatcgtgcggcacgaaaacaacaagaacggcgtggaccaggaaatcatcttcccacccatcaagaccgatgtgattacaatggaccccaaggacaactgctccaaggacgccaacgataccctgctgctccagctgaccaacaccagcgcctactacatgtacttgttgctgctgctgaagtccgtggtgtacttcgccatcatcacatgctgcctgctgcggagaaccgccttctgctgcaacggcgagaagtctagggccaagcgatctggatctggagcaacaaacttctcactactcaaacaagcaggtgacgtggaggagaatcccgggcctactagcatggccttaccagtgaccgccttgctcctgccgctggccttgctgctccacgccgccaggccggacatccagatgacacagagccctagcagcctgtctgccagcgtgggagacagagtgaccatcacctgtagagccagccagagcatcaacaagtggctgaactggtatcagcagaagcccggcaaggcccctaagctgctgatctatgccgccagctctctccagagcggagtgcctagcagattttctggcagcggctccggcaccgatttcaccctgacaatatccagcctccagcctgaggacttcgccacctactactgccagcaggactacaacttcccctacaccttcggccagggcaccaaggtggaaatcaaaagaggcggaggcggaagtggaggcggaggatctggcggcggaggctctcaagttcagctggttcagagcggcgctgaagtgaagaaacctggcagcagcgtgaaggtgtcctgcaaagcaagcggcggcacctttagcagctacggcatctcttgggtccgacaggctcctggacaaggactggaatggatgggctggatcagcgccatcttcggcacagccaattacgcccagaaattccagggccgcgtgacaatcacagccgacgagtctacaagcaccgcctacatggaactgagcagcctgagaagcgaggacaccgccgtgtactattgtgccagaggcgtggcctcctggtatctggattattggggccagggaaccctggtcaccgtgtcatctacgcgtgagcagaaactgatctcggaagaggatgggagcggcagccagcctcacaccaagcccagcgtgttcgtgatgaagaacggcaccaacgtggcctgcctcgtgaaagagttctaccccaaggacatcaggatcaacctggtgtccagcaagaagatcaccgagttcgaccccgccatcgtgatctcccccagcggcaagtacaacgccgtgaagctggggaagtacgaggacagcaacagcgtgacctgctccgtgcagcacgacaacaagaccgtgcacagcaccgactttgaagtgaaaaccgactccaccgaccacgtgaagcccaaagagacagagaacaccaagcagcccagcaagagctgccacaagcccaaggccatcgtgcacaccgagaaagtgaacatgatgagcctgaccgtgctgggcctgcggatgctgttcgccaaaaccgtggccgtgaacttcctgctgaccgccaagctgttcttcctccgcgccaagagaagcggatctggcgtgaagcagaccctgaatttcgacctgctgaagctggctggcgacgtggaatccaacccaggcccttctagaggccatatgaccgagtacaagcccacggtgcgcctcgccacccgcgacgacgtccccagggccgtacgcaccctcgccgccgcgttcgccgactaccccgccacgcgccacaccgtcgatccggaccgccacatcgagcgggtcaccgagctgcaagaactcttcctcacgcgcgtcgggctcgacatcggcaaggtgtgggtcgcggacgacggcgccgcggtggcggtctggaccacgccggagagcgtcgaagcgggggcggtgttcgccgagatcggcccgcgcatggccgagttgagcggttcccggctggccgcgcagcaacagatggaaggcctcctggcgccgcaccggcccaaggagcccgcgtggttcctggccaccgtcggcgtctcgcccgaccaccagggcaagggtctgggcagcgccgtcgtgctccccggagtggaggcggccgagcgcgccggggtgcccgccttcctggagacctccgcgccccgcaacctccccttctacgagcggctcggcttcaccgtcaccgccgacgtcgaggtgcccgaaggaccgcgcacctggtgcatgacccgcaagcccggtgcctga

SEQ ID NO: 8533 - DNA, 3090 bp, Artificial Sequence
  Synthetic Polynucloetide
atggccttaccagtgaccgccttgctcctgccgctggccttgctgctccacgccgccaggccggacatccagatgacacagagccctagcagcctgtctgccagcgtgggagacagagtgaccatcacctgtagagccagccagagcatcaacaagtggctgaactggtatcagcagaagcccggcaaggcccctaagctgctgatctatgccgccagctctctccagagcggagtgcctagcagattttctggcagcggctccggcaccgatttcaccctgacaatatccagcctccagcctgaggacttcgccacctactactgccagcaggactacaacttcccctacaccttcggccagggcaccaaggtggaaatcaaaagaggacagcctaaggccaatcctaccgtgacactgttccctccaagcagcgaagaactccaggccaacaaggccacacttgtgtgcctgatctccgacttctaccctggggctgtgacagtggcttggaaggccgatggatctcctgtgaaagccggcgtggaaaccaccaagccatccaagcagagcaacaacaaatacgccgccagctcctacctgagcctgacacctgagcagtggaagtcccacagatcctacagctgccaagtgacccacgaaggcagcaccgtggaaaagacagtggcccctacagagtgcagcggatcccagagcttcggcctgctggaccccaagctgtgctacctgctggatggcatcctgttcatctacggcgtgatcctgaccgccctgttcctgagagtgaagttcagcagaagcgccgacgcccctgcctaccagcagggacagaaccaactgtacaacgagctgaacctgggcagacgggaagagtacgacgtgctggacaagcggagaggcagggaccctgagatgggcggaaagccccagcggagaaagaacccccaggaaggactgtataacgaactccagaaagacaagatggccgaagcctacagcgagatcggcatgaagggcgagcggagaagaggcaagggccacgatggcctgtaccagggcctgagcaccgccaccaaggacacctatgacgccctgcacatgcaggccctgcctccaagaagggccaagcgatctggatctggagcaacaaacttctcactactcaaacaagcaggtgacgtggaggagaatcccgggcctactagtatggactggatttggcgcatccttttccttgtcggcgctgctaccggcgcgcattccttcgaacaagttcagctggttcagagcggcgctgaagtgaagaaacctggcagcagcgtgaaggtgtcctgcaaagcaagcggcggcacctttagcagctacggcatctcttgggtccgacaggctcctggacaaggactggaatggatgggctggatcagcgccatcttcggcacagccaattacgcccagaaattccagggccgcgtgacaatcacagccgacgagtctacaagcaccgcctacatggaactgagcagcctgagaagcgaggacaccgccgtgtactattgtgccagaggcgtggcctcctggtatctggattattggggccagggaaccctggtcaccgtgtcatctgcctctacaaagggaccctccgtgtttcctctggctcccagcagcaagtctacaagcggaggaacagccgctctgggctgcctggtcaaggattactttcccgagcctgtgaccgtgtcctggaatagcggagcactgacaagcggcgtgcacacctttccagccgtgctgcaaagcagcggcctgtactctctgagcagcgtggtcacagtgcctagctctagcctgggcacccagacctacatctgcaatgtgaaccacaagcctagcaacaccaaggtggacaagagagtggaacccaagagctgtggtacccagagttttgggttgttggaccctaaattgtgctatctgttggacggaatcctgttcatttacggagtgatcctgaccgcattgttcctgcgggttaagttttccagatccgcagacgcacccgcttaccaacaagggcagaaccaactctacaatgaacttaatttggggcggagggaagagtacgacgttctggacaaaaggaggggacgagatcccgagatgggcggaaagcctcagcgaaggaagaatccgcaagaggggctttataacgaactccagaaagataaaatggcagaagcctatagtgagattgggatgaagggagaaaggaggaggggtaaaggtcacgatgggttgtaccaaggattgagcacagccactaaagatacctatgatgcgctccacatgcaggccctgccgccaagacgcgccaagagaagcggatctggcgtgaagcagaccctgaatttcgacctgctgaagctggctggcgacgtggaatccaacccaggcccttctagaggccatatgaccgagtacaagcccacggtgcgcctcgccacccgcgacgacgtccccagggccgtacgcaccctcgccgccgcgttcgccgactaccccgccacgcgccacaccgtcgatccggaccgccacatcgagcgggtcaccgagctgcaagaactcttcctcacgcgcgtcgggctcgacatcggcaaggtgtgggtcgcggacgacggcgccgcggtggcggtctggaccacgccggagagcgtcgaagcgggggcggtgttcgccgagatcggcccgcgcatggccgagttgagcggttcccggctggccgcgcagcaacagatggaaggcctcctggcgccgcaccggcccaaggagcccgcgtggttcctggccaccgtcggcgtctcgcccgaccaccagggcaagggtctgggcagcgccgtcgtgctccccggagtggaggcggccgagcgcgccggggtgcccgccttcctggagacctccgcgccccgcaacctccccttctacgagcggctcggcttcaccgtcaccgccgacgtcgaggtgcccgaaggaccgcgcacctggtgcatgacccgcaagcccggtgcctga

SEQ ID NO: 8534 - DNA, 2445 bp, Artificial Sequence
  Synthetic Polynucloetide
atggccttaccagtgaccgccttgctcctgccgctggccttgctgctccacgccgccaggccggacatccagatgacacagagccctagcagcctgtctgccagcgtgggagacagagtgaccatcacctgtagagccagccagagcatcaacaagtggctgaactggtatcagcagaagcccggcaaggcccctaagctgctgatctatgccgccagctctctccagagcggagtgcctagcagattttctggcagcggctccggcaccgatttcaccctgacaatatccagcctccagcctgaggacttcgccacctactactgccagcaggactacaacttcccctacaccttcggccagggcaccaaggtggaaatcaaaagactcgaggacctgaagaacgtgttcccacctgaggtggccgtgttcgagcctagcgaggccgagatcagccacacccagaaagccaccctcgtgtgcctggctaccggcttctaccccgaccatgtggaactgtcttggtgggtcaacggcaaagaggtgcacagcggcgtgtctaccgacccccagccactgaaagaacagcccgccctgaacgacagccggtactgcctgagcagcagactgagagtgtccgccaccttctggcagaacccccggaaccacttcagatgccaggtgcagttctacggcctgagcgagaacgacgagtggacccaggacagagccaagcccgtgacccagatcgtgtctgccgaagcctggggcagagccgattgcggatcccagagcttcggcctgctggaccccaagctgtgctacctgctggatggcatcctgttcatctacggcgtgatcctgaccgccctgttcctgagagtgaagttcagcagaagcgccgacgcccctgcctaccagcagggacagaaccaactgtacaacgagctgaacctgggcagacgggaagagtacgacgtgctggacaagcggagaggcagggaccctgagatgggcggaaagccccagcggagaaagaacccccaggaaggactgtataacgaactccagaaagacaagatggccgaagcctacagcgagatcggcatgaagggcgagcggagaagaggcaagggccacgatggcctgtaccagggcctgagcaccgccaccaaggacacctatgacgccctgcacatgcaggccctgcctccaagaagggccaagcgatctggatctggagcaacaaacttctcactactcaaacaagcaggtgacgtggaggagaatcccgggcctactagtatggactggatttggcgcatccttttccttgtcggcgctgctaccggcgcgcattccttcgaacaagttcagctggttcagagcggcgctgaagtgaagaaacctggcagcagcgtgaaggtgtcctgcaaagcaagcggcggcacctttagcagctacggcatctcttgggtccgacaggctcctggacaaggactggaatggatgggctggatcagcgccatcttcggcacagccaattacgcccagaaattccagggccgcgtgacaatcacagccgacgagtctacaagcaccgcctacatggaactgagcagcctgagaagcgaggacaccgccgtgtactattgtgccagaggcgtggcctcctggtatctggattattggggccagggaaccctggtcaccgtgtcatctacgcgtatccagaaccctgatcctgccgtgtaccagctgcgggatagcaagagcagcgacaagagcgtgtgtctgttcaccgacttcgacagccagaccaacgtgtcccagagcaaggactccgacgtgtacatcaccgataagaccgtgctggacatgcggagcatggacttcaagagcaactccgccgtggcctggtccaacaagtccgatttcgcctgcgccaacgccttcaacaacagcattatccccgaggacacattcttcccaagccccgagagcagctgcggtacccagagttttgggttgttggaccctaaattgtgctatctgttggacggaatcctgttcatttacggagtgatcctgaccgcattgttcctgcgggttaagttttccagatccgcagacgcacccgcttaccaacaagggcagaaccaactctacaatgaacttaatttggggcggagggaagagtacgacgttctggacaaaaggaggggacgagatcccgagatgggcggaaagcctcagcgaaggaagaatccgcaagaggggctttataacgaactccagaaagataaaatggcagaagcctatagtgagattgggatgaagggagaaaggaggaggggtaaaggtcacgatgggttgtaccaaggattgagcacagccactaaagatacctatgatgcgctccacatgcaggccctgccgccaaga

SEQ ID NO: 8535 - DNA, 2445 bp, Artificial Sequence
  Synthetic Polynucloetide
atggccttaccagtgaccgccttgctcctgccgctggccttgctgctccacgccgccaggccggacatccagatgacacagagccctagcagcctgtctgccagcgtgggagacagagtgaccatcacctgtagagccagccagagcatcaacaagtggctgaactggtatcagcagaagcccggcaaggcccctaagctgctgatctatgccgccagctctctccagagcggagtgcctagcagattttctggcagcggctccggcaccgatttcaccctgacaatatccagcctccagcctgaggacttcgccacctactactgccagcaggactacaacttcccctacaccttcggccagggcaccaaggtggaaatcaaaagactcgaggacctgaagaacgtgttcccacctgaggtggccgtgttcgagcctagcaaggccgagatcgcccacacccagaaagccaccctcgtgtgcctggctaccggcttctaccccgaccatgtggaactgtcttggtgggtcaacggcaaagaggtgcacagcggcgtgtgtaccgacccccagccactgaaagaacagcccgccctgaacgacagccggtactgcctgagcagcagactgagagtgtccgccaccttctggcagaacccccggaaccacttcagatgccaggtgcagttctacggcctgagcgagaacgacgagtggacccaggacagagccaagcccgtgacccagatcgtgtctgccgaagcctggggcagagccgattgcggatcccagagcttcggcctgctggaccccaagctgtgctacctgctggatggcatcctgttcatctacggcgtgatcctgaccgccctgttcctgagagtgaagttcagcagaagcgccgacgcccctgcctaccagcagggacagaaccaactgtacaacgagctgaacctgggcagacgggaagagtacgacgtgctggacaagcggagaggcagggaccctgagatgggcggaaagccccagcggagaaagaacccccaggaaggactgtataacgaactccagaaagacaagatggccgaagcctacagcgagatcggcatgaagggcgagcggagaagaggcaagggccacgatggcctgtaccagggcctgagcaccgccaccaaggacacctatgacgccctgcacatgcaggccctgcctccaagaagggccaagcgatctggatctggagcaacaaacttctcactactcaaacaagcaggtgacgtggaggagaatcccgggcctactagtatggactggatttggcgcatccttttccttgtcggcgctgctaccggcgcgcattccttcgaacaagttcagctggttcagagcggcgctgaagtgaagaaacctggcagcagcgtgaaggtgtcctgcaaagcaagcggcggcacctttagcagctacggcatctcttgggtccgacaggctcctggacaaggactggaatggatgggctggatcagcgccatcttcggcacagccaattacgcccagaaattccagggccgcgtgacaatcacagccgacgagtctacaagcaccgcctacatggaactgagcagcctgagaagcgaggacaccgccgtgtactattgtgccagaggcgtggcctcctggtatctggattattggggccagggaaccctggtcaccgtgtcatctacgcgtatccagaaccctgatcctgccgtgtaccagctgcgggatagcaagagcagcgacaagagcgtgtgtctgttcaccgacttcgacagccagaccaacgtgtcccagagcaaggactccgacgtgtacatcaccgataagtgcgtgctggacatgcggagcatggacttcaagagcaactccgccgtggcctggtccaacaagtccgatttcgcctgcgccaacgccttcaacaacagcattatccccgaggacacattcttcccaagcagcgacgtgccctgcggtacccagagttttgggttgttggaccctaaattgtgctatctgttggacggaatcctgttcatttacggagtgatcctgaccgcattgttcctgcgggttaagttttccagatccgcagacgcacccgcttaccaacaagggcagaaccaactctacaatgaacttaatttggggcggagggaagagtacgacgttctggacaaaaggaggggacgagatcccgagatgggcggaaagcctcagcgaaggaagaatccgcaagaggggctttataacgaactccagaaagataaaatggcagaagcctatagtgagattgggatgaagggagaaaggaggaggggtaaaggtcacgatgggttgtaccaaggattgagcacagccactaaagatacctatgatgcgctccacatgcaggccctgccgccaaga

SEQ ID NO: 8536 - DNA, 2658 bp, Artificial Sequence
  Synthetic Polynucloetide
atggccttaccagtgaccgccttgctcctgccgctggccttgctgctccacgccgccaggccggacatccagatgacacagagccctagcagcctgtctgccagcgtgggagacagagtgaccatcacctgtagagccagccagagcatcaacaagtggctgaactggtatcagcagaagcccggcaaggcccctaagctgctgatctatgccgccagctctctccagagcggagtgcctagcagattttctggcagcggctccggcaccgatttcaccctgacaatatccagcctccagcctgaggacttcgccacctactactgccagcaggactacaacttcccctacaccttcggccagggcaccaaggtggaaatcaaaagactcgaggggaaaccaattcccaaccctcttctgggactggattcaaccggcagcggcgaggacctgaagaacgtgttcccacctgaggtggccgtgttcgagcctagcgaggccgagatcagccacacccagaaagccaccctcgtgtgcctggctaccggcttctaccccgaccatgtggaactgtcttggtgggtcaacggcaaagaggtgcacagcggcgtgtctaccgacccccagccactgaaagaacagcccgccctgaacgacagccggtactgcctgagcagcagactgagagtgtccgccaccttctggcagaacccccggaaccacttcagatgccaggtgcagttctacggcctgagcgagaacgacgagtggacccaggacagagccaagcccgtgacccagatcgtgtctgccgaagcctggggcagagccgattgcggatcccagagcttcggcctgctggaccccaagctgtgctacctgctggatggcatcctgttcatctacggcgtgatcctgaccgccctgttcctgagagtgaagttcagcagaagcgccgacgcccctgcctaccagcagggacagaaccaactgtacaacgagctgaacctgggcagacgggaagagtacgacgtgctggacaagcggagaggcagggaccctgagatgggcggaaagccccagcggagaaagaacccccaggaaggactgtataacgaactccagaaagacaagatggccgaagcctacagcgagatcggcatgaagggcgagcggagaagaggcaagggccacgatggcctgtaccagggcctgagcaccgccaccaaggacacctatgacgccctgcacatgcaggccctgcctccaagaagggccaagcgatctggatctggagcaacaaacttctcactactcaaacaagcaggtgacgtggaggagaatcccgggcctactagtatggactggatttggcgcatccttttccttgtcggcgctgctaccggcgcgcattccttcgaacaagttcagctggttcagagcggcgctgaagtgaagaaacctggcagcagcgtgaaggtgtcctgcaaagcaagcggcggcacctttagcagctacggcatctcttgggtccgacaggctcctggacaaggactggaatggatgggctggatcagcgccatcttcggcacagccaattacgcccagaaattccagggccgcgtgacaatcacagccgacgagtctacaagcaccgcctacatggaactgagcagcctgagaagcgaggacaccgccgtgtactattgtgccagaggcgtggcctcctggtatctggattattggggccagggaaccctggtcaccgtgtcatctacgcgtgagcagaaactgatctcggaagaggatgggagcggcatccagaaccctgatcctgccgtgtaccagctgcgggatagcaagagcagcgacaagagcgtgtgtctgttcaccgacttcgacagccagaccaacgtgtcccagagcaaggactccgacgtgtacatcaccgataagaccgtgctggacatgcggagcatggacttcaagagcaactccgccgtggcctggtccaacaagtccgatttcgcctgcgccaacgccttcaacaacagcattatccccgaggacacattcttcccaagccccgagagcagctgcggtacccagagttttgggttgttggaccctaaattgtgctatctgttggacggaatcctgttcatttacggagtgatcctgaccgcattgttcctgaggagcaagcggtcacggctgctccacagcgattacatgaatatgacaccacgaagaccgggtcctactcgcaaacactaccaaccctacgcacctccccgcgactttgcagcgtaccgatctcgggttaagttttccagatccgcagacgcacccgcttaccaacaagggcagaaccaactctacaatgaacttaatttggggcggagggaagagtacgacgttctggacaaaaggaggggacgagatcccgagatgggcggaaagcctcagcgaaggaagaatccgcaagaggggctttataacgaactccagaaagataaaatggcagaagcctatagtgagattgggatgaagggagaaaggaggaggggtaaaggtcacgatgggttgtaccaaggattgagcacagccactaaagatacctatgatgcgctccacatgcaggccctgccgccaaga

SEQ ID NO: 8537 - DNA, 2781 bp, Artificial Sequence
  Synthetic Polynucloetide
atggccttaccagtgaccgccttgctcctgccgctggccttgctgctccacgccgccaggccggacatccagatgacacagagccctagcagcctgtctgccagcgtgggagacagagtgaccatcacctgtagagccagccagagcatcaacaagtggctgaactggtatcagcagaagcccggcaaggcccctaagctgctgatctatgccgccagctctctccagagcggagtgcctagcagattttctggcagcggctccggcaccgatttcaccctgacaatatccagcctccagcctgaggacttcgccacctactactgccagcaggactacaacttcccctacaccttcggccagggcaccaaggtggaaatcaaaagactcgaggggaaaccaattcccaaccctcttctgggactggattcaaccggcagcggcgaggacctgaagaacgtgttcccacctgaggtggccgtgttcgagcctagcgaggccgagatcagccacacccagaaagccaccctcgtgtgcctggctaccggcttctaccccgaccatgtggaactgtcttggtgggtcaacggcaaagaggtgcacagcggcgtgtctaccgacccccagccactgaaagaacagcccgccctgaacgacagccggtactgcctgagcagcagactgagagtgtccgccaccttctggcagaacccccggaaccacttcagatgccaggtgcagttctacggcctgagcgagaacgacgagtggacccaggacagagccaagcccgtgacccagatcgtgtctgccgaagcctggggcagagccgattgcggatcccagagcttcggcctgctggaccccaagctgtgctacctgctggatggcatcctgttcatctacggcgtgatcctgaccgccctgttcctgaggagtaagaggagcaggctcctgcacagtgactacatgaacatgactccacgccgccccggacccacccgcaagcattaccagccctatgccccaccacgcgacttcgcagcctatcgctccagagtgaagttcagcagaagcgccgacgcccctgcctaccagcagggacagaaccaactgtacaacgagctgaacctgggcagacgggaagagtacgacgtgctggacaagcggagaggcagggaccctgagatgggcggaaagccccagcggagaaagaacccccaggaaggactgtataacgaactccagaaagacaagatggccgaagcctacagcgagatcggcatgaagggcgagcggagaagaggcaagggccacgatggcctgtaccagggcctgagcaccgccaccaaggacacctatgacgccctgcacatgcaggccctgcctccaagaagggccaagcgatctggatctggagcaacaaacttctcactactcaaacaagcaggtgacgtggaggagaatcccgggcctactagtatggactggatttggcgcatccttttccttgtcggcgctgctaccggcgcgcattccttcgaacaagttcagctggttcagagcggcgctgaagtgaagaaacctggcagcagcgtgaaggtgtcctgcaaagcaagcggcggcacctttagcagctacggcatctcttgggtccgacaggctcctggacaaggactggaatggatgggctggatcagcgccatcttcggcacagccaattacgcccagaaattccagggccgcgtgacaatcacagccgacgagtctacaagcaccgcctacatggaactgagcagcctgagaagcgaggacaccgccgtgtactattgtgccagaggcgtggcctcctggtatctggattattggggccagggaaccctggtcaccgtgtcatctacgcgtgagcagaaactgatctcggaagaggatgggagcggcatccagaaccctgatcctgccgtgtaccagctgcgggatagcaagagcagcgacaagagcgtgtgtctgttcaccgacttcgacagccagaccaacgtgtcccagagcaaggactccgacgtgtacatcaccgataagaccgtgctggacatgcggagcatggacttcaagagcaactccgccgtggcctggtccaacaagtccgatttcgcctgcgccaacgccttcaacaacagcattatccccgaggacacattcttcccaagccccgagagcagctgcggtacccagagttttgggttgttggaccctaaattgtgctatctgttggacggaatcctgttcatttacggagtgatcctgaccgcattgttcctgaggagcaagcggtcacggctgctccacagcgattacatgaatatgacaccacgaagaccgggtcctactcgcaaacactaccaaccctacgcacctccccgcgactttgcagcgtaccgatctcgggttaagttttccagatccgcagacgcacccgcttaccaacaagggcagaaccaactctacaatgaacttaatttggggcggagggaagagtacgacgttctggacaaaaggaggggacgagatcccgagatgggcggaaagcctcagcgaaggaagaatccgcaagaggggctttataacgaactccagaaagataaaatggcagaagcctatagtgagattgggatgaagggagaaaggaggaggggtaaaggtcacgatgggttgtaccaaggattgagcacagccactaaagatacctatgatgcgctccacatgcaggccctgccgccaaga

SEQ ID NO: 8538 - DNA, 2664 bp, Artificial Sequence
  Synthetic Polynucloetide
atggccttaccagtgaccgccttgctcctgccgctggccttgctgctccacgccgccaggccggacatccagatgacacagagccctagcagcctgtctgccagcgtgggagacagagtgaccatcacctgtagagccagccagagcatcaacaagtggctgaactggtatcagcagaagcccggcaaggcccctaagctgctgatctatgccgccagctctctccagagcggagtgcctagcagattttctggcagcggctccggcaccgatttcaccctgacaatatccagcctccagcctgaggacttcgccacctactactgccagcaggactacaacttcccctacaccttcggccagggcaccaaggtggaaatcaaaagactcgaggggaaaccaattcccaaccctcttctgggactggattcaaccggcagcggcgaggacctgaagaacgtgttcccacctgaggtggccgtgttcgagcctagcgaggccgagatcagccacacccagaaagccaccctcgtgtgcctggctaccggcttctaccccgaccatgtggaactgtcttggtgggtcaacggcaaagaggtgcacagcggcgtgtctaccgacccccagccactgaaagaacagcccgccctgaacgacagccggtactgcctgagcagcagactgagagtgtccgccaccttctggcagaacccccggaaccacttcagatgccaggtgcagttctacggcctgagcgagaacgacgagtggacccaggacagagccaagcccgtgacccagatcgtgtctgccgaagcctggggcagagccgattgcggatcccagagcttcggcctgctggaccccaagctgtgctacctgctggatggcatcctgttcatctacggcgtgatcctgaccgccctgttcctgagagtgaagttcagcagaagcgccgacgcccctgcctaccagcagggacagaaccaactgtacaacgagctgaacctgggcagacgggaagagtacgacgtgctggacaagcggagaggcagggaccctgagatgggcggaaagccccagcggagaaagaacccccaggaaggactgtataacgaactccagaaagacaagatggccgaagcctacagcgagatcggcatgaagggcgagcggagaagaggcaagggccacgatggcctgtaccagggcctgagcaccgccaccaaggacacctatgacgccctgcacatgcaggccctgcctccaagaagggccaagcgatctggatctggagcaacaaacttctcactactcaaacaagcaggtgacgtggaggagaatcccgggcctactagtatggactggatttggcgcatccttttccttgtcggcgctgctaccggcgcgcattccttcgaacaagttcagctggttcagagcggcgctgaagtgaagaaacctggcagcagcgtgaaggtgtcctgcaaagcaagcggcggcacctttagcagctacggcatctcttgggtccgacaggctcctggacaaggactggaatggatgggctggatcagcgccatcttcggcacagccaattacgcccagaaattccagggccgcgtgacaatcacagccgacgagtctacaagcaccgcctacatggaactgagcagcctgagaagcgaggacaccgccgtgtactattgtgccagaggcgtggcctcctggtatctggattattggggccagggaaccctggtcaccgtgtcatctacgcgtgagcagaaactgatctcggaagaggatctggggagcggcatccagaaccctgatcctgccgtgtaccagctgcgggatagcaagagcagcgacaagagcgtgtgtctgttcaccgacttcgacagccagaccaacgtgtcccagagcaaggactccgacgtgtacatcaccgataagaccgtgctggacatgcggagcatggacttcaagagcaactccgccgtggcctggtccaacaagtccgatttcgcctgcgccaacgccttcaacaacagcattatccccgaggacacattcttcccaagccccgagagcagctgcggtacccagagttttgggttgttggaccctaaattgtgctatctgttggacggaatcctgttcatttacggagtgatcctgaccgcattgttcctgaagagaggccggaagaagctgctgtacatcttcaagcagcctttcatgcggcccgtgcagaccacccaggaagaggacggctgctcctgccggttccccgaggaagaagaaggcggctgcgagctgcgggttaagttttccagatccgcagacgcacccgcttaccaacaagggcagaaccaactctacaatgaacttaatttggggcggagggaagagtacgacgttctggacaaaaggaggggacgagatcccgagatgggcggaaagcctcagcgaaggaagaatccgcaagaggggctttataacgaactccagaaagataaaatggcagaagcctatagtgagattgggatgaagggagaaaggaggaggggtaaaggtcacgatgggttgtaccaaggattgagcacagccactaaagatacctatgatgcgctccacatgcaggccctgccgccaaga

SEQ ID NO: 8539 - DNA, 2790 bp, Artificial Sequence
  Synthetic Polynucloetide
atggccttaccagtgaccgccttgctcctgccgctggccttgctgctccacgccgccaggccggacatccagatgacacagagccctagcagcctgtctgccagcgtgggagacagagtgaccatcacctgtagagccagccagagcatcaacaagtggctgaactggtatcagcagaagcccggcaaggcccctaagctgctgatctatgccgccagctctctccagagcggagtgcctagcagattttctggcagcggctccggcaccgatttcaccctgacaatatccagcctccagcctgaggacttcgccacctactactgccagcaggactacaacttcccctacaccttcggccagggcaccaaggtggaaatcaaaagactcgaggggaaaccaattcccaaccctcttctgggactggattcaaccggcagcggcgaggacctgaagaacgtgttcccacctgaggtggccgtgttcgagcctagcgaggccgagatcagccacacccagaaagccaccctcgtgtgcctggctaccggcttctaccccgaccatgtggaactgtcttggtgggtcaacggcaaagaggtgcacagcggcgtgtctaccgacccccagccactgaaagaacagcccgccctgaacgacagccggtactgcctgagcagcagactgagagtgtccgccaccttctggcagaacccccggaaccacttcagatgccaggtgcagttctacggcctgagcgagaacgacgagtggacccaggacagagccaagcccgtgacccagatcgtgtctgccgaagcctggggcagagccgattgcggatcccagagcttcggcctgctggaccccaagctgtgctacctgctggatggcatcctgttcatctacggcgtgatcctgaccgccctgttcctgaaacggggcagaaagaaactcctgtatatattcaaacaaccatttatgagaccagtacaaactactcaagaggaagatggctgtagctgccgatttccagaagaagaagaaggaggatgtgaactgagagtgaagttcagcagaagcgccgacgcccctgcctaccagcagggacagaaccaactgtacaacgagctgaacctgggcagacgggaagagtacgacgtgctggacaagcggagaggcagggaccctgagatgggcggaaagccccagcggagaaagaacccccaggaaggactgtataacgaactccagaaagacaagatggccgaagcctacagcgagatcggcatgaagggcgagcggagaagaggcaagggccacgatggcctgtaccagggcctgagcaccgccaccaaggacacctatgacgccctgcacatgcaggccctgcctccaagaagggccaagcgatctggatctggagcaacaaacttctcactactcaaacaagcaggtgacgtggaggagaatcccgggcctactagtatggactggatttggcgcatccttttccttgtcggcgctgctaccggcgcgcattccttcgaacaagttcagctggttcagagcggcgctgaagtgaagaaacctggcagcagcgtgaaggtgtcctgcaaagcaagcggcggcacctttagcagctacggcatctcttgggtccgacaggctcctggacaaggactggaatggatgggctggatcagcgccatcttcggcacagccaattacgcccagaaattccagggccgcgtgacaatcacagccgacgagtctacaagcaccgcctacatggaactgagcagcctgagaagcgaggacaccgccgtgtactattgtgccagaggcgtggcctcctggtatctggattattggggccagggaaccctggtcaccgtgtcatctacgcgtgagcagaaactgatctcggaagaggatctggggagcggcatccagaaccctgatcctgccgtgtaccagctgcgggatagcaagagcagcgacaagagcgtgtgtctgttcaccgacttcgacagccagaccaacgtgtcccagagcaaggactccgacgtgtacatcaccgataagaccgtgctggacatgcggagcatggacttcaagagcaactccgccgtggcctggtccaacaagtccgatttcgcctgcgccaacgccttcaacaacagcattatccccgaggacacattcttcccaagccccgagagcagctgcggtacccagagttttgggttgttggaccctaaattgtgctatctgttggacggaatcctgttcatttacggagtgatcctgaccgcattgttcctgaagagaggccggaagaagctgctgtacatcttcaagcagcctttcatgcggcccgtgcagaccacccaggaagaggacggctgctcctgccggttccccgaggaagaagaaggcggctgcgagctgcgggttaagttttccagatccgcagacgcacccgcttaccaacaagggcagaaccaactctacaatgaacttaatttggggcggagggaagagtacgacgttctggacaaaaggaggggacgagatcccgagatgggcggaaagcctcagcgaaggaagaatccgcaagaggggctttataacgaactccagaaagataaaatggcagaagcctatagtgagattgggatgaagggagaaaggaggaggggtaaaggtcacgatgggttgtaccaaggattgagcacagccactaaagatacctatgatgcgctccacatgcaggccctgccgccaaga

SEQ ID NO: 8540 - DNA, 2463 bp, Artificial Sequence
  Synthetic Polynucloetide
atggccttaccagtgaccgccttgctcctgccgctggccttgctgctccacgccgccaggccggacatccagatgacacagagccctagcagcctgtctgccagcgtgggagacagagtgaccatcacctgtagagccagccagagcatcaacaagtggctgaactggtatcagcagaagcccggcaaggcccctaagctgctgatctatgccgccagctctctccagagcggagtgcctagcagattttctggcagcggctccggcaccgatttcaccctgacaatatccagcctccagcctgaggacttcgccacctactactgccagcaggactacaacttcccctacaccttcggccagggcaccaaggtggaaatcaaaagactcgagcagagcttcggcctgctggaccccaagctgtgctacctgctggatggcatcctgttcatctacggcgtgatcctgaccgccctgttcctgagagtgaagttcagcagaagcgccgacgcccctgcctaccagcagggacagaaccaactgtacaacgagctgaacctgggcagacgggaagagtacgacgtgctggacaagcggagaggcagggaccctgagatgggcggaaagccccagcggagaaagaacccccaggaaggactgtataacgaactccagaaagacaagatggccgaagcctacagcgagatcggcatgaagggcgagcggagaagaggcaagggccacgatggcctgtaccagggcctgagcaccgccaccaaggacacctatgacgccctgcacatgcaggccctgcctccaagaagggccaagcgatctggatctggagcaacaaacttctcactactcaaacaagcaggtgacgtggaggagaatcccgggcctactagtatggactggatttggcgcatccttttccttgtcggcgctgctaccggcgcgcattccttcgaacaagttcagctggttcagagcggcgctgaagtgaagaaacctggcagcagcgtgaaggtgtcctgcaaagcaagcggcggcacctttagcagctacggcatctcttgggtccgacaggctcctggacaaggactggaatggatgggctggatcagcgccatcttcggcacagccaattacgcccagaaattccagggccgcgtgacaatcacagccgacgagtctacaagcaccgcctacatggaactgagcagcctgagaagcgaggacaccgccgtgtactattgtgccagaggcgtggcctcctggtatctggattattggggccagggaaccctggtcaccgtgtcatctacgcgtcagagttttgggttgttggaccctaaattgtgctatctgttggacggaatcctgttcatttacggagtgatcctgaccgcattgttcctgcgggttaagttttccagatccgcagacgcacccgcttaccaacaagggcagaaccaactctacaatgaacttaatttggggcggagggaagagtacgacgttctggacaaaaggaggggacgagatcccgagatgggcggaaagcctcagcgaaggaagaatccgcaagaggggctttataacgaactccagaaagataaaatggcagaagcctatagtgagattgggatgaagggagaaaggaggaggggtaaaggtcacgatgggttgtaccaaggattgagcacagccactaaagatacctatgatgcgctccacatgcaggccctgccgccaagacgcgccaagagaagcggatctggcgtgaagcagaccctgaatttcgacctgctgaagctggctggcgacgtggaatccaacccaggcccttctagaggccatatgaccgagtacaagcccacggtgcgcctcgccacccgcgacgacgtccccagggccgtacgcaccctcgccgccgcgttcgccgactaccccgccacgcgccacaccgtcgatccggaccgccacatcgagcgggtcaccgagctgcaagaactcttcctcacgcgcgtcgggctcgacatcggcaaggtgtgggtcgcggacgacggcgccgcggtggcggtctggaccacgccggagagcgtcgaagcgggggcggtgttcgccgagatcggcccgcgcatggccgagttgagcggttcccggctggccgcgcagcaacagatggaaggcctcctggcgccgcaccggcccaaggagcccgcgtggttcctggccaccgtcggcgtctcgcccgaccaccagggcaagggtctgggcagcgccgtcgtgctccccggagtggaggcggccgagcgcgccggggtgcccgccttcctggagacctccgcgccccgcaacctccccttctacgagcggctcggcttcaccgtcaccgccgacgtcgaggtgcccgaaggaccgcgcacctggtgcatgacccgcaagcccggtgcctga

SEQ ID NO: 8541 - DNA, 1935 bp, Artificial Sequence
  Synthetic Polynucloetide
atggccttaccagtgaccgccttgctcctgccgctggccttgctgctccacgccgccaggccggacatccagatgacacagagccctagcagcctgtctgccagcgtgggagacagagtgaccatcacctgtagagccagccagagcatcaacaagtggctgaactggtatcagcagaagcccggcaaggcccctaagctgctgatctatgccgccagctctctccagagcggagtgcctagcagattttctggcagcggctccggcaccgatttcaccctgacaatatccagcctccagcctgaggacttcgccacctactactgccagcaggactacaacttcccctacaccttcggccagggcaccaaggtggaaatcaaaagactcgagggacagcctaaggccaatcctaccgtgacactgttccctccaagcagcgaagaactccaggccaacaaggccacacttgtgtgcctgatctccgacttctaccctggggctgtgacagtggcttggaaggccgatggatctcctgtgaaagccggcgtggaaaccaccaagccatccaagcagagcaacaacaaatacgccgccagctcctacctgagcctgacacctgagcagtggaagtcccacagatcctacagctgccaagtgacccacgaaggcagcaccgtggaaaagacagtggcccctacagagtgcagccccatcaagaccgatgtgattacaatggaccccaaggacaactgctccaaggacgccaacgataccctgctgctccagctgaccaacaccagcgcctactacatgtacttgttgctgctgctgaagtccgtggtgtacttcgccatcatcacatgctgcctgctgcggagaaccgccttctgctgcaacggcgagaagtctagggccaagcgatctggatctggagcaacaaacttctcactactcaaacaagcaggtgacgtggaggagaatcccgggcctactagtatggactggatttggcgcatccttttccttgtcggcgctgctaccggcgcgcattccttcgaacaagttcagctggttcagagcggcgctgaagtgaagaaacctggcagcagcgtgaaggtgtcctgcaaagcaagcggcggcacctttagcagctacggcatctcttgggtccgacaggctcctggacaaggactggaatggatgggctggatcagcgccatcttcggcacagccaattacgcccagaaattccagggccgcgtgacaatcacagccgacgagtctacaagcaccgcctacatggaactgagcagcctgagaagcgaggacaccgccgtgtactattgtgccagaggcgtggcctcctggtatctggattattggggccagggaaccctggtcaccgtgtcatctacgcgtgcctctacaaagggaccctccgtgtttcctctggctcccagcagcaagtctacaagcggaggaacagccgctctgggctgcctggtcaaggattactttcccgagcctgtgaccgtgtcctggaatagcggagcactgacaagcggcgtgcacacctttccagccgtgctgcaaagcagcggcctgtactctctgagcagcgtggtcacagtgcctagctctagcctgggcacccagacctacatctgcaatgtgaaccacaagcctagcaacaccaaggtggacaagagagtggaacccaagagctgtgaagtgaaaaccgactccaccgaccacgtgaagcccaaagagacagagaacaccaagcagcccagcaagagctgccacaagcccaaggccatcgtgcacaccgagaaagtgaacatgatgagcctgaccgtgctgggcctgcggatgctgttcgccaaaaccgtggccgtgaacttcctgctgaccgccaagctgttcttcctc

SEQ ID NO: 8542 - DNA, 1869 bp, Artificial Sequence
  Synthetic Polynucloetide
atggccttaccagtgaccgccttgctcctgccgctggccttgctgctccacgccgccaggccggacatccagatgacacagagccctagcagcctgtctgccagcgtgggagacagagtgaccatcacctgtagagccagccagagcatcaacaagtggctgaactggtatcagcagaagcccggcaaggcccctaagctgctgatctatgccgccagctctctccagagcggagtgcctagcagattttctggcagcggctccggcaccgatttcaccctgacaatatccagcctccagcctgaggacttcgccacctactactgccagcaggactacaacttcccctacaccttcggccagggcaccaaggtggaaatcaaaagactcgagggacagcctaaggccaatcctaccgtgacactgttccctccaagcagcgaagaactccaggccaacaaggccacacttgtgtgcctgatctccgacttctaccctggggctgtgacagtggcttggaaggccgatggatctcctgtgaaagccggcgtggaaaccaccaagccatccaagcagagcaacaacaaatacgccgccagctcctacctgagcctgacacctgagcagtggaagtcccacagatcctacagctgccaagtgacccacgaaggcagcaccgtggaaaagacagtggcccctacagagtgcagcggcagagccgattgcggcatcaccagcgccagctaccaccagggcgtgctgagcgccaccatcctgtacgagatcctgctgggcaaggccaccctgtacgccgtgctggtgtctgccctggtgctgatggctatggtcaagcggaaggacagccggggaagggccaagcgatctggatctggagcaacaaacttctcactactcaaacaagcaggtgacgtggaggagaatcccgggcctactagtatggactggatttggcgcatccttttccttgtcggcgctgctaccggcgcgcattccttcgaacaagttcagctggttcagagcggcgctgaagtgaagaaacctggcagcagcgtgaaggtgtcctgcaaagcaagcggcggcacctttagcagctacggcatctcttgggtccgacaggctcctggacaaggactggaatggatgggctggatcagcgccatcttcggcacagccaattacgcccagaaattccagggccgcgtgacaatcacagccgacgagtctacaagcaccgcctacatggaactgagcagcctgagaagcgaggacaccgccgtgtactattgtgccagaggcgtggcctcctggtatctggattattggggccagggaaccctggtcaccgtgtcatctacgcgtgcctctacaaagggaccctccgtgtttcctctggctcccagcagcaagtctacaagcggaggaacagccgctctgggctgcctggtcaaggattactttcccgagcctgtgaccgtgtcctggaatagcggagcactgacaagcggcgtgcacacctttccagccgtgctgcaaagcagcggcctgtactctctgagcagcgtggtcacagtgcctagctctagcctgggcacccagacctacatctgcaatgtgaaccacaagcctagcaacaccaaggtggacaagagagtggaacccaagagctgtatccccgaggacacattcttcccaagcagcgacgtgccctgcgacgtgaagctggtggaaaagagcttcgagacagacaccaacctgaacttccagaacctgagcgtgatcggcttcagaatcctgctgctgaaagtggccggctttaacctgctgatgaccctgcggctgtggtccagc

SEQ ID NO: 8543 - DNA, 1869 bp, Artificial Sequence
  Synthetic Polynucloetide
atggccttaccagtgaccgccttgctcctgccgctggccttgctgctccacgccgccaggccggacatccagatgacacagagccctagcagcctgtctgccagcgtgggagacagagtgaccatcacctgtagagccagccagagcatcaacaagtggctgaactggtatcagcagaagcccggcaaggcccctaagctgctgatctatgccgccagctctctccagagcggagtgcctagcagattttctggcagcggctccggcaccgatttcaccctgacaatatccagcctccagcctgaggacttcgccacctactactgccagcaggactacaacttcccctacaccttcggccagggcaccaaggtggaaatcaaaagactcgagggacagcctaaggccaatcctaccgtgacactgttccctccaagcagcgaagaactccaggccaacaaggccacacttgtgtgcctgatctccgacttctaccctggggctgtgacagtggcttggaaggccgatggatctcctgtgaaagccggcgtggaaaccaccaagccatccaagcagagcaacaacaaatacgccgccagctcctacctgagcctgacacctgagcagtggaagtcccacagatcctacagctgccaagtgacccacgaaggcagcaccgtggaaaagacagtggcccctacagagtgcagcggcagagccgattgcggctttaccagcgagagctaccagcagggcgtgctgagcgccaccatcctgtacgagatcctgctgggcaaggccaccctgtacgccgtgctggtgtctgccctggtgctgatggctatggtcaagcggaaggacagccggggaagggccaagcgatctggatctggagcaacaaacttctcactactcaaacaagcaggtgacgtggaggagaatcccgggcctactagtatggactggatttggcgcatccttttccttgtcggcgctgctaccggcgcgcattccttcgaacaagttcagctggttcagagcggcgctgaagtgaagaaacctggcagcagcgtgaaggtgtcctgcaaagcaagcggcggcacctttagcagctacggcatctcttgggtccgacaggctcctggacaaggactggaatggatgggctggatcagcgccatcttcggcacagccaattacgcccagaaattccagggccgcgtgacaatcacagccgacgagtctacaagcaccgcctacatggaactgagcagcctgagaagcgaggacaccgccgtgtactattgtgccagaggcgtggcctcctggtatctggattattggggccagggaaccctggtcaccgtgtcatctacgcgtgcctctacaaagggaccctccgtgtttcctctggctcccagcagcaagtctacaagcggaggaacagccgctctgggctgcctggtcaaggattactttcccgagcctgtgaccgtgtcctggaatagcggagcactgacaagcggcgtgcacacctttccagccgtgctgcaaagcagcggcctgtactctctgagcagcgtggtcacagtgcctagctctagcctgggcacccagacctacatctgcaatgtgaaccacaagcctagcaacaccaaggtggacaagagagtggaacccaagagctgtatccccgaggacacattcttcccaagccccgagagcagctgcgacgtgaagctggtggaaaagagcttcgagacagacaccaacctgaacttccagaacctgagcgtgatcggcttcagaatcctgctgctgaaagtggccggctttaacctgctgatgaccctgcggctgtggtccagc

SEQ ID NO: 8544 - DNA, 1347 bp, Artificial Sequence
  Synthetic Polynucloetide
atggccttaccagtgaccgccttgctcctgccgctggccttgctgctccacgccgccaggccggacatccagatgacacagagccctagcagcctgtctgccagcgtgggagacagagtgaccatcacctgtagagccagccagagcatcaacaagtggctgaactggtatcagcagaagcccggcaaggcccctaagctgctgatctatgccgccagctctctccagagcggagtgcctagcagattttctggcagcggctccggcaccgatttcaccctgacaatatccagcctccagcctgaggacttcgccacctactactgccagcaggactacaacttcccctacaccttcggccagggcaccaaggtggaaatcaaaagaggcggaggcggaagtggaggcggaggatctggcggcggaggctctcaagttcagctggttcagagcggcgctgaagtgaagaaacctggcagcagcgtgaaggtgtcctgcaaagcaagcggcggcacctttagcagctacggcatctcttgggtccgacaggctcctggacaaggactggaatggatgggctggatcagcgccatcttcggcacagccaattacgcccagaaattccagggccgcgtgacaatcacagccgacgagtctacaagcaccgcctacatggaactgagcagcctgagaagcgaggacaccgccgtgtactattgtgccagaggcgtggcctcctggtatctggattattggggccagggaaccctggtcaccgtgtcatctacgcgtgacggtaacgaggagatgggaggaatcactcaaaccccttacaaagtctcaatttcaggaacaactgttatccttacatgtccccagtatcctggcagcgagatcctttggcagcataacgacaagaatatagggggagatgaagacgataagaatatcggatctgacgaggatcacttgagcctgaaagagttctccgagcttgaacaaagcggatattatgtgtgctatccgcgcgggtcaaagccggaagacgctaacttttacctttatctccgagccagagtgtgcgaaaattgcatggaaatggacgttatgtccgttgctacaatagttatcgtagatatatgcatcacgggtggactgcttctgctggtttattattggtccaagaatagaaaggccaaagctaaacccgtgaccagaggcgctggcgcaggcggaaggcaaaggggacaaaacaaagaacggccaccaccagtgccaaatccagattatgagcctattcggaaaggacagagggacctgtactctggcctgaatcagagaagaatc

SEQ ID NO: 8545 - DNA, 1242 bp, Artificial Sequence
  Synthetic Polynucloetide
atggccttaccagtgaccgccttgctcctgccgctggccttgctgctccacgccgccaggccggacatccagatgacacagagccctagcagcctgtctgccagcgtgggagacagagtgaccatcacctgtagagccagccagagcatcaacaagtggctgaactggtatcagcagaagcccggcaaggcccctaagctgctgatctatgccgccagctctctccagagcggagtgcctagcagattttctggcagcggctccggcaccgatttcaccctgacaatatccagcctccagcctgaggacttcgccacctactactgccagcaggactacaacttcccctacaccttcggccagggcaccaaggtggaaatcaaaagaggcggaggcggaagtggaggcggaggatctggcggcggaggctctcaagttcagctggttcagagcggcgctgaagtgaagaaacctggcagcagcgtgaaggtgtcctgcaaagcaagcggcggcacctttagcagctacggcatctcttgggtccgacaggctcctggacaaggactggaatggatgggctggatcagcgccatcttcggcacagccaattacgcccagaaattccagggccgcgtgacaatcacagccgacgagtctacaagcaccgcctacatggaactgagcagcctgagaagcgaggacaccgccgtgtactattgtgccagaggcgtggcctcctggtatctggattattggggccagggaaccctggtcaccgtgtcatctacgcgtttcaagatccccatcgaggaactggaagatcgggtgttcgtgaactgcaacacctctatcacctgggtggaaggcaccgtgggaacactgctgagcgacatcaccagactggacctcggcaagcggattctggaccctcggggcatctacagatgcaacggcaccgacatctacaaggacaaagaaagcaccgtgcaggtccactacagaatgtgccagtcctgcgtggaactggaccctgctacagtggccggcatcatcgtgaccgatgtgatcgctactctgctgctggctctgggagtgttctgcttcgccggacacgaaacaggcagactgtctggcgctgccgatacacaggccctgctgagaaacgaccaagtgtatcagcccctgcgcgacagagatgatgcccagtattctcacctcggcggcaactgggctagaaacaag

SEQ ID NO: 8546 - DNA, 1272 bp, Artificial Sequence
  Synthetic Polynucloetide
atggccttaccagtgaccgccttgctcctgccgctggccttgctgctccacgccgccaggccggacatccagatgacacagagccctagcagcctgtctgccagcgtgggagacagagtgaccatcacctgtagagccagccagagcatcaacaagtggctgaactggtatcagcagaagcccggcaaggcccctaagctgctgatctatgccgccagctctctccagagcggagtgcctagcagattttctggcagcggctccggcaccgatttcaccctgacaatatccagcctccagcctgaggacttcgccacctactactgccagcaggactacaacttcccctacaccttcggccagggcaccaaggtggaaatcaaaagaggcggaggcggaagtggaggcggaggatctggcggcggaggctctcaagttcagctggttcagagcggcgctgaagtgaagaaacctggcagcagcgtgaaggtgtcctgcaaagcaagcggcggcacctttagcagctacggcatctcttgggtccgacaggctcctggacaaggactggaatggatgggctggatcagcgccatcttcggcacagccaattacgcccagaaattccagggccgcgtgacaatcacagccgacgagtctacaagcaccgcctacatggaactgagcagcctgagaagcgaggacaccgccgtgtactattgtgccagaggcgtggcctcctggtatctggattattggggccagggaaccctggtcaccgtgtcatctacgcgtcagagcatcaagggcaaccacctggtcaaggtgtacgactaccaagaggacggcagcgtgctgctgacatgtgatgccgaggccaagaacatcacctggtttaaggacggcaagatgatcggcttcctgaccgaggacaagaagaagtggaacctgggcagcaacgctaaggaccccagaggcatgtatcagtgcaagggcagccagaacaagagcaagcccctccaggtgtactaccggatgtgccagaactgcatcgagctgaacgccgctaccatcagcggctttctgttcgccgagatcgtgtccatcttcgtgctggccgtgggcgtgtactttatcgctggacaggatggcgtgcggcagagcagagcttccgataagcaaaccctgctgcctaacgaccagctgtaccagcctctgaaggacagagaggacgaccagtacagccacctccagggcaatcagctgagaagaaac

SEQ ID NO: 8547 - DNA, 1221 bp, Artificial Sequence
  Synthetic Polynucloetide
atggccttaccagtgaccgccttgctcctgccgctggccttgctgctccacgccgccaggccggacatccagatgacacagagccctagcagcctgtctgccagcgtgggagacagagtgaccatcacctgtagagccagccagagcatcaacaagtggctgaactggtatcagcagaagcccggcaaggcccctaagctgctgatctatgccgccagctctctccagagcggagtgcctagcagattttctggcagcggctccggcaccgatttcaccctgacaatatccagcctccagcctgaggacttcgccacctactactgccagcaggactacaacttcccctacaccttcggccagggcaccaaggtggaaatcaaaagaggcggaggcggaagtggaggcggaggatctggcggcggaggctctcaagttcagctggttcagagcggcgctgaagtgaagaaacctggcagcagcgtgaaggtgtcctgcaaagcaagcggcggcacctttagcagctacggcatctcttgggtccgacaggctcctggacaaggactggaatggatgggctggatcagcgccatcttcggcacagccaattacgcccagaaattccagggccgcgtgacaatcacagccgacgagtctacaagcaccgcctacatggaactgagcagcctgagaagcgaggacaccgccgtgtactattgtgccagaggcgtggcctcctggtatctggattattggggccagggaaccctggtcaccgtgtcatctacgcgtcagagttttgggttgttggaccctaaattgtgctatctgttggacggaatcctgttcatttacggagtgatcctgaccgcattgttcctgcgggttaagttttccagatccgcagacgcacccgcttaccaacaagggcagaaccaactctacaatgaacttaatttggggcggagggaagagtacgacgttctggacaaaaggaggggacgagatcccgagatgggcggaaagcctcagcgaaggaagaatccgcaagaggggctttataacgaactccagaaagataaaatggcagaagcctatagtgagattgggatgaagggagaaaggaggaggggtaaaggtcacgatgggttgtaccaaggattgagcacagccactaaagatacctatgatgcgctccacatgcaggccctgccgccaaga

SEQ ID NO: 8548 - DNA, 1347 bp, Artificial Sequence
  Synthetic Polynucloetide
atggccttaccagtgaccgccttgctcctgccgctggccttgctgctccacgccgccaggccgcaagttcagctggttcagagcggcgctgaagtgaagaaacctggcagcagcgtgaaggtgtcctgcaaagcaagcggcggcacctttagcagctacggcatctcttgggtccgacaggctcctggacaaggactggaatggatgggctggatcagcgccatcttcggcacagccaattacgcccagaaattccagggccgcgtgacaatcacagccgacgagtctacaagcaccgcctacatggaactgagcagcctgagaagcgaggacaccgccgtgtactattgtgccagaggcgtggcctcctggtatctggattattggggccagggaaccctggtcaccgtgtcatctggcggaggcggaagtggaggcggaggatctggcggcggaggctctgacatccagatgacacagagccctagcagcctgtctgccagcgtgggagacagagtgaccatcacctgtagagccagccagagcatcaacaagtggctgaactggtatcagcagaagcccggcaaggcccctaagctgctgatctatgccgccagctctctccagagcggagtgcctagcagattttctggcagcggctccggcaccgatttcaccctgacaatatccagcctccagcctgaggacttcgccacctactactgccagcaggactacaacttcccctacaccttcggccagggcaccaaggtggaaatcaaaagaacgcgtgacggtaacgaggagatgggaggaatcactcaaaccccttacaaagtctcaatttcaggaacaactgttatccttacatgtccccagtatcctggcagcgagatcctttggcagcataacgacaagaatatagggggagatgaagacgataagaatatcggatctgacgaggatcacttgagcctgaaagagttctccgagcttgaacaaagcggatattatgtgtgctatccgcgcgggtcaaagccggaagacgctaacttttacctttatctccgagccagagtgtgcgaaaattgcatggaaatggacgttatgtccgttgctacaatagttatcgtagatatatgcatcacgggtggactgcttctgctggtttattattggtccaagaatagaaaggccaaagctaaacccgtgaccagaggcgctggcgcaggcggaaggcaaaggggacaaaacaaagaacggccaccaccagtgccaaatccagattatgagcctattcggaaaggacagagggacctgtactctggcctgaatcagagaagaatc

SEQ ID NO: 8549 - DNA, 1242 bp, Artificial Sequence
  Synthetic Polynucloetide
atggccttaccagtgaccgccttgctcctgccgctggccttgctgctccacgccgccaggccgcaagttcagctggttcagagcggcgctgaagtgaagaaacctggcagcagcgtgaaggtgtcctgcaaagcaagcggcggcacctttagcagctacggcatctcttgggtccgacaggctcctggacaaggactggaatggatgggctggatcagcgccatcttcggcacagccaattacgcccagaaattccagggccgcgtgacaatcacagccgacgagtctacaagcaccgcctacatggaactgagcagcctgagaagcgaggacaccgccgtgtactattgtgccagaggcgtggcctcctggtatctggattattggggccagggaaccctggtcaccgtgtcatctggcggaggcggaagtggaggcggaggatctggcggcggaggctctgacatccagatgacacagagccctagcagcctgtctgccagcgtgggagacagagtgaccatcacctgtagagccagccagagcatcaacaagtggctgaactggtatcagcagaagcccggcaaggcccctaagctgctgatctatgccgccagctctctccagagcggagtgcctagcagattttctggcagcggctccggcaccgatttcaccctgacaatatccagcctccagcctgaggacttcgccacctactactgccagcaggactacaacttcccctacaccttcggccagggcaccaaggtggaaatcaaaagaacgcgtttcaagatccccatcgaggaactggaagatcgggtgttcgtgaactgcaacacctctatcacctgggtggaaggcaccgtgggaacactgctgagcgacatcaccagactggacctcggcaagcggattctggaccctcggggcatctacagatgcaacggcaccgacatctacaaggacaaagaaagcaccgtgcaggtccactacagaatgtgccagtcctgcgtggaactggaccctgctacagtggccggcatcatcgtgaccgatgtgatcgctactctgctgctggctctgggagtgttctgcttcgccggacacgaaacaggcagactgtctggcgctgccgatacacaggccctgctgagaaacgaccaagtgtatcagcccctgcgcgacagagatgatgcccagtattctcacctcggcggcaactgggctagaaacaag

SEQ ID NO: 8550 - DNA, 1272 bp, Artificial Sequence
  Synthetic Polynucloetide
atggccttaccagtgaccgccttgctcctgccgctggccttgctgctccacgccgccaggccgcaagttcagctggttcagagcggcgctgaagtgaagaaacctggcagcagcgtgaaggtgtcctgcaaagcaagcggcggcacctttagcagctacggcatctcttgggtccgacaggctcctggacaaggactggaatggatgggctggatcagcgccatcttcggcacagccaattacgcccagaaattccagggccgcgtgacaatcacagccgacgagtctacaagcaccgcctacatggaactgagcagcctgagaagcgaggacaccgccgtgtactattgtgccagaggcgtggcctcctggtatctggattattggggccagggaaccctggtcaccgtgtcatctggcggaggcggaagtggaggcggaggatctggcggcggaggctctgacatccagatgacacagagccctagcagcctgtctgccagcgtgggagacagagtgaccatcacctgtagagccagccagagcatcaacaagtggctgaactggtatcagcagaagcccggcaaggcccctaagctgctgatctatgccgccagctctctccagagcggagtgcctagcagattttctggcagcggctccggcaccgatttcaccctgacaatatccagcctccagcctgaggacttcgccacctactactgccagcaggactacaacttcccctacaccttcggccagggcaccaaggtggaaatcaaaagaacgcgtcagagcatcaagggcaaccacctggtcaaggtgtacgactaccaagaggacggcagcgtgctgctgacatgtgatgccgaggccaagaacatcacctggtttaaggacggcaagatgatcggcttcctgaccgaggacaagaagaagtggaacctgggcagcaacgctaaggaccccagaggcatgtatcagtgcaagggcagccagaacaagagcaagcccctccaggtgtactaccggatgtgccagaactgcatcgagctgaacgccgctaccatcagcggctttctgttcgccgagatcgtgtccatcttcgtgctggccgtgggcgtgtactttatcgctggacaggatggcgtgcggcagagcagagcttccgataagcaaaccctgctgcctaacgaccagctgtaccagcctctgaaggacagagaggacgaccagtacagccacctccagggcaatcagctgagaagaaac

SEQ ID NO: 8551 - DNA, 1221 bp, Artificial Sequence
  Synthetic Polynucloetide
atggccttaccagtgaccgccttgctcctgccgctggccttgctgctccacgccgccaggccgcaagttcagctggttcagagcggcgctgaagtgaagaaacctggcagcagcgtgaaggtgtcctgcaaagcaagcggcggcacctttagcagctacggcatctcttgggtccgacaggctcctggacaaggactggaatggatgggctggatcagcgccatcttcggcacagccaattacgcccagaaattccagggccgcgtgacaatcacagccgacgagtctacaagcaccgcctacatggaactgagcagcctgagaagcgaggacaccgccgtgtactattgtgccagaggcgtggcctcctggtatctggattattggggccagggaaccctggtcaccgtgtcatctggcggaggcggaagtggaggcggaggatctggcggcggaggctctgacatccagatgacacagagccctagcagcctgtctgccagcgtgggagacagagtgaccatcacctgtagagccagccagagcatcaacaagtggctgaactggtatcagcagaagcccggcaaggcccctaagctgctgatctatgccgccagctctctccagagcggagtgcctagcagattttctggcagcggctccggcaccgatttcaccctgacaatatccagcctccagcctgaggacttcgccacctactactgccagcaggactacaacttcccctacaccttcggccagggcaccaaggtggaaatcaaaagaacgcgtcagagttttgggttgttggaccctaaattgtgctatctgttggacggaatcctgttcatttacggagtgatcctgaccgcattgttcctgcgggttaagttttccagatccgcagacgcacccgcttaccaacaagggcagaaccaactctacaatgaacttaatttggggcggagggaagagtacgacgttctggacaaaaggaggggacgagatcccgagatgggcggaaagcctcagcgaaggaagaatccgcaagaggggctttataacgaactccagaaagataaaatggcagaagcctatagtgagattgggatgaagggagaaaggaggaggggtaaaggtcacgatgggttgtaccaaggattgagcacagccactaaagatacctatgatgcgctccacatgcaggccctgccgccaaga

SEQ ID NO: 8552 - DNA, 1923 bp, Artificial Sequence
  Synthetic Polynucloetide
atggccttaccagtgaccgccttgctcctgccgctggccttgctgctccacgccgccaggccggacatccagatgacacagagccctagcagcctgtctgccagcgtgggagacagagtgaccatcacctgtagagccagccagagcatcaacaagtggctgaactggtatcagcagaagcccggcaaggcccctaagctgctgatctatgccgccagctctctccagagcggagtgcctagcagattttctggcagcggctccggcaccgatttcaccctgacaatatccagcctccagcctgaggacttcgccacctactactgccagcaggactacaacttcccctacaccttcggccagggcaccaaggtggaaatcaaaagaggcggaggcggaagtggaggcggaggatctggcggcggaggctctcaagttcagctggttcagagcggcgctgaagtgaagaaacctggcagcagcgtgaaggtgtcctgcaaagcaagcggcggcacctttagcagctacggcatctcttgggtccgacaggctcctggacaaggactggaatggatgggctggatcagcgccatcttcggcacagccaattacgcccagaaattccagggccgcgtgacaatcacagccgacgagtctacaagcaccgcctacatggaactgagcagcctgagaagcgaggacaccgccgtgtactattgtgccagaggcgtggcctcctggtatctggattattggggccagggaaccctggtcaccgtgtcatctacgcgtgggagcggcatccagaaccctgatcctgccgtgtaccagctgcgggatagcaagagcagcgacaagagcgtgtgtctgttcaccgacttcgacagccagaccaacgtgtcccagagcaaggactccgacgtgtacatcaccgataagaccgtgctggacatgcggagcatggacttcaagagcaactccgccgtggcctggtccaacaagtccgatttcgcctgcgccaacgccttcaacaacagcattatccccgaggacacattcttcccaagccccgagagcagctgcgacgtgaagctggtggaaaagagcttcgagacagacaccaacctgaacttccagaacctgagcgtgatcggcttcagaatcctgctgctgaaagtggccggctttaacctgctgatgaccctgcggctgtggtccagccgcgccaagagaagcggatctggcgtgaagcagaccctgaatttcgacctgctgaagctggctggcgacgtggaatccaacccaggcccttctagaggccatatgaccgagtacaagcccacggtgcgcctcgccacccgcgacgacgtccccagggccgtacgcaccctcgccgccgcgttcgccgactaccccgccacgcgccacaccgtcgatccggaccgccacatcgagcgggtcaccgagctgcaagaactcttcctcacgcgcgtcgggctcgacatcggcaaggtgtgggtcgcggacgacggcgccgcggtggcggtctggaccacgccggagagcgtcgaagcgggggcggtgttcgccgagatcggcccgcgcatggccgagttgagcggttcccggctggccgcgcagcaacagatggaaggcctcctggcgccgcaccggcccaaggagcccgcgtggttcctggccaccgtcggcgtctcgcccgaccaccagggcaagggtctgggcagcgccgtcgtgctccccggagtggaggcggccgagcgcgccggggtgcccgccttcctggagacctccgcgccccgcaacctccccttctacgagcggctcggcttcaccgtcaccgccgacgtcgaggtgcccgaaggaccgcgcacctggtgcatgacccgcaagcccggtgcctga

SEQ ID NO: 8553 - DNA, 2019 bp, Artificial Sequence
  Synthetic Polynucloetide
atggccttaccagtgaccgccttgctcctgccgctggccttgctgctccacgccgccaggccggacatccagatgacacagagccctagcagcctgtctgccagcgtgggagacagagtgaccatcacctgtagagccagccagagcatcaacaagtggctgaactggtatcagcagaagcccggcaaggcccctaagctgctgatctatgccgccagctctctccagagcggagtgcctagcagattttctggcagcggctccggcaccgatttcaccctgacaatatccagcctccagcctgaggacttcgccacctactactgccagcaggactacaacttcccctacaccttcggccagggcaccaaggtggaaatcaaaagaggcggaggcggaagtggaggcggaggatctggcggcggaggctctcaagttcagctggttcagagcggcgctgaagtgaagaaacctggcagcagcgtgaaggtgtcctgcaaagcaagcggcggcacctttagcagctacggcatctcttgggtccgacaggctcctggacaaggactggaatggatgggctggatcagcgccatcttcggcacagccaattacgcccagaaattccagggccgcgtgacaatcacagccgacgagtctacaagcaccgcctacatggaactgagcagcctgagaagcgaggacaccgccgtgtactattgtgccagaggcgtggcctcctggtatctggattattggggccagggaaccctggtcaccgtgtcatctctcgaggacctgaagaacgtgttcccacctgaggtggccgtgttcgagcctagcgaggccgagatcagccacacccagaaagccaccctcgtgtgcctggctaccggcttctaccccgaccatgtggaactgtcttggtgggtcaacggcaaagaggtgcacagcggcgtgtctaccgacccccagccactgaaagaacagcccgccctgaacgacagccggtactgcctgagcagcagactgagagtgtccgccaccttctggcagaacccccggaaccacttcagatgccaggtgcagttctacggcctgagcgagaacgacgagtggacccaggacagagccaagcccgtgacccagatcgtgtctgccgaagcctggggcagagccgattgcggctttaccagcgagagctaccagcagggcgtgctgagcgccaccatcctgtacgagatcctgctgggcaaggccaccctgtacgccgtgctggtgtctgccctggtgctgatggctatggtcaagcggaaggacagccggggaagggccaagcgatctggatctggagcaacaaacttctcactactcaaacaagcaggtgacgtggaggagaatcccgggcctactagaggccatatgaccgagtacaagcccacggtgcgcctcgccacccgcgacgacgtccccagggccgtacgcaccctcgccgccgcgttcgccgactaccccgccacgcgccacaccgtcgatccggaccgccacatcgagcgggtcaccgagctgcaagaactcttcctcacgcgcgtcgggctcgacatcggcaaggtgtgggtcgcggacgacggcgccgcggtggcggtctggaccacgccggagagcgtcgaagcgggggcggtgttcgccgagatcggcccgcgcatggccgagttgagcggttcccggctggccgcgcagcaacagatggaaggcctcctggcgccgcaccggcccaaggagcccgcgtggttcctggccaccgtcggcgtctcgcccgaccaccagggcaagggtctgggcagcgccgtcgtgctccccggagtggaggcggccgagcgcgccggggtgcccgccttcctggagacctccgcgccccgcaacctccccttctacgagcggctcggcttcaccgtcaccgccgacgtcgaggtgcccgaaggaccgcgcacctggtgcatgacccgcaagcccggtgcctga

SEQ ID NO: 8554 - DNA, 2169 bp, Artificial Sequence
  Synthetic Polynucloetide
atggccttaccagtgaccgccttgctcctgccgctggccttgctgctccacgccgccaggccggacatccagatgacacagagccctagcagcctgtctgccagcgtgggagacagagtgaccatcacctgtagagccagccagagcatcaacaagtggctgaactggtatcagcagaagcccggcaaggcccctaagctgctgatctatgccgccagctctctccagagcggagtgcctagcagattttctggcagcggctccggcaccgatttcaccctgacaatatccagcctccagcctgaggacttcgccacctactactgccagcaggactacaacttcccctacaccttcggccagggcaccaaggtggaaatcaaaagaggcggaggcggaagtggaggcggaggatctggcggcggaggctctcaagttcagctggttcagagcggcgctgaagtgaagaaacctggcagcagcgtgaaggtgtcctgcaaagcaagcggcggcacctttagcagctacggcatctcttgggtccgacaggctcctggacaaggactggaatggatgggctggatcagcgccatcttcggcacagccaattacgcccagaaattccagggccgcgtgacaatcacagccgacgagtctacaagcaccgcctacatggaactgagcagcctgagaagcgaggacaccgccgtgtactattgtgccagaggcgtggcctcctggtatctggattattggggccagggaaccctggtcaccgtgtcatctacgcgtgagcagaaactgatctcggaagaggatctggggagcggcaccccattcccttctctggcccctcccatcatgctgctggtggacggcaagcagcagatggtggtcgtgtgcctggtgctggatgtggccccacctggactggacagccccatctggtttagcgccggcaatggctctgccctggacgcctttacctacggcccaagccctgccaccgatggcacctggacaaatctggcccacctgagcctgcccagcgaggaactggcttcttgggagcctctcgtgtgccacacaggacctggcgctgagggacacagcagatccacccagcctatgcacctgtctggcgaggccagcaccgccagaacctgtcctcaggaacctctgagaggcacccctggcggagcactgtggctgggagtgctgagactgctgctgttcaagctgctgctgtttgacctgctgctgacctgctcctgtctgtgcgatcctgccggccctctgccttctcctgccaccaccacaagactgagagccctgggcagccacagactgcaccctgccacagagacaggcggcagagaggccacaagcagccctagaccccagcccagagacagaagatggggcgataccccccctggcagaaagcctggatctccagtccgcgccaagagaagcggatctggcgtgaagcagaccctgaatttcgacctgctgaagctggctggcgacgtggaatccaacccaggcccttctagatctagaggccatatgaccgagtacaagcccacggtgcgcctcgccacccgcgacgacgtccccagggccgtacgcaccctcgccgccgcgttcgccgactaccccgccacgcgccacaccgtcgatccggaccgccacatcgagcgggtcaccgagctgcaagaactcttcctcacgcgcgtcgggctcgacatcggcaaggtgtgggtcgcggacgacggcgccgcggtggcggtctggaccacgccggagagcgtcgaagcgggggcggtgttcgccgagatcggcccgcgcatggccgagttgagcggttcccggctggccgcgcagcaacagatggaaggcctcctggcgccgcaccggcccaaggagcccgcgtggttcctggccaccgtcggcgtctcgcccgaccaccagggcaagggtctgggcagcgccgtcgtgctccccggagtggaggcggccgagcgcgccggggtgcccgccttcctggagacctccgcgccccgcaacctccccttctacgagcggctcggcttcaccgtcaccgccgacgtcgaggtgcccgaaggaccgcgcacctggtgcatgacccgcaagcccggtgcctga

SEQ ID NO: 8555 - DNA, 1620 bp, Artificial Sequence
  Synthetic Polynucloetide
atggccttaccagtgaccgccttgctcctgccgctggccttgctgctccacgccgccaggccggacatccagatgacacagagccctagcagcctgtctgccagcgtgggagacagagtgaccatcacctgtagagccagccagagcatcaacaagtggctgaactggtatcagcagaagcccggcaaggcccctaagctgctgatctatgccgccagctctctccagagcggagtgcctagcagattttctggcagcggctccggcaccgatttcaccctgacaatatccagcctccagcctgaggacttcgccacctactactgccagcaggactacaacttcccctacaccttcggccagggcaccaaggtggaaatcaaaagactcgaggacctgaagaacgtgttcccacctgaggtggccgtgttcgagcctagcgaggccgagatcagccacacccagaaagccaccctcgtgtgcctggctaccggcttctaccccgaccatgtggaactgtcttggtgggtcaacggcaaagaggtgcacagcggcgtgtctaccgacccccagccactgaaagaacagcccgccctgaacgacagccggtactgcctgagcagcagactgagagtgtccgccaccttctggcagaacccccggaaccacttcagatgccaggtgcagttctacggcctgagcgagaacgacgagtggacccaggacagagccaagcccgtgacccagatcgtgtctgccgaagcctggggcagagccgattgcggctttaccagcgagagctaccagcagggcgtgctgagcgccaccatcctgtacgagatcctgctgggcaaggccaccctgtacgccgtgctggtgtctgccctggtgctgatggctatggtcaagcggaaggacagccggggaagggccaagcgatctggatctggagcaacaaacttctcactactcaaacaagcaggtgacgtggaggagaatcccgggcctactagaggccatatgaccgagtacaagcccacggtgcgcctcgccacccgcgacgacgtccccagggccgtacgcaccctcgccgccgcgttcgccgactaccccgccacgcgccacaccgtcgatccggaccgccacatcgagcgggtcaccgagctgcaagaactcttcctcacgcgcgtcgggctcgacatcggcaaggtgtgggtcgcggacgacggcgccgcggtggcggtctggaccacgccggagagcgtcgaagcgggggcggtgttcgccgagatcggcccgcgcatggccgagttgagcggttcccggctggccgcgcagcaacagatggaaggcctcctggcgccgcaccggcccaaggagcccgcgtggttcctggccaccgtcggcgtctcgcccgaccaccagggcaagggtctgggcagcgccgtcgtgctccccggagtggaggcggccgagcgcgccggggtgcccgccttcctggagacctccgcgccccgcaacctccccttctacgagcggctcggcttcaccgtcaccgccgacgtcgaggtgcccgaaggaccgcgcacctggtgcatgacccgcaagcccggtgcctga

SEQ ID NO: 8556 - DNA, 927 bp, Artificial Sequence
  Synthetic Polynucloetide
atggccttaccagtgaccgccttgctcctgccgctggccttgctgctccacgccgccaggccggacatccagatgacacagagccctagcagcctgtctgccagcgtgggagacagagtgaccatcacctgtagagccagccagagcatcaacaagtggctgaactggtatcagcagaagcccggcaaggcccctaagctgctgatctatgccgccagctctctccagagcggagtgcctagcagattttctggcagcggctccggcaccgatttcaccctgacaatatccagcctccagcctgaggacttcgccacctactactgccagcaggactacaacttcccctacaccttcggccagggcaccaaggtggaaatcaaaagactcgaggacctgaagaacgtgttcccacctgaggtggccgtgttcgagcctagcgaggccgagatcagccacacccagaaagccaccctcgtgtgcctggctaccggcttctaccccgaccatgtggaactgtcttggtgggtcaacggcaaagaggtgcacagcggcgtgtctaccgacccccagccactgaaagaacagcccgccctgaacgacagccggtactgcctgagcagcagactgagagtgtccgccaccttctggcagaacccccggaaccacttcagatgccaggtgcagttctacggcctgagcgagaacgacgagtggacccaggacagagccaagcccgtgacccagatcgtgtctgccgaagcctggggcagagccgattgcggctttaccagcgagagctaccagcagggcgtgctgagcgccaccatcctgtacgagatcctgctgggcaaggccaccctgtacgccgtgctggtgtctgccctggtgctgatggctatggtcaagcggaaggacagccgggga

SEQ ID NO: 8557 - DNA, 1344 bp, Artificial Sequence
  Synthetic Polynucloetide
atggactggatttggcgcatccttttccttgtcggcgctgctaccggcgcgcattccttcgaacaagttcagctggttcagagcggcgctgaagtgaagaaacctggcagcagcgtgaaggtgtcctgcaaagcaagcggcggcacctttagcagctacggcatctcttgggtccgacaggctcctggacaaggactggaatggatgggctggatcagcgccatcttcggcacagccaattacgcccagaaattccagggccgcgtgacaatcacagccgacgagtctacaagcaccgcctacatggaactgagcagcctgagaagcgaggacaccgccgtgtactattgtgccagaggcgtggcctcctggtatctggattattggggccagggaaccctggtcaccgtgtcatctacgcgtatccagaaccctgatcctgccgtgtaccagctgcgggatagcaagagcagcgacaagagcgtgtgtctgttcaccgacttcgacagccagaccaacgtgtcccagagcaaggactccgacgtgtacatcaccgataagaccgtgctggacatgcggagcatggacttcaagagcaactccgccgtggcctggtccaacaagtccgatttcgcctgcgccaacgccttcaacaacagcattatccccgaggacacattcttcccaagccccgagagcagctgcgacgtgaagctggtggaaaagagcttcgagacagacaccaacctgaacttccagaacctgagcgtgatcggcttcagaatcctgctgctgaaagtggccggctttaacctgctgatgaccctgcggctgtggtccagccgcgccaagagaagcggatctggcgtgaagcagaccctgaatttcgacctgctgaagctggctggcgacgtggaatccaacccaggcccttctagaggccatatggccaagcctttgtctcaagaagaatccaccctcattgaaagagcaacggctacaatcaacagcatccccatctctgaagactacagcgtcgccagcgcagctctctctagcgacggccgcatcttcactggtgtcaatgtatatcattttactgggggaccttgtgcagaactcgtggtgctgggcactgctgctgctgcggcagctggcaacctgacttgtatcgtcgcgatcggaaatgagaacaggggcatcttgagcccctgcggacggtgccgacaggtgcttctcgatctgcatcctgggatcaaagccatagtgaaggacagtgatggacagccgacggcagttgggattcgtgaattgctgccctctggttatgtgtgggagggctga

SEQ ID NO: 8558 - DNA, 843 bp, Artificial Sequence
  Synthetic Polynucloetide
atggactggatttggcgcatccttttccttgtcggcgctgctaccggcgcgcattccttcgaacaagttcagctggttcagagcggcgctgaagtgaagaaacctggcagcagcgtgaaggtgtcctgcaaagcaagcggcggcacctttagcagctacggcatctcttgggtccgacaggctcctggacaaggactggaatggatgggctggatcagcgccatcttcggcacagccaattacgcccagaaattccagggccgcgtgacaatcacagccgacgagtctacaagcaccgcctacatggaactgagcagcctgagaagcgaggacaccgccgtgtactattgtgccagaggcgtggcctcctggtatctggattattggggccagggaaccctggtcaccgtgtcatctacgcgtatccagaaccctgatcctgccgtgtaccagctgcgggatagcaagagcagcgacaagagcgtgtgtctgttcaccgacttcgacagccagaccaacgtgtcccagagcaaggactccgacgtgtacatcaccgataagaccgtgctggacatgcggagcatggacttcaagagcaactccgccgtggcctggtccaacaagtccgatttcgcctgcgccaacgccttcaacaacagcattatccccgaggacacattcttcccaagccccgagagcagctgcgacgtgaagctggtggaaaagagcttcgagacagacaccaacctgaacttccagaacctgagcgtgatcggcttcagaatcctgctgctgaaagtggccggctttaacctgctgatgaccctgcggctgtggtccagc

SEQ ID NO: 8559 - DNA, 1674 bp, Artificial Sequence
  Synthetic Polynucloetide
atggccttaccagtgaccgccttgctcctgccgctggccttgctgctccacgccgccaggccggacatccagatgacacagagccctagcagcctgtctgccagcgtgggagacagagtgaccatcacctgtagagccagccagagcatcaacaagtggctgaactggtatcagcagaagcccggcaaggcccctaagctgctgatctatgccgccagctctctccagagcggagtgcctagcagattttctggcagcggctccggcaccgatttcaccctgacaatatccagcctccagcctgaggacttcgccacctactactgccagcaggactacaacttcccctacaccttcggccagggcaccaaggtggaaatcaaaagactcgaggggaaaccaattcccaaccctcttctgggactggattcaaccggcagcggcgaggacctgaagaacgtgttcccacctgaggtggccgtgttcgagcctagcgaggccgagatcagccacacccagaaagccaccctcgtgtgcctggctaccggcttctaccccgaccatgtggaactgtcttggtgggtcaacggcaaagaggtgcacagcggcgtgtgtaccgacccccagccactgaaagaacagcccgccctgaacgacagccggtactgcctgagcagcagactgagagtgtccgccaccttctggcagaacccccggaaccacttcagatgccaggtgcagttctacggcctgagcgagaacgacgagtggacccaggacagagccaagcccgtgacccagatcgtgtctgccgaagcctggggcagagccgattgcggctttaccagcgagagctaccagcagggcgtgctgagcgccaccatcctgtacgagatcctgctgggcaaggccaccctgtacgccgtgctggtgtctgccctggtgctgatggctatggtcaagcggaaggacagccggggaagggccaagcgatctggatctggagcaacaaacttctcactactcaaacaagcaggtgacgtggaggagaatcccgggcctactagaggccatatgaccgagtacaagcccacggtgcgcctcgccacccgcgacgacgtccccagggccgtacgcaccctcgccgccgcgttcgccgactaccccgccacgcgccacaccgtcgatccggaccgccacatcgagcgggtcaccgagctgcaagaactcttcctcacgcgcgtcgggctcgacatcggcaaggtgtgggtcgcggacgacggcgccgcggtggcggtctggaccacgccggagagcgtcgaagcgggggcggtgttcgccgagatcggcccgcgcatggccgagttgagcggttcccggctggccgcgcagcaacagatggaaggcctcctggcgccgcaccggcccaaggagcccgcgtggttcctggccaccgtcggcgtctcgcccgaccaccagggcaagggtctgggcagcgccgtcgtgctccccggagtggaggcggccgagcgcgccggggtgcccgccttcctggagacctccgcgccccgcaacctccccttctacgagcggctcggcttcaccgtcaccgccgacgtcgaggtgcccgaaggaccgcgcacctggtgcatgacccgcaagcccggtgcctga

SEQ ID NO: 8560 - DNA, 984 bp, Artificial Sequence
  Synthetic Polynucloetide
atggccttaccagtgaccgccttgctcctgccgctggccttgctgctccacgccgccaggccggacatccagatgacacagagccctagcagcctgtctgccagcgtgggagacagagtgaccatcacctgtagagccagccagagcatcaacaagtggctgaactggtatcagcagaagcccggcaaggcccctaagctgctgatctatgccgccagctctctccagagcggagtgcctagcagattttctggcagcggctccggcaccgatttcaccctgacaatatccagcctccagcctgaggacttcgccacctactactgccagcaggactacaacttcccctacaccttcggccagggcaccaaggtggaaatcaaaagactcgaggggaaaccaattcccaaccctcttctgggactggattcaaccggcagcggcgaggacctgaagaacgtgttcccacctgaggtggccgtgttcgagcctagcgaggccgagatcagccacacccagaaagccaccctcgtgtgcctggctaccggcttctaccccgaccatgtggaactgtcttggtgggtcaacggcaaagaggtgcacagcggcgtgtgtaccgacccccagccactgaaagaacagcccgccctgaacgacagccggtactgcctgagcagcagactgagagtgtccgccaccttctggcagaacccccggaaccacttcagatgccaggtgcagttctacggcctgagcgagaacgacgagtggacccaggacagagccaagcccgtgacccagatcgtgtctgccgaagcctggggcagagccgattgcggctttaccagcgagagctaccagcagggcgtgctgagcgccaccatcctgtacgagatcctgctgggcaaggccaccctgtacgccgtgctggtgtctgccctggtgctgatggctatggtcaagcggaaggacagccggggatga

SEQ ID NO: 8561 - DNA, 1380 bp, Artificial Sequence
  Synthetic Polynucloetide
atggactggatttggcgcatccttttccttgtcggcgctgctaccggcgcgcattccttcgaacaagttcagctggttcagagcggcgctgaagtgaagaaacctggcagcagcgtgaaggtgtcctgcaaagcaagcggcggcacctttagcagctacggcatctcttgggtccgacaggctcctggacaaggactggaatggatgggctggatcagcgccatcttcggcacagccaattacgcccagaaattccagggccgcgtgacaatcacagccgacgagtctacaagcaccgcctacatggaactgagcagcctgagaagcgaggacaccgccgtgtactattgtgccagaggcgtggcctcctggtatctggattattggggccagggaaccctggtcaccgtgtcatctacgcgtgagcagaaactgatctcggaagaggatgggagcggcatccagaaccctgatcctgccgtgtaccagctgcgggatagcaagagcagcgacaagagcgtgtgtctgttcaccgacttcgacagccagaccaacgtgtcccagagcaaggactccgacgtgtacatcaccgataagtgcgtgctggacatgcggagcatggacttcaagagcaactccgccgtggcctggtccaacaagtccgatttcgcctgcgccaacgccttcaacaacagcattatccccgaggacacattcttcccaagccccgagagcagctgcgacgtgaagctggtggaaaagagcttcgagacagacaccaacctgaacttccagaacctgagcgtgatcggcttcagaatcctgctgctgaaagtggccggctttaacctgctgatgaccctgcggctgtggtccagccgcgccaagagaagcggatctggcgtgaagcagaccctgaatttcgacctgctgaagctggctggcgacgtggaatccaacccaggcccttctagaggccatatggccaagcctttgtctcaagaagaatccaccctcattgaaagagcaacggctacaatcaacagcatccccatctctgaagactacagcgtcgccagcgcagctctctctagcgacggccgcatcttcactggtgtcaatgtatatcattttactgggggaccttgtgcagaactcgtggtgctgggcactgctgctgctgcggcagctggcaacctgacttgtatcgtcgcgatcggaaatgagaacaggggcatcttgagcccctgcggacggtgccgacaggtgcttctcgatctgcatcctgggatcaaagccatagtgaaggacagtgatggacagccgacggcagttgggattcgtgaattgctgccctctggttatgtgtgggagggctga

SEQ ID NO: 8562 - DNA, 882 bp, Artificial Sequence
  Synthetic Polynucloetide
atggactggatttggcgcatccttttccttgtcggcgctgctaccggcgcgcattccttcgaacaagttcagctggttcagagcggcgctgaagtgaagaaacctggcagcagcgtgaaggtgtcctgcaaagcaagcggcggcacctttagcagctacggcatctcttgggtccgacaggctcctggacaaggactggaatggatgggctggatcagcgccatcttcggcacagccaattacgcccagaaattccagggccgcgtgacaatcacagccgacgagtctacaagcaccgcctacatggaactgagcagcctgagaagcgaggacaccgccgtgtactattgtgccagaggcgtggcctcctggtatctggattattggggccagggaaccctggtcaccgtgtcatctacgcgtgagcagaaactgatctcggaagaggatgggagcggcatccagaaccctgatcctgccgtgtaccagctgcgggatagcaagagcagcgacaagagcgtgtgtctgttcaccgacttcgacagccagaccaacgtgtcccagagcaaggactccgacgtgtacatcaccgataagtgcgtgctggacatgcggagcatggacttcaagagcaactccgccgtggcctggtccaacaagtccgatttcgcctgcgccaacgccttcaacaacagcattatccccgaggacacattcttcccaagccccgagagcagctgcgacgtgaagctggtggaaaagagcttcgagacagacaccaacctgaacttccagaacctgagcgtgatcggcttcagaatcctgctgctgaaagtggccggctttaacctgctgatgaccctgcggctgtggtccagctga

SEQ ID NO: 8563 - DNA, 1923 bp, Artificial Sequence
  Synthetic Polynucloetide
atggccttaccagtgaccgccttgctcctgccgctggccttgctgctccacgccgccaggccggacatccagatgacacagagccctagcagcctgtctgccagcgtgggagacagagtgaccatcacctgtagagccagccagagcatcaacaagtggctgaactggtatcagcagaagcccggcaaggcccctaagctgctgatctatgccgccagctctctccagagcggagtgcctagcagattttctggcagcggctccggcaccgatttcaccctgacaatatccagcctccagcctgaggacttcgccacctactactgccagcaggactacaacttcccctacaccttcggccagggcaccaaggtggaaatcaaaagaggcggaggcggaagtggaggcggaggatctggcggcggaggctctcaagttcagctggttcagagcggcgctgaagtgaagaaacctggcagcagcgtgaaggtgtcctgcaaagcaagcggcggcacctttagcagctacggcatctcttgggtccgacaggctcctggacaaggactggaatggatgggctggatcagcgccatcttcggcacagccaattacgcccagaaattccagggccgcgtgacaatcacagccgacgagtctacaagcaccgcctacatggaactgagcagcctgagaagcgaggacaccgccgtgtactattgtgccagaggcgtggcctcctggtatctggattattggggccagggaaccctggtcaccgtgtcatctacgcgtgggagcggcatccagaaccctgatcctgccgtgtaccagctgcgggatagcaagagcagcgacaagagcgtgtgtctgttcaccgacttcgacagccagaccaacgtgtcccagagcaaggactccgacgtgtacatcaccgataagaccgtgctggacatgcggagcatggacttcaagagcaactccgccgtggcctggtccaacaagtccgatttcgcctgcgccaacgccttcaacaacagcattatccccgaggacacattcttcccaagcagcgacgtgccctgcgacgtgaagctggtggaaaagagcttcgagacagacaccaacctgaacttccagaacctgagcgtgatcggcttcagaatcctgctgctgaaagtggccggctttaacctgctgatgaccctgcggctgtggtccagccgcgccaagagaagcggatctggcgtgaagcagaccctgaatttcgacctgctgaagctggctggcgacgtggaatccaacccaggcccttctagaggccatatgaccgagtacaagcccacggtgcgcctcgccacccgcgacgacgtccccagggccgtacgcaccctcgccgccgcgttcgccgactaccccgccacgcgccacaccgtcgatccggaccgccacatcgagcgggtcaccgagctgcaagaactcttcctcacgcgcgtcgggctcgacatcggcaaggtgtgggtcgcggacgacggcgccgcggtggcggtctggaccacgccggagagcgtcgaagcgggggcggtgttcgccgagatcggcccgcgcatggccgagttgagcggttcccggctggccgcgcagcaacagatggaaggcctcctggcgccgcaccggcccaaggagcccgcgtggttcctggccaccgtcggcgtctcgcccgaccaccagggcaagggtctgggcagcgccgtcgtgctccccggagtggaggcggccgagcgcgccggggtgcccgccttcctggagacctccgcgccccgcaacctccccttctacgagcggctcggcttcaccgtcaccgccgacgtcgaggtgcccgaaggaccgcgcacctggtgcatgacccgcaagcccggtgcctga

SEQ ID NO: 8564 - DNA, 2019 bp, Artificial Sequence
  Synthetic Polynucloetide
atggccttaccagtgaccgccttgctcctgccgctggccttgctgctccacgccgccaggccggacatccagatgacacagagccctagcagcctgtctgccagcgtgggagacagagtgaccatcacctgtagagccagccagagcatcaacaagtggctgaactggtatcagcagaagcccggcaaggcccctaagctgctgatctatgccgccagctctctccagagcggagtgcctagcagattttctggcagcggctccggcaccgatttcaccctgacaatatccagcctccagcctgaggacttcgccacctactactgccagcaggactacaacttcccctacaccttcggccagggcaccaaggtggaaatcaaaagaggcggaggcggaagtggaggcggaggatctggcggcggaggctctcaagttcagctggttcagagcggcgctgaagtgaagaaacctggcagcagcgtgaaggtgtcctgcaaagcaagcggcggcacctttagcagctacggcatctcttgggtccgacaggctcctggacaaggactggaatggatgggctggatcagcgccatcttcggcacagccaattacgcccagaaattccagggccgcgtgacaatcacagccgacgagtctacaagcaccgcctacatggaactgagcagcctgagaagcgaggacaccgccgtgtactattgtgccagaggcgtggcctcctggtatctggattattggggccagggaaccctggtcaccgtgtcatctctcgaggacctgaagaacgtgttcccacctgaggtggccgtgttcgagcctagcaaggccgagatcgcccacacccagaaagccaccctcgtgtgcctggctaccggcttctaccccgaccatgtggaactgtcttggtgggtcaacggcaaagaggtgcacagcggcgtgtctaccgacccccagccactgaaagaacagcccgccctgaacgacagccggtactgcctgagcagcagactgagagtgtccgccaccttctggcagaacccccggaaccacttcagatgccaggtgcagttctacggcctgagcgagaacgacgagtggacccaggacagagccaagcccgtgacccagatcgtgtctgccgaagcctggggcagagccgattgcggcatcaccagcgccagctaccaccagggcgtgctgagcgccaccatcctgtacgagatcctgctgggcaaggccaccctgtacgccgtgctggtgtctgccctggtgctgatggctatggtcaagcggaaggacagccggggaagggccaagcgatctggatctggagcaacaaacttctcactactcaaacaagcaggtgacgtggaggagaatcccgggcctactagaggccatatgaccgagtacaagcccacggtgcgcctcgccacccgcgacgacgtccccagggccgtacgcaccctcgccgccgcgttcgccgactaccccgccacgcgccacaccgtcgatccggaccgccacatcgagcgggtcaccgagctgcaagaactcttcctcacgcgcgtcgggctcgacatcggcaaggtgtgggtcgcggacgacggcgccgcggtggcggtctggaccacgccggagagcgtcgaagcgggggcggtgttcgccgagatcggcccgcgcatggccgagttgagcggttcccggctggccgcgcagcaacagatggaaggcctcctggcgccgcaccggcccaaggagcccgcgtggttcctggccaccgtcggcgtctcgcccgaccaccagggcaagggtctgggcagcgccgtcgtgctccccggagtggaggcggccgagcgcgccggggtgcccgccttcctggagacctccgcgccccgcaacctccccttctacgagcggctcggcttcaccgtcaccgccgacgtcgaggtgcccgaaggaccgcgcacctggtgcatgacccgcaagcccggtgcctga

SEQ ID NO: 8565 - DNA, 2088 bp, Artificial Sequence
  Synthetic Polynucloetide
atggccttaccagtgaccgccttgctcctgccgctggccttgctgctccacgccgccaggccggacatccagatgacacagagccctagcagcctgtctgccagcgtgggagacagagtgaccatcacctgtagagccagccagagcatcaacaagtggctgaactggtatcagcagaagcccggcaaggcccctaagctgctgatctatgccgccagctctctccagagcggagtgcctagcagattttctggcagcggctccggcaccgatttcaccctgacaatatccagcctccagcctgaggacttcgccacctactactgccagcaggactacaacttcccctacaccttcggccagggcaccaaggtggaaatcaaaagaggcggaggcggaagtggaggcggaggatctggcggcggaggctctcaagttcagctggttcagagcggcgctgaagtgaagaaacctggcagcagcgtgaaggtgtcctgcaaagcaagcggcggcacctttagcagctacggcatctcttgggtccgacaggctcctggacaaggactggaatggatgggctggatcagcgccatcttcggcacagccaattacgcccagaaattccagggccgcgtgacaatcacagccgacgagtctacaagcaccgcctacatggaactgagcagcctgagaagcgaggacaccgccgtgtactattgtgccagaggcgtggcctcctggtatctggattattggggccagggaaccctggtcaccgtgtcatctacgcgtgggtctggaggcggaggcagcggcggaggcgggagcggcgacggtaacgaggagatgggaggaatcactcaaaccccttacaaagtctcaatttcaggaacaactgttatccttacatgtccccagtatcctggcagcgagatcctttggcagcataacgacaagaatatagggggagatgaagacgataagaatatcggatctgacgaggatcacttgagcctgaaagagttctccgagcttgaacaaagcggatattatgtgtgctatccgcgcgggtcaaagccggaagacgctaacttttacctttatctccgagccagagtgtgcgaaaattgcatggaaatggacgttatgtccgttgctacaatagttatcgtagatatatgcatcacgggtggactgcttctgctggtttattattggtccaagaatagaaaggccaaagctaaacccgtgaccagaggcgctggcgcaggcggaaggcaaaggggacaaaacaaagaacggccaccaccagtgccaaatccagattatgagcctattcggaaaggacagagggacctgtactctggcctgaatcagagaagaatccgcgccaagagaagcggatctggcgtgaagcagaccctgaatttcgacctgctgaagctggctggcgacgtggaatccaacccaggcccttctagaggccatatgaccgagtacaagcccacggtgcgcctcgccacccgcgacgacgtccccagggccgtacgcaccctcgccgccgcgttcgccgactaccccgccacgcgccacaccgtcgatccggaccgccacatcgagcgggtcaccgagctgcaagaactcttcctcacgcgcgtcgggctcgacatcggcaaggtgtgggtcgcggacgacggcgccgcggtggcggtctggaccacgccggagagcgtcgaagcgggggcggtgttcgccgagatcggcccgcgcatggccgagttgagcggttcccggctggccgcgcagcaacagatggaaggcctcctggcgccgcaccggcccaaggagcccgcgtggttcctggccaccgtcggcgtctcgcccgaccaccagggcaagggtctgggcagcgccgtcgtgctccccggagtggaggcggccgagcgcgccggggtgcccgccttcctggagacctccgcgccccgcaacctccccttctacgagcggctcggcttcaccgtcaccgccgacgtcgaggtgcccgaaggaccgcgcacctggtgcatgacccgcaagcccggtgcctga

SEQ ID NO: 8566 - DNA, 1983 bp, Artificial Sequence
  Synthetic Polynucloetide
atggccttaccagtgaccgccttgctcctgccgctggccttgctgctccacgccgccaggccggacatccagatgacacagagccctagcagcctgtctgccagcgtgggagacagagtgaccatcacctgtagagccagccagagcatcaacaagtggctgaactggtatcagcagaagcccggcaaggcccctaagctgctgatctatgccgccagctctctccagagcggagtgcctagcagattttctggcagcggctccggcaccgatttcaccctgacaatatccagcctccagcctgaggacttcgccacctactactgccagcaggactacaacttcccctacaccttcggccagggcaccaaggtggaaatcaaaagaggcggaggcggaagtggaggcggaggatctggcggcggaggctctcaagttcagctggttcagagcggcgctgaagtgaagaaacctggcagcagcgtgaaggtgtcctgcaaagcaagcggcggcacctttagcagctacggcatctcttgggtccgacaggctcctggacaaggactggaatggatgggctggatcagcgccatcttcggcacagccaattacgcccagaaattccagggccgcgtgacaatcacagccgacgagtctacaagcaccgcctacatggaactgagcagcctgagaagcgaggacaccgccgtgtactattgtgccagaggcgtggcctcctggtatctggattattggggccagggaaccctggtcaccgtgtcatctacgcgtgggtctggaggcggaggcagcggcggaggcgggagcggcttcaagatccccatcgaggaactggaagatcgggtgttcgtgaactgcaacacctctatcacctgggtggaaggcaccgtgggaacactgctgagcgacatcaccagactggacctcggcaagcggattctggaccctcggggcatctacagatgcaacggcaccgacatctacaaggacaaagaaagcaccgtgcaggtccactacagaatgtgccagtcctgcgtggaactggaccctgctacagtggccggcatcatcgtgaccgatgtgatcgctactctgctgctggctctgggagtgttctgcttcgccggacacgaaacaggcagactgtctggcgctgccgatacacaggccctgctgagaaacgaccaagtgtatcagcccctgcgcgacagagatgatgcccagtattctcacctcggcggcaactgggctagaaacaagcgcgccaagagaagcggatctggcgtgaagcagaccctgaatttcgacctgctgaagctggctggcgacgtggaatccaacccaggcccttctagaggccatatgaccgagtacaagcccacggtgcgcctcgccacccgcgacgacgtccccagggccgtacgcaccctcgccgccgcgttcgccgactaccccgccacgcgccacaccgtcgatccggaccgccacatcgagcgggtcaccgagctgcaagaactcttcctcacgcgcgtcgggctcgacatcggcaaggtgtgggtcgcggacgacggcgccgcggtggcggtctggaccacgccggagagcgtcgaagcgggggcggtgttcgccgagatcggcccgcgcatggccgagttgagcggttcccggctggccgcgcagcaacagatggaaggcctcctggcgccgcaccggcccaaggagcccgcgtggttcctggccaccgtcggcgtctcgcccgaccaccagggcaagggtctgggcagcgccgtcgtgctccccggagtggaggcggccgagcgcgccggggtgcccgccttcctggagacctccgcgccccgcaacctccccttctacgagcggctcggcttcaccgtcaccgccgacgtcgaggtgcccgaaggaccgcgcacctggtgcatgacccgcaagcccggtgcctga

SEQ ID NO: 8567 - DNA, 2013 bp, Artificial Sequence
  Synthetic Polynucloetide
atggccttaccagtgaccgccttgctcctgccgctggccttgctgctccacgccgccaggccggacatccagatgacacagagccctagcagcctgtctgccagcgtgggagacagagtgaccatcacctgtagagccagccagagcatcaacaagtggctgaactggtatcagcagaagcccggcaaggcccctaagctgctgatctatgccgccagctctctccagagcggagtgcctagcagattttctggcagcggctccggcaccgatttcaccctgacaatatccagcctccagcctgaggacttcgccacctactactgccagcaggactacaacttcccctacaccttcggccagggcaccaaggtggaaatcaaaagaggcggaggcggaagtggaggcggaggatctggcggcggaggctctcaagttcagctggttcagagcggcgctgaagtgaagaaacctggcagcagcgtgaaggtgtcctgcaaagcaagcggcggcacctttagcagctacggcatctcttgggtccgacaggctcctggacaaggactggaatggatgggctggatcagcgccatcttcggcacagccaattacgcccagaaattccagggccgcgtgacaatcacagccgacgagtctacaagcaccgcctacatggaactgagcagcctgagaagcgaggacaccgccgtgtactattgtgccagaggcgtggcctcctggtatctggattattggggccagggaaccctggtcaccgtgtcatctacgcgtgggtctggaggcggaggcagcggcggaggcgggagcggccagagcatcaagggcaaccacctggtcaaggtgtacgactaccaagaggacggcagcgtgctgctgacatgtgatgccgaggccaagaacatcacctggtttaaggacggcaagatgatcggcttcctgaccgaggacaagaagaagtggaacctgggcagcaacgctaaggaccccagaggcatgtatcagtgcaagggcagccagaacaagagcaagcccctccaggtgtactaccggatgtgccagaactgcatcgagctgaacgccgctaccatcagcggctttctgttcgccgagatcgtgtccatcttcgtgctggccgtgggcgtgtactttatcgctggacaggatggcgtgcggcagagcagagcttccgataagcaaaccctgctgcctaacgaccagctgtaccagcctctgaaggacagagaggacgaccagtacagccacctccagggcaatcagctgagaagaaaccgcgccaagagaagcggatctggcgtgaagcagaccctgaatttcgacctgctgaagctggctggcgacgtggaatccaacccaggcccttctagaggccatatgaccgagtacaagcccacggtgcgcctcgccacccgcgacgacgtccccagggccgtacgcaccctcgccgccgcgttcgccgactaccccgccacgcgccacaccgtcgatccggaccgccacatcgagcgggtcaccgagctgcaagaactcttcctcacgcgcgtcgggctcgacatcggcaaggtgtgggtcgcggacgacggcgccgcggtggcggtctggaccacgccggagagcgtcgaagcgggggcggtgttcgccgagatcggcccgcgcatggccgagttgagcggttcccggctggccgcgcagcaacagatggaaggcctcctggcgccgcaccggcccaaggagcccgcgtggttcctggccaccgtcggcgtctcgcccgaccaccagggcaagggtctgggcagcgccgtcgtgctccccggagtggaggcggccgagcgcgccggggtgcccgccttcctggagacctccgcgccccgcaacctccccttctacgagcggctcggcttcaccgtcaccgccgacgtcgaggtgcccgaaggaccgcgcacctggtgcatgacccgcaagcccggtgcctga

SEQ ID NO: 8568 - DNA, 1962 bp, Artificial Sequence
  Synthetic Polynucloetide
atggccttaccagtgaccgccttgctcctgccgctggccttgctgctccacgccgccaggccggacatccagatgacacagagccctagcagcctgtctgccagcgtgggagacagagtgaccatcacctgtagagccagccagagcatcaacaagtggctgaactggtatcagcagaagcccggcaaggcccctaagctgctgatctatgccgccagctctctccagagcggagtgcctagcagattttctggcagcggctccggcaccgatttcaccctgacaatatccagcctccagcctgaggacttcgccacctactactgccagcaggactacaacttcccctacaccttcggccagggcaccaaggtggaaatcaaaagaggcggaggcggaagtggaggcggaggatctggcggcggaggctctcaagttcagctggttcagagcggcgctgaagtgaagaaacctggcagcagcgtgaaggtgtcctgcaaagcaagcggcggcacctttagcagctacggcatctcttgggtccgacaggctcctggacaaggactggaatggatgggctggatcagcgccatcttcggcacagccaattacgcccagaaattccagggccgcgtgacaatcacagccgacgagtctacaagcaccgcctacatggaactgagcagcctgagaagcgaggacaccgccgtgtactattgtgccagaggcgtggcctcctggtatctggattattggggccagggaaccctggtcaccgtgtcatctacgcgtgggtctggaggcggaggcagcggcggaggcgggagcggccagagttttgggttgttggaccctaaattgtgctatctgttggacggaatcctgttcatttacggagtgatcctgaccgcattgttcctgcgggttaagttttccagatccgcagacgcacccgcttaccaacaagggcagaaccaactctacaatgaacttaatttggggcggagggaagagtacgacgttctggacaaaaggaggggacgagatcccgagatgggcggaaagcctcagcgaaggaagaatccgcaagaggggctttataacgaactccagaaagataaaatggcagaagcctatagtgagattgggatgaagggagaaaggaggaggggtaaaggtcacgatgggttgtaccaaggattgagcacagccactaaagatacctatgatgcgctccacatgcaggccctgccgccaagacgcgccaagagaagcggatctggcgtgaagcagaccctgaatttcgacctgctgaagctggctggcgacgtggaatccaacccaggcccttctagaggccatatgaccgagtacaagcccacggtgcgcctcgccacccgcgacgacgtccccagggccgtacgcaccctcgccgccgcgttcgccgactaccccgccacgcgccacaccgtcgatccggaccgccacatcgagcgggtcaccgagctgcaagaactcttcctcacgcgcgtcgggctcgacatcggcaaggtgtgggtcgcggacgacggcgccgcggtggcggtctggaccacgccggagagcgtcgaagcgggggcggtgttcgccgagatcggcccgcgcatggccgagttgagcggttcccggctggccgcgcagcaacagatggaaggcctcctggcgccgcaccggcccaaggagcccgcgtggttcctggccaccgtcggcgtctcgcccgaccaccagggcaagggtctgggcagcgccgtcgtgctccccggagtggaggcggccgagcgcgccggggtgcccgccttcctggagacctccgcgccccgcaacctccccttctacgagcggctcggcttcaccgtcaccgccgacgtcgaggtgcccgaaggaccgcgcacctggtgcatgacccgcaagcccggtgcctga

SEQ ID NO: 8569 - DNA, 2262 bp, Artificial Sequence
  Synthetic Polynucloetide
atggccttaccagtgaccgccttgctcctgccgctggccttgctgctccacgccgccaggccggaagtgcagctggttgaatctggcggaggactggttcagcctggcggatctctgagactgtcttgtgccgccagcggcttcagcttcagcgacttttggatgagctgggtccgacaggcccctggcaaaggacttgaatgggtcgccacaatcagccaggccggcagcgagaaggactacgtggactctgtgaagggcagattcaccatcagccgggacaacgccaagaagtccctgtacctccagatgaacagcctgagagccgaggacaccgccgtgtactattgtgcctctggcgtgtacagcttcgactacagaggccagggcaccctggtcacagtctcttctggtaccggcggaggcggatctggcggcggaggtagcggtggcggaggatctgaattcgacatccagatgacacagagccctagcagcctgtctgccagcgtgggagacagagtgaccatcacctgtagagccagccagagcatcaacaagtggctgaactggtatcagcagaagcccggcaaggcccctaagctgctgatctatgccgccagctctctccagagcggagtgcctagcagattttctggcagcggctccggcaccgatttcaccctgacaatatccagcctccagcctgaggacttcgccacctactactgccagcaggactacaacttcccctacaccttcggccagggcaccaaggtggaaatcaaaagactcgaggacctgaagaacgtgttcccacctgaggtggccgtgttcgagcctagcgaggccgagatcagccacacccagaaagccaccctcgtgtgcctggctaccggcttctaccccgaccatgtggaactgtcttggtgggtcaacggcaaagaggtgcacagcggcgtgtgtaccgacccccagccactgaaagaacagcccgccctgaacgacagccggtactgcctgagcagcagactgagagtgtccgccaccttctggcagaacccccggaaccacttcagatgccaggtgcagttctacggcctgagcgagaacgacgagtggacccaggacagagccaagcccgtgacccagatcgtgtctgccgaagcctggggcagagccgattgcggctttaccagcgagagctaccagcagggcgtgctgagcgccaccatcctgtacgagatcctgctgggcaaggccaccctgtacgccgtgctggtgtctgccctggtgctgatggctatggtcaagcggaaggacagccggggaagggccaagcgatctggatctggagcaacaaacttctcactactcaaacaagcaggtgacgtggaggagaatcccgggcctactagtatggactggatttggcgcatccttttccttgtcggcgctgctaccggcgcgcattccttcgaacaagttcagctggttcagagcggcgctgaagtgaagaaacctggcagcagcgtgaaggtgtcctgcaaagcaagcggcggcacctttagcagctacggcatctcttgggtccgacaggctcctggacaaggactggaatggatgggctggatcagcgccatcttcggcacagccaattacgcccagaaattccagggccgcgtgacaatcacagccgacgagtctacaagcaccgcctacatggaactgagcagcctgagaagcgaggacaccgccgtgtactattgtgccagaggcgtggcctcctggtatctggattattggggccagggaaccctggtcaccgtgtcatctacgcgtatccagaaccctgatcctgccgtgtaccagctgcgggatagcaagagcagcgacaagagcgtgtgtctgttcaccgacttcgacagccagaccaacgtgtcccagagcaaggactccgacgtgtacatcaccgataagtgcgtgctggacatgcggagcatggacttcaagagcaactccgccgtggcctggtccaacaagtccgatttcgcctgcgccaacgccttcaacaacagcattatccccgaggacacattcttcccaagccccgagagcagctgcgacgtgaagctggtggaaaagagcttcgagacagacaccaacctgaacttccagaacctgagcgtgatcggcttcagaatcctgctgctgaaagtggccggctttaacctgctgatgaccctgcggctgtggtccagc

SEQ ID NO: 8570 - DNA, 2274 bp, Artificial Sequence
  Synthetic Polynucloetide
atggccttaccagtgaccgccttgctcctgccgctggccttgctgctccacgccgccaggccggaagtgcagctggttgaatctggcggaggactggttcagcctggcggatctctgagactgtcttgtgccgccagcggcttcagcttcagcgacttttggatgagctgggtccgacaggcccctggcaaaggacttgaatgggtcgccacaatcagccaggccggcagcgagaaggactacgtggactctgtgaagggcagattcaccatcagccgggacaacgccaagaagtccctgtacctccagatgaacagcctgagagccgaggacaccgccgtgtactattgtgcctctggcgtgtacagcttcgactacagaggccagggcaccctggtcacagtctcttctggtaccggcggaggcggatctggcggcggaggtagcggtggcggaggatctgaattcgacatccagatgacacagagccctagcagcctgtctgccagcgtgggagacagagtgaccatcacctgtagagccagccagagcatcaacaagtggctgaactggtatcagcagaagcccggcaaggcccctaagctgctgatctatgccgccagctctctccagagcggagtgcctagcagattttctggcagcggctccggcaccgatttcaccctgacaatatccagcctccagcctgaggacttcgccacctactactgccagcaggactacaacttcccctacaccttcggccagggcaccaaggtggaaatcaaaagactcgagatccagaaccctgatcctgccgtgtaccagctgcgggatagcaagagcagcgacaagagcgtgtgtctgttcaccgacttcgacagccagaccaacgtgtcccagagcaaggactccgacgtgtacatcaccgataagtgcgtgctggacatgcggagcatggacttcaagagcaactccgccgtggcctggtccaacaagtccgatttcgcctgcgccaacgccttcaacaacagcattatccccgaggacacattcttcccaagccccgagagcagctgcgacgtgaagctggtggaaaagagcttcgagacagacaccaacctgaacttccagaacctgagcgtgatcggcttcagaatcctgctgctgaaagtggccggctttaacctgctgatgaccctgcggctgtggtccagccgcgccaagagaagcggatctggcgtgaagcagaccctgaatttcgacctgctgaagctggctggcgacgtggaatccaacccaggccctactagtatggactggatttggcgcatccttttccttgtcggcgctgctaccggcgcgcattccttcgaacaagttcagctggttcagagcggcgctgaagtgaagaaacctggcagcagcgtgaaggtgtcctgcaaagcaagcggcggcacctttagcagctacggcatctcttgggtccgacaggctcctggacaaggactggaatggatgggctggatcagcgccatcttcggcacagccaattacgcccagaaattccagggccgcgtgacaatcacagccgacgagtctacaagcaccgcctacatggaactgagcagcctgagaagcgaggacaccgccgtgtactattgtgccagaggcgtggcctcctggtatctggattattggggccagggaaccctggtcaccgtgtcatctacgcgtgaggacctgaagaacgtgttcccacctgaggtggccgtgttcgagcctagcgaggccgagatcagccacacccagaaagccaccctcgtgtgcctggctaccggcttctaccccgaccatgtggaactgtcttggtgggtcaacggcaaagaggtgcacagcggcgtgtgtaccgacccccagccactgaaagaacagcccgccctgaacgacagccggtactgcctgagcagcagactgagagtgtccgccaccttctggcagaacccccggaaccacttcagatgccaggtgcagttctacggcctgagcgagaacgacgagtggacccaggacagagccaagcccgtgacccagatcgtgtctgccgaagcctggggcagagccgattgcggctttaccagcgagagctaccagcagggcgtgctgagcgccaccatcctgtacgagatcctgctgggcaaggccaccctgtacgccgtgctggtgtctgccctggtgctgatggctatggtcaagcggaaggacagccgggga

SEQ ID NO: 8571 - DNA, 2850 bp, Artificial Sequence
  Synthetic Polynucloetide
atggccttaccagtgaccgccttgctcctgccgctggccttgctgctccacgccgccaggccggaagtgcagctggttgaatctggcggaggactggttcagcctggcggatctctgagactgtcttgtgccgccagcggcttcagcttcagcgacttttggatgagctgggtccgacaggcccctggcaaaggacttgaatgggtcgccacaatcagccaggccggcagcgagaaggactacgtggactctgtgaagggcagattcaccatcagccgggacaacgccaagaagtccctgtacctccagatgaacagcctgagagccgaggacaccgccgtgtactattgtgcctctggcgtgtacagcttcgactacagaggccagggcaccctggtcacagtctcttctggtaccggcggaggcggatctggcggcggaggtagcggtggcggaggatctgaattcgacatccagatgacacagagccctagcagcctgtctgccagcgtgggagacagagtgaccatcacctgtagagccagccagagcatcaacaagtggctgaactggtatcagcagaagcccggcaaggcccctaagctgctgatctatgccgccagctctctccagagcggagtgcctagcagattttctggcagcggctccggcaccgatttcaccctgacaatatccagcctccagcctgaggacttcgccacctactactgccagcaggactacaacttcccctacaccttcggccagggcaccaaggtggaaatcaaaagactcgaggacctgaagaacgtgttcccacctgaggtggccgtgttcgagcctagcgaggccgagatcagccacacccagaaagccaccctcgtgtgcctggctaccggcttctaccccgaccatgtggaactgtcttggtgggtcaacggcaaagaggtgcacagcggcgtgtctaccgacccccagccactgaaagaacagcccgccctgaacgacagccggtactgcctgagcagcagactgagagtgtccgccaccttctggcagaacccccggaaccacttcagatgccaggtgcagttctacggcctgagcgagaacgacgagtggacccaggacagagccaagcccgtgacccagatcgtgtctgccgaagcctggggcagagccgattgcggatcccagagcttcggcctgctggaccccaagctgtgctacctgctggatggcatcctgttcatctacggcgtgatcctgaccgccctgttcctgagagtgaagttcagcagaagcgccgacgcccctgcctaccagcagggacagaaccaactgtacaacgagctgaacctgggcagacgggaagagtacgacgtgctggacaagcggagaggcagggaccctgagatgggcggaaagccccagcggagaaagaacccccaggaaggactgtataacgaactccagaaagacaagatggccgaagcctacagcgagatcggcatgaagggcgagcggagaagaggcaagggccacgatggcctgtaccagggcctgagcaccgccaccaaggacacctatgacgccctgcacatgcaggccctgcctccaagaagggccaagcgatctggatctggagcaacaaacttctcactactcaaacaagcaggtgacgtggaggagaatcccgggcctactagtatggactggatttggcgcatccttttccttgtcggcgctgctaccggcgcgcattccttcgaacaagttcagctggttcagagcggcgctgaagtgaagaaacctggcagcagcgtgaaggtgtcctgcaaagcaagcggcggcacctttagcagctacggcatctcttgggtccgacaggctcctggacaaggactggaatggatgggctggatcagcgccatcttcggcacagccaattacgcccagaaattccagggccgcgtgacaatcacagccgacgagtctacaagcaccgcctacatggaactgagcagcctgagaagcgaggacaccgccgtgtactattgtgccagaggcgtggcctcctggtatctggattattggggccagggaaccctggtcaccgtgtcatctacgcgtatccagaaccctgatcctgccgtgtaccagctgcgggatagcaagagcagcgacaagagcgtgtgtctgttcaccgacttcgacagccagaccaacgtgtcccagagcaaggactccgacgtgtacatcaccgataagaccgtgctggacatgcggagcatggacttcaagagcaactccgccgtggcctggtccaacaagtccgatttcgcctgcgccaacgccttcaacaacagcattatccccgaggacacattcttcccaagccccgagagcagctgcggtacccagagttttgggttgttggaccctaaattgtgctatctgttggacggaatcctgttcatttacggagtgatcctgaccgcattgttcctgcgggttaagttttccagatccgcagacgcacccgcttaccaacaagggcagaaccaactctacaatgaacttaatttggggcggagggaagagtacgacgttctggacaaaaggaggggacgagatcccgagatgggcggaaagcctcagcgaaggaagaatccgcaagaggggctttataacgaactccagaaagataaaatggcagaagcctatagtgagattgggatgaagggagaaaggaggaggggtaaaggtcacgatgggttgtaccaaggattgagcacagccactaaagatacctatgatgcgctccacatgcaggccctgccgccaaga

SEQ ID NO: 8572 - DNA, 2340 bp, Artificial Sequence
  Synthetic Polynucloetide
atggccttaccagtgaccgccttgctcctgccgctggccttgctgctccacgccgccaggccggaagtgcagctggttgaatctggcggaggactggttcagcctggcggatctctgagactgtcttgtgccgccagcggcttcagcttcagcgacttttggatgagctgggtccgacaggcccctggcaaaggacttgaatgggtcgccacaatcagccaggccggcagcgagaaggactacgtggactctgtgaagggcagattcaccatcagccgggacaacgccaagaagtccctgtacctccagatgaacagcctgagagccgaggacaccgccgtgtactattgtgcctctggcgtgtacagcttcgactacagaggccagggcaccctggtcacagtctcttctggtaccggcggaggcggatctggcggcggaggtagcggtggcggaggatctgaattcgacatccagatgacacagagccctagcagcctgtctgccagcgtgggagacagagtgaccatcacctgtagagccagccagagcatcaacaagtggctgaactggtatcagcagaagcccggcaaggcccctaagctgctgatctatgccgccagctctctccagagcggagtgcctagcagattttctggcagcggctccggcaccgatttcaccctgacaatatccagcctccagcctgaggacttcgccacctactactgccagcaggactacaacttcccctacaccttcggccagggcaccaaggtggaaatcaaaagactcgagggacagcctaaggccaatcctaccgtgacactgttccctccaagcagcgaagaactccaggccaacaaggccacacttgtgtgcctgatctccgacttctaccctggggctgtgacagtggcttggaaggccgatggatctcctgtgaaagccggcgtggaaaccaccaagccatccaagcagagcaacaacaaatacgccgccagctcctacctgagcctgacacctgagcagtggaagtcccacagatcctacagctgccaagtgacccacgaaggcagcaccgtggaaaagacagtggcccctacagagtgcagccccatcaagaccgatgtgattacaatggaccccaaggacaactgctccaaggacgccaacgataccctgctgctccagctgaccaacaccagcgcctactacatgtacttgttgctgctgctgaagtccgtggtgtacttcgccatcatcacatgctgcctgctgcggagaaccgccttctgctgcaacggcgagaagtctagggccaagcgatctggatctggagcaacaaacttctcactactcaaacaagcaggtgacgtggaggagaatcccgggcctactagtatggactggatttggcgcatccttttccttgtcggcgctgctaccggcgcgcattccttcgaacaagttcagctggttcagagcggcgctgaagtgaagaaacctggcagcagcgtgaaggtgtcctgcaaagcaagcggcggcacctttagcagctacggcatctcttgggtccgacaggctcctggacaaggactggaatggatgggctggatcagcgccatcttcggcacagccaattacgcccagaaattccagggccgcgtgacaatcacagccgacgagtctacaagcaccgcctacatggaactgagcagcctgagaagcgaggacaccgccgtgtactattgtgccagaggcgtggcctcctggtatctggattattggggccagggaaccctggtcaccgtgtcatctacgcgtgcctctacaaagggaccctccgtgtttcctctggctcccagcagcaagtctacaagcggaggaacagccgctctgggctgcctggtcaaggattactttcccgagcctgtgaccgtgtcctggaatagcggagcactgacaagcggcgtgcacacctttccagccgtgctgcaaagcagcggcctgtactctctgagcagcgtggtcacagtgcctagctctagcctgggcacccagacctacatctgcaatgtgaaccacaagcctagcaacaccaaggtggacaagagagtggaacccaagagctgtgaagtgaaaaccgactccaccgaccacgtgaagcccaaagagacagagaacaccaagcagcccagcaagagctgccacaagcccaaggccatcgtgcacaccgagaaagtgaacatgatgagcctgaccgtgctgggcctgcggatgctgttcgccaaaaccgtggccgtgaacttcctgctgaccgccaagctgttcttcctc

SEQ ID NO: 8573 - DNA, 2283 bp, Artificial Sequence
  Synthetic Polynucloetide
atggccttaccagtgaccgccttgctcctgccgctggccttgctgctccacgccgccaggccggaagtgcagctggttgaatctggcggaggactggttcagcctggcggatctctgagactgtcttgtgccgccagcggcttcagcttcagcgacttttggatgagctgggtccgacaggcccctggcaaaggacttgaatgggtcgccacaatcagccaggccggcagcgagaaggactacgtggactctgtgaagggcagattcaccatcagccgggacaacgccaagaagtccctgtacctccagatgaacagcctgagagccgaggacaccgccgtgtactattgtgcctctggcgtgtacagcttcgactacagaggccagggcaccctggtcacagtctcttctggtaccggcggaggcggatctggcggcggaggtagcggtggcggaggatctgaattcgacatccagatgacacagagccctagcagcctgtctgccagcgtgggagacagagtgaccatcacctgtagagccagccagagcatcaacaagtggctgaactggtatcagcagaagcccggcaaggcccctaagctgctgatctatgccgccagctctctccagagcggagtgcctagcagattttctggcagcggctccggcaccgatttcaccctgacaatatccagcctccagcctgaggacttcgccacctactactgccagcaggactacaacttcccctacaccttcggccagggcaccaaggtggaaatcaaaagactcgagggacagcctaaggccaatcctaccgtgacactgttccctccaagcagcgaagaactccaggccaacaaggccacacttgtgtgcctgatctccgacttctaccctggggctgtgacagtggcttggaaggccgatggatctcctgtgaaagccggcgtggaaaccaccaagccatccaagcagagcaacaacaaatacgccgccagctcctacctgagcctgacacctgagcagtggaagtcccacagatcctacagctgccaagtgacccacgaaggcagcaccgtggaaaagacagtggcccctacagagtgcagcggcagagccgattgcggctttaccagcgagagctaccagcagggcgtgctgagcgccaccatcctgtacgagatcctgctgggcaaggccaccctgtacgccgtgctggtgtctgccctggtgctgatggctatggtcaagcggaaggacagccggggacgcgccaagagaagcggatctggcgtgaagcagaccctgaatttcgacctgctgaagctggctggcgacgtggaatccaacccaggccctactagtatggactggatttggcgcatccttttccttgtcggcgctgctaccggcgcgcattccttcgaacaagttcagctggttcagagcggcgctgaagtgaagaaacctggcagcagcgtgaaggtgtcctgcaaagcaagcggcggcacctttagcagctacggcatctcttgggtccgacaggctcctggacaaggactggaatggatgggctggatcagcgccatcttcggcacagccaattacgcccagaaattccagggccgcgtgacaatcacagccgacgagtctacaagcaccgcctacatggaactgagcagcctgagaagcgaggacaccgccgtgtactattgtgccagaggcgtggcctcctggtatctggattattggggccagggaaccctggtcaccgtgtcatctacgcgtgcctctacaaagggaccctccgtgtttcctctggctcccagcagcaagtctacaagcggaggaacagccgctctgggctgcctggtcaaggattactttcccgagcctgtgaccgtgtcctggaatagcggagcactgacaagcggcgtgcacacctttccagccgtgctgcaaagcagcggcctgtactctctgagcagcgtggtcacagtgcctagctctagcctgggcacccagacctacatctgcaatgtgaaccacaagcctagcaacaccaaggtggacaagagagtggaacccaagagctgtatccccgaggacacattcttcccaagccccgagagcagctgcgacgtgaagctggtggaaaagagcttcgagacagacaccaacctgaacttccagaacctgagcgtgatcggcttcagaatcctgctgctgaaagtggccggctttaacctgctgatgaccctgcggctgtggtccagc

SEQ ID NO: 8574 - DNA, 2685 bp, Artificial Sequence
  Synthetic Polynucloetide
atggccttaccagtgaccgccttgctcctgccgctggccttgctgctccacgccgccaggccggaagtgcagctggttgaatctggcggaggactggttcagcctggcggatctctgagactgtcttgtgccgccagcggcttcagcttcagcgacttttggatgagctgggtccgacaggcccctggcaaaggacttgaatgggtcgccacaatcagccaggccggcagcgagaaggactacgtggactctgtgaagggcagattcaccatcagccgggacaacgccaagaagtccctgtacctccagatgaacagcctgagagccgaggacaccgccgtgtactattgtgcctctggcgtgtacagcttcgactacagaggccagggcaccctggtcacagtctcttctggtaccggcggaggcggatctggcggcggaggtagcggtggcggaggatctgaattcgacatccagatgacacagagccctagcagcctgtctgccagcgtgggagacagagtgaccatcacctgtagagccagccagagcatcaacaagtggctgaactggtatcagcagaagcccggcaaggcccctaagctgctgatctatgccgccagctctctccagagcggagtgcctagcagattttctggcagcggctccggcaccgatttcaccctgacaatatccagcctccagcctgaggacttcgccacctactactgccagcaggactacaacttcccctacaccttcggccagggcaccaaggtggaaatcaaaagactcgagatccagaaccctgatcctgccgtgtaccagctgcgggatagcaagagcagcgacaagagcgtgtgtctgttcaccgacttcgacagccagaccaacgtgtcccagagcaaggactccgacgtgtacatcaccgataagtgcgtgctggacatgcggagcatggacttcaagagcaactccgccgtggcctggtccaacaagtccgatttcgcctgcgccaacgccttcaacaacagcattatccccgaggacacattcttcccaagccccgagagcagctgcgacgtgaagctggtggaaaagagcttcgagacagacaccaacctgaacttccagaacctgagcgtgatcggcttcagaatcctgctgctgaaagtggccggctttaacctgctgatgaccctgcggctgtggtccagccgcgccaagagaagcggatctggcgtgaagcagaccctgaatttcgacctgctgaagctggctggcgacgtggaatccaacccaggccctactagtatggactggatttggcgcatccttttccttgtcggcgctgctaccggcgcgcattccgggccccagctccagctgcaagagtctggacctggcctggtcaagcctagcgagacactgagcctgacctgtaccgtgtccggcgatagcatcagcagcggcgattactactggggctggatcagacagcctcctggcaaaggactggaatggatcggccacatctactacagcggcgtgacctactacaaccccagcctgaagtccagagtgaccatcagcgtggacaccagccggaaccagttctccctgaagctgtctagcgtgacagccgccgataccgccgtgtactactgcaccagagaggacagcagcaactggcggagtagaggccagggaacactggtcacagttagctctggatccggcggaggcggaagtggaggcggaggatctggcggcggaggctctttcgaacaagttcagctggttcagagcggcgctgaagtgaagaaacctggcagcagcgtgaaggtgtcctgcaaagcaagcggcggcacctttagcagctacggcatctcttgggtccgacaggctcctggacaaggactggaatggatgggctggatcagcgccatcttcggcacagccaattacgcccagaaattccagggccgcgtgacaatcacagccgacgagtctacaagcaccgcctacatggaactgagcagcctgagaagcgaggacaccgccgtgtactattgtgccagaggcgtggcctcctggtatctggattattggggccagggaaccctggtcaccgtgtcatctacgcgtgaggacctgaagaacgtgttcccacctgaggtggccgtgttcgagcctagcgaggccgagatcagccacacccagaaagccaccctcgtgtgcctggctaccggcttctaccccgaccatgtggaactgtcttggtgggtcaacggcaaagaggtgcacagcggcgtgtgtaccgacccccagccactgaaagaacagcccgccctgaacgacagccggtactgcctgagcagcagactgagagtgtccgccaccttctggcagaacccccggaaccacttcagatgccaggtgcagttctacggcctgagcgagaacgacgagtggacccaggacagagccaagcccgtgacccagatcgtgtctgccgaagcctggggcagagccgattgcggctttaccagcgagagctaccagcagggcgtgctgagcgccaccatcctgtacgagatcctgctgggcaaggccaccctgtacgccgtgctggtgtctgccctggtgctgatggctatggtcaagcggaaggacagccgggga

SEQ ID NO: 8575 - DNA, 3261 bp, Artificial Sequence
  Synthetic Polynucloetide
atggccttaccagtgaccgccttgctcctgccgctggccttgctgctccacgccgccaggccggaagtgcagctggttgaatctggcggaggactggttcagcctggcggatctctgagactgtcttgtgccgccagcggcttcagcttcagcgacttttggatgagctgggtccgacaggcccctggcaaaggacttgaatgggtcgccacaatcagccaggccggcagcgagaaggactacgtggactctgtgaagggcagattcaccatcagccgggacaacgccaagaagtccctgtacctccagatgaacagcctgagagccgaggacaccgccgtgtactattgtgcctctggcgtgtacagcttcgactacagaggccagggcaccctggtcacagtctcttctggtaccggcggaggcggatctggcggcggaggtagcggtggcggaggatctgaattcgacatccagatgacacagagccctagcagcctgtctgccagcgtgggagacagagtgaccatcacctgtagagccagccagagcatcaacaagtggctgaactggtatcagcagaagcccggcaaggcccctaagctgctgatctatgccgccagctctctccagagcggagtgcctagcagattttctggcagcggctccggcaccgatttcaccctgacaatatccagcctccagcctgaggacttcgccacctactactgccagcaggactacaacttcccctacaccttcggccagggcaccaaggtggaaatcaaaagactcgaggacctgaagaacgtgttcccacctgaggtggccgtgttcgagcctagcgaggccgagatcagccacacccagaaagccaccctcgtgtgcctggctaccggcttctaccccgaccatgtggaactgtcttggtgggtcaacggcaaagaggtgcacagcggcgtgtctaccgacccccagccactgaaagaacagcccgccctgaacgacagccggtactgcctgagcagcagactgagagtgtccgccaccttctggcagaacccccggaaccacttcagatgccaggtgcagttctacggcctgagcgagaacgacgagtggacccaggacagagccaagcccgtgacccagatcgtgtctgccgaagcctggggcagagccgattgcggatcccagagcttcggcctgctggaccccaagctgtgctacctgctggatggcatcctgttcatctacggcgtgatcctgaccgccctgttcctgagagtgaagttcagcagaagcgccgacgcccctgcctaccagcagggacagaaccaactgtacaacgagctgaacctgggcagacgggaagagtacgacgtgctggacaagcggagaggcagggaccctgagatgggcggaaagccccagcggagaaagaacccccaggaaggactgtataacgaactccagaaagacaagatggccgaagcctacagcgagatcggcatgaagggcgagcggagaagaggcaagggccacgatggcctgtaccagggcctgagcaccgccaccaaggacacctatgacgccctgcacatgcaggccctgcctccaagaagggccaagcgatctggatctggagcaacaaacttctcactactcaaacaagcaggtgacgtggaggagaatcccgggcctactagtatggactggatttggcgcatccttttccttgtcggcgctgctaccggcgcgcattccgggccccagctccagctgcaagagtctggacctggcctggtcaagcctagcgagacactgagcctgacctgtaccgtgtccggcgatagcatcagcagcggcgattactactggggctggatcagacagcctcctggcaaaggactggaatggatcggccacatctactacagcggcgtgacctactacaaccccagcctgaagtccagagtgaccatcagcgtggacaccagccggaaccagttctccctgaagctgtctagcgtgacagccgccgataccgccgtgtactactgcaccagagaggacagcagcaactggcggagtagaggccagggaacactggtcacagttagctctggatccggcggaggcggaagtggaggcggaggatctggcggcggaggctctttcgaacaagttcagctggttcagagcggcgctgaagtgaagaaacctggcagcagcgtgaaggtgtcctgcaaagcaagcggcggcacctttagcagctacggcatctcttgggtccgacaggctcctggacaaggactggaatggatgggctggatcagcgccatcttcggcacagccaattacgcccagaaattccagggccgcgtgacaatcacagccgacgagtctacaagcaccgcctacatggaactgagcagcctgagaagcgaggacaccgccgtgtactattgtgccagaggcgtggcctcctggtatctggattattggggccagggaaccctggtcaccgtgtcatctacgcgtatccagaaccctgatcctgccgtgtaccagctgcgggatagcaagagcagcgacaagagcgtgtgtctgttcaccgacttcgacagccagaccaacgtgtcccagagcaaggactccgacgtgtacatcaccgataagaccgtgctggacatgcggagcatggacttcaagagcaactccgccgtggcctggtccaacaagtccgatttcgcctgcgccaacgccttcaacaacagcattatccccgaggacacattcttcccaagccccgagagcagctgcggtacccagagttttgggttgttggaccctaaattgtgctatctgttggacggaatcctgttcatttacggagtgatcctgaccgcattgttcctgcgggttaagttttccagatccgcagacgcacccgcttaccaacaagggcagaaccaactctacaatgaacttaatttggggcggagggaagagtacgacgttctggacaaaaggaggggacgagatcccgagatgggcggaaagcctcagcgaaggaagaatccgcaagaggggctttataacgaactccagaaagataaaatggcagaagcctatagtgagattgggatgaagggagaaaggaggaggggtaaaggtcacgatgggttgtaccaaggattgagcacagccactaaagatacctatgatgcgctccacatgcaggccctgccgccaaga

SEQ ID NO: 8576 - DNA, 2751 bp, Artificial Sequence
  Synthetic Polynucloetide
atggccttaccagtgaccgccttgctcctgccgctggccttgctgctccacgccgccaggccggaagtgcagctggttgaatctggcggaggactggttcagcctggcggatctctgagactgtcttgtgccgccagcggcttcagcttcagcgacttttggatgagctgggtccgacaggcccctggcaaaggacttgaatgggtcgccacaatcagccaggccggcagcgagaaggactacgtggactctgtgaagggcagattcaccatcagccgggacaacgccaagaagtccctgtacctccagatgaacagcctgagagccgaggacaccgccgtgtactattgtgcctctggcgtgtacagcttcgactacagaggccagggcaccctggtcacagtctcttctggtaccggcggaggcggatctggcggcggaggtagcggtggcggaggatctgaattcgacatccagatgacacagagccctagcagcctgtctgccagcgtgggagacagagtgaccatcacctgtagagccagccagagcatcaacaagtggctgaactggtatcagcagaagcccggcaaggcccctaagctgctgatctatgccgccagctctctccagagcggagtgcctagcagattttctggcagcggctccggcaccgatttcaccctgacaatatccagcctccagcctgaggacttcgccacctactactgccagcaggactacaacttcccctacaccttcggccagggcaccaaggtggaaatcaaaagactcgagggacagcctaaggccaatcctaccgtgacactgttccctccaagcagcgaagaactccaggccaacaaggccacacttgtgtgcctgatctccgacttctaccctggggctgtgacagtggcttggaaggccgatggatctcctgtgaaagccggcgtggaaaccaccaagccatccaagcagagcaacaacaaatacgccgccagctcctacctgagcctgacacctgagcagtggaagtcccacagatcctacagctgccaagtgacccacgaaggcagcaccgtggaaaagacagtggcccctacagagtgcagccccatcaagaccgatgtgattacaatggaccccaaggacaactgctccaaggacgccaacgataccctgctgctccagctgaccaacaccagcgcctactacatgtacttgttgctgctgctgaagtccgtggtgtacttcgccatcatcacatgctgcctgctgcggagaaccgccttctgctgcaacggcgagaagtctagggccaagcgatctggatctggagcaacaaacttctcactactcaaacaagcaggtgacgtggaggagaatcccgggcctactagtatggactggatttggcgcatccttttccttgtcggcgctgctaccggcgcgcattccgggccccagctccagctgcaagagtctggacctggcctggtcaagcctagcgagacactgagcctgacctgtaccgtgtccggcgatagcatcagcagcggcgattactactggggctggatcagacagcctcctggcaaaggactggaatggatcggccacatctactacagcggcgtgacctactacaaccccagcctgaagtccagagtgaccatcagcgtggacaccagccggaaccagttctccctgaagctgtctagcgtgacagccgccgataccgccgtgtactactgcaccagagaggacagcagcaactggcggagtagaggccagggaacactggtcacagttagctctggatccggcggaggcggaagtggaggcggaggatctggcggcggaggctctttcgaacaagttcagctggttcagagcggcgctgaagtgaagaaacctggcagcagcgtgaaggtgtcctgcaaagcaagcggcggcacctttagcagctacggcatctcttgggtccgacaggctcctggacaaggactggaatggatgggctggatcagcgccatcttcggcacagccaattacgcccagaaattccagggccgcgtgacaatcacagccgacgagtctacaagcaccgcctacatggaactgagcagcctgagaagcgaggacaccgccgtgtactattgtgccagaggcgtggcctcctggtatctggattattggggccagggaaccctggtcaccgtgtcatctacgcgtgcctctacaaagggaccctccgtgtttcctctggctcccagcagcaagtctacaagcggaggaacagccgctctgggctgcctggtcaaggattactttcccgagcctgtgaccgtgtcctggaatagcggagcactgacaagcggcgtgcacacctttccagccgtgctgcaaagcagcggcctgtactctctgagcagcgtggtcacagtgcctagctctagcctgggcacccagacctacatctgcaatgtgaaccacaagcctagcaacaccaaggtggacaagagagtggaacccaagagctgtgaagtgaaaaccgactccaccgaccacgtgaagcccaaagagacagagaacaccaagcagcccagcaagagctgccacaagcccaaggccatcgtgcacaccgagaaagtgaacatgatgagcctgaccgtgctgggcctgcggatgctgttcgccaaaaccgtggccgtgaacttcctgctgaccgccaagctgttcttcctc

SEQ ID NO: 8577 - DNA, 2694 bp, Artificial Sequence
  Synthetic Polynucloetide
atggccttaccagtgaccgccttgctcctgccgctggccttgctgctccacgccgccaggccggaagtgcagctggttgaatctggcggaggactggttcagcctggcggatctctgagactgtcttgtgccgccagcggcttcagcttcagcgacttttggatgagctgggtccgacaggcccctggcaaaggacttgaatgggtcgccacaatcagccaggccggcagcgagaaggactacgtggactctgtgaagggcagattcaccatcagccgggacaacgccaagaagtccctgtacctccagatgaacagcctgagagccgaggacaccgccgtgtactattgtgcctctggcgtgtacagcttcgactacagaggccagggcaccctggtcacagtctcttctggtaccggcggaggcggatctggcggcggaggtagcggtggcggaggatctgaattcgacatccagatgacacagagccctagcagcctgtctgccagcgtgggagacagagtgaccatcacctgtagagccagccagagcatcaacaagtggctgaactggtatcagcagaagcccggcaaggcccctaagctgctgatctatgccgccagctctctccagagcggagtgcctagcagattttctggcagcggctccggcaccgatttcaccctgacaatatccagcctccagcctgaggacttcgccacctactactgccagcaggactacaacttcccctacaccttcggccagggcaccaaggtggaaatcaaaagactcgagggacagcctaaggccaatcctaccgtgacactgttccctccaagcagcgaagaactccaggccaacaaggccacacttgtgtgcctgatctccgacttctaccctggggctgtgacagtggcttggaaggccgatggatctcctgtgaaagccggcgtggaaaccaccaagccatccaagcagagcaacaacaaatacgccgccagctcctacctgagcctgacacctgagcagtggaagtcccacagatcctacagctgccaagtgacccacgaaggcagcaccgtggaaaagacagtggcccctacagagtgcagcggcagagccgattgcggctttaccagcgagagctaccagcagggcgtgctgagcgccaccatcctgtacgagatcctgctgggcaaggccaccctgtacgccgtgctggtgtctgccctggtgctgatggctatggtcaagcggaaggacagccggggacgcgccaagagaagcggatctggcgtgaagcagaccctgaatttcgacctgctgaagctggctggcgacgtggaatccaacccaggccctactagtatggactggatttggcgcatccttttccttgtcggcgctgctaccggcgcgcattccgggccccagctccagctgcaagagtctggacctggcctggtcaagcctagcgagacactgagcctgacctgtaccgtgtccggcgatagcatcagcagcggcgattactactggggctggatcagacagcctcctggcaaaggactggaatggatcggccacatctactacagcggcgtgacctactacaaccccagcctgaagtccagagtgaccatcagcgtggacaccagccggaaccagttctccctgaagctgtctagcgtgacagccgccgataccgccgtgtactactgcaccagagaggacagcagcaactggcggagtagaggccagggaacactggtcacagttagctctggatccggcggaggcggaagtggaggcggaggatctggcggcggaggctctttcgaacaagttcagctggttcagagcggcgctgaagtgaagaaacctggcagcagcgtgaaggtgtcctgcaaagcaagcggcggcacctttagcagctacggcatctcttgggtccgacaggctcctggacaaggactggaatggatgggctggatcagcgccatcttcggcacagccaattacgcccagaaattccagggccgcgtgacaatcacagccgacgagtctacaagcaccgcctacatggaactgagcagcctgagaagcgaggacaccgccgtgtactattgtgccagaggcgtggcctcctggtatctggattattggggccagggaaccctggtcaccgtgtcatctacgcgtgcctctacaaagggaccctccgtgtttcctctggctcccagcagcaagtctacaagcggaggaacagccgctctgggctgcctggtcaaggattactttcccgagcctgtgaccgtgtcctggaatagcggagcactgacaagcggcgtgcacacctttccagccgtgctgcaaagcagcggcctgtactctctgagcagcgtggtcacagtgcctagctctagcctgggcacccagacctacatctgcaatgtgaaccacaagcctagcaacaccaaggtggacaagagagtggaacccaagagctgtatccccgaggacacattcttcccaagccccgagagcagctgcgacgtgaagctggtggaaaagagcttcgagacagacaccaacctgaacttccagaacctgagcgtgatcggcttcagaatcctgctgctgaaagtggccggctttaacctgctgatgaccctgcggctgtggtccagc

SEQ ID NO: 8578 - DNA, 2265 bp, Artificial Sequence
  Synthetic Polynucloetide
atggccttaccagtgaccgccttgctcctgccgctggccttgctgctccacgccgccaggccggaagtgcaggttttggagtctggcggaggactggttcagcctggcggatctctgagactgtcttgtgccgccagcggcttcaccttcagcaactttgccatgagctgggtccgacaggcccctggcaaaggacttgaatgggtgtccacaatcagcggcagcgccggcacaacagattacgccgattctgtgaagggcagattcaccatcagccgggacaacagcaagaaaaccctgtacctccagatgaacagcctgcgcgtggaagataccgccgtgtactactgtgccgatggcagaggccccttcttcgattatcgcggccagggcacactggtcaccgtttcttctggtaccggcggaggcggatctggcggcggaggtagcggtggcggaggatctgaattcgacatccagatgacacagagccctagcagcctgtctgccagcgtgggagacagagtgaccatcacctgtagagccagccagagcatcaacaagtggctgaactggtatcagcagaagcccggcaaggcccctaagctgctgatctatgccgccagctctctccagagcggagtgcctagcagattttctggcagcggctccggcaccgatttcaccctgacaatatccagcctccagcctgaggacttcgccacctactactgccagcaggactacaacttcccctacaccttcggccagggcaccaaggtggaaatcaaaagactcgaggacctgaagaacgtgttcccacctgaggtggccgtgttcgagcctagcgaggccgagatcagccacacccagaaagccaccctcgtgtgcctggctaccggcttctaccccgaccatgtggaactgtcttggtgggtcaacggcaaagaggtgcacagcggcgtgtgtaccgacccccagccactgaaagaacagcccgccctgaacgacagccggtactgcctgagcagcagactgagagtgtccgccaccttctggcagaacccccggaaccacttcagatgccaggtgcagttctacggcctgagcgagaacgacgagtggacccaggacagagccaagcccgtgacccagatcgtgtctgccgaagcctggggcagagccgattgcggctttaccagcgagagctaccagcagggcgtgctgagcgccaccatcctgtacgagatcctgctgggcaaggccaccctgtacgccgtgctggtgtctgccctggtgctgatggctatggtcaagcggaaggacagccggggaagggccaagcgatctggatctggagcaacaaacttctcactactcaaacaagcaggtgacgtggaggagaatcccgggcctactagtatggactggatttggcgcatccttttccttgtcggcgctgctaccggcgcgcattccttcgaacaagttcagctggttcagagcggcgctgaagtgaagaaacctggcagcagcgtgaaggtgtcctgcaaagcaagcggcggcacctttagcagctacggcatctcttgggtccgacaggctcctggacaaggactggaatggatgggctggatcagcgccatcttcggcacagccaattacgcccagaaattccagggccgcgtgacaatcacagccgacgagtctacaagcaccgcctacatggaactgagcagcctgagaagcgaggacaccgccgtgtactattgtgccagaggcgtggcctcctggtatctggattattggggccagggaaccctggtcaccgtgtcatctacgcgtatccagaaccctgatcctgccgtgtaccagctgcgggatagcaagagcagcgacaagagcgtgtgtctgttcaccgacttcgacagccagaccaacgtgtcccagagcaaggactccgacgtgtacatcaccgataagtgcgtgctggacatgcggagcatggacttcaagagcaactccgccgtggcctggtccaacaagtccgatttcgcctgcgccaacgccttcaacaacagcattatccccgaggacacattcttcccaagccccgagagcagctgcgacgtgaagctggtggaaaagagcttcgagacagacaccaacctgaacttccagaacctgagcgtgatcggcttcagaatcctgctgctgaaagtggccggctttaacctgctgatgaccctgcggctgtggtccagc

SEQ ID NO: 8579 - DNA, 2268 bp, Artificial Sequence
  Synthetic Polynucloetide
atggccttaccagtgaccgccttgctcctgccgctggccttgctgctccacgccgccaggccggacatccagatgacacagagccctagcagcctgtctgccagcgtgggagacagagtgaccatcacctgtagagccagccagagcatcaacaagtggctgaactggtatcagcagaagcccggcaaggcccctaagctgctgatctatgccgccagctctctccagagcggagtgcctagcagattttctggcagcggctccggcaccgatttcaccctgacaatatccagcctccagcctgaggacttcgccacctactactgccagcaggactacaacttcccctacaccttcggccagggcaccaaggtggaaatcaaaagactcgaggacctgaagaacgtgttcccacctgaggtggccgtgttcgagcctagcgaggccgagatcagccacacccagaaagccaccctcgtgtgcctggctaccggcttctaccccgaccatgtggaactgtcttggtgggtcaacggcaaagaggtgcacagcggcgtgtgtaccgacccccagccactgaaagaacagcccgccctgaacgacagccggtactgcctgagcagcagactgagagtgtccgccaccttctggcagaacccccggaaccacttcagatgccaggtgcagttctacggcctgagcgagaacgacgagtggacccaggacagagccaagcccgtgacccagatcgtgtctgccgaagcctggggcagagccgattgcggctttaccagcgagagctaccagcagggcgtgctgagcgccaccatcctgtacgagatcctgctgggcaaggccaccctgtacgccgtgctggtgtctgccctggtgctgatggctatggtcaagcggaaggacagccggggaagggccaagcgatctggatctggagcaacaaacttctcactactcaaacaagcaggtgacgtggaggagaatcccgggcctactagtatggactggatttggcgcatccttttccttgtcggcgctgctaccggcgcccattccgggcccgaagtgcagctggttgaatctggcggaggactggttcaggctggcggatctctgagactgtcttgtgccgccagcggcagaacctttagcatgggctggtttagacaggcccctggcaaagagagagagttcgtcgccgccatcacatactctggcggcagcccttactacgccgactctgtgaagggcagattcaccatcagccgggacaacgccaagaacaccgtgtacctccagatgaacagcctgaagcctgaggacaccgccgtgtactactgcgccgccaatccaacatacggcagcgactggaacgccgagaattggggccagggaacccaagtgacagtgtctagcggatccggcggcggaggatctggcggaggcggatctgggggcggaggctctttcgaacaagttcagctggttcagagcggcgctgaagtgaagaaacctggcagcagcgtgaaggtgtcctgcaaagcaagcggcggcacctttagcagctacggcatctcttgggtccgacaggctcctggacaaggactggaatggatgggctggatcagcgccatcttcggcacagccaattacgcccagaaattccagggccgcgtgacaatcacagccgacgagtctacaagcaccgcctacatggaactgagcagcctgagaagcgaggacaccgccgtgtactattgtgccagaggcgtggcctcctggtatctggattattggggccagggaaccctggtcaccgtgtcatctacgcgtatccagaaccctgatcctgccgtgtaccagctgcgggatagcaagagcagcgacaagagcgtgtgtctgttcaccgacttcgacagccagaccaacgtgtcccagagcaaggactccgacgtgtacatcaccgataagtgcgtgctggacatgcggagcatggacttcaagagcaactccgccgtggcctggtccaacaagtccgatttcgcctgcgccaacgccttcaacaacagcattatccccgaggacacattcttcccaagccccgagagcagctgcgacgtgaagctggtggaaaagagcttcgagacagacaccaacctgaacttccagaacctgagcgtgatcggcttcagaatcctgctgctgaaagtggccggctttaacctgctgatgaccctgcggctgtggtccagc

SEQ ID NO: 8580 - DNA, 2649 bp, Artificial Sequence
  Synthetic Polynucloetide
atggccttaccagtgaccgccttgctcctgccgctggccttgctgctccacgccgccaggccggacatccagatgacacagagccctagcagcctgtctgccagcgtgggagacagagtgaccatcacctgtagagccagccagagcatcaacaagtggctgaactggtatcagcagaagcccggcaaggcccctaagctgctgatctatgccgccagctctctccagagcggagtgcctagcagattttctggcagcggctccggcaccgatttcaccctgacaatatccagcctccagcctgaggacttcgccacctactactgccagcaggactacaacttcccctacaccttcggccagggcaccaaggtggaaatcaaaagactcgaggacctgaagaacgtgttcccacctgaggtggccgtgttcgagcctagcgaggccgagatcagccacacccagaaagccaccctcgtgtgcctggctaccggcttctaccccgaccatgtggaactgtcttggtgggtcaacggcaaagaggtgcacagcggcgtgtgtaccgacccccagccactgaaagaacagcccgccctgaacgacagccggtactgcctgagcagcagactgagagtgtccgccaccttctggcagaacccccggaaccacttcagatgccaggtgcagttctacggcctgagcgagaacgacgagtggacccaggacagagccaagcccgtgacccagatcgtgtctgccgaagcctggggcagagccgattgcggctttaccagcgagagctaccagcagggcgtgctgagcgccaccatcctgtacgagatcctgctgggcaaggccaccctgtacgccgtgctggtgtctgccctggtgctgatggctatggtcaagcggaaggacagccggggaagggccaagcgatctggatctggagcaacaaacttctcactactcaaacaagcaggtgacgtggaggagaatcccgggcctactagtatggactggatttggcgcatccttttccttgtcggcgctgctaccggcgcccattcccaactgcaactgcaagagtctggccctggcctggtcaagccttctgaaaccctgagcctgacctgtaccgtgtccggcggctctatcagcagcggcgattactactggggctggatcagacagcctccaggcaagggactcgaatggatcggcagcatcagctacagcggctccacctactacaacccaagcctgaagtccagagtgaccatcagcgtggacaccagcagaaaccagttctccctgaagctgagcagcgtgacagccgccgatacagccgtgtattattgcaccagagaggacagcagcaactggcggagtagaggacagggcacactggtcacagtgtcctcttctggaggcggtggaagcggtggaggaggatctgaagtgcagctggttgaatctggcggaggactggttcaggctggcggatctctgagactgtcttgtgccgccagcggcagaacctttagcatgggctggtttagacaggcccctggcaaagagagagagttcgtcgccgccatcacatactctggcggcagcccttactacgccgactctgtgaagggcagattcaccatcagccgggacaacgccaagaacaccgtgtacctccagatgaacagcctgaagcctgaggacaccgccgtgtactactgcgccgccaatccaacatacggcagcgactggaacgccgagaattggggccagggaacccaagtgacagtgtctagcggatccggcggcggaggatctggcggaggcggatctgggggcggaggctctttcgaacaagttcagctggttcagagcggcgctgaagtgaagaaacctggcagcagcgtgaaggtgtcctgcaaagcaagcggcggcacctttagcagctacggcatctcttgggtccgacaggctcctggacaaggactggaatggatgggctggatcagcgccatcttcggcacagccaattacgcccagaaattccagggccgcgtgacaatcacagccgacgagtctacaagcaccgcctacatggaactgagcagcctgagaagcgaggacaccgccgtgtactattgtgccagaggcgtggcctcctggtatctggattattggggccagggaaccctggtcaccgtgtcatctacgcgtatccagaaccctgatcctgccgtgtaccagctgcgggatagcaagagcagcgacaagagcgtgtgtctgttcaccgacttcgacagccagaccaacgtgtcccagagcaaggactccgacgtgtacatcaccgataagtgcgtgctggacatgcggagcatggacttcaagagcaactccgccgtggcctggtccaacaagtccgatttcgcctgcgccaacgccttcaacaacagcattatccccgaggacacattcttcccaagccccgagagcagctgcgacgtgaagctggtggaaaagagcttcgagacagacaccaacctgaacttccagaacctgagcgtgatcggcttcagaatcctgctgctgaaagtggccggctttaacctgctgatgaccctgcggctgtggtccagc

SEQ ID NO: 8581 - DNA, 2676 bp, Artificial Sequence
  Synthetic Polynucloetide
atggccttaccagtgaccgccttgctcctgccgctggccttgctgctccacgccgccaggccggaagtgcaggttttggagtctggcggaggactggttcagcctggcggatctctgagactgtcttgtgccgccagcggcttcaccttcagcaactttgccatgagctgggtccgacaggcccctggcaaaggacttgaatgggtgtccacaatcagcggcagcgccggcacaacagattacgccgattctgtgaagggcagattcaccatcagccgggacaacagcaagaaaaccctgtacctccagatgaacagcctgcgcgtggaagataccgccgtgtactactgtgccgatggcagaggccccttcttcgattatcgcggccagggcacactggtcaccgtttcttctggtaccggcggaggcggatctggcggcggaggtagcggtggcggaggatctgaattcgacatccagatgacacagagccctagcagcctgtctgccagcgtgggagacagagtgaccatcacctgtagagccagccagagcatcaacaagtggctgaactggtatcagcagaagcccggcaaggcccctaagctgctgatctatgccgccagctctctccagagcggagtgcctagcagattttctggcagcggctccggcaccgatttcaccctgacaatatccagcctccagcctgaggacttcgccacctactactgccagcaggactacaacttcccctacaccttcggccagggcaccaaggtggaaatcaaaagactcgaggacctgaagaacgtgttcccacctgaggtggccgtgttcgagcctagcgaggccgagatcagccacacccagaaagccaccctcgtgtgcctggctaccggcttctaccccgaccatgtggaactgtcttggtgggtcaacggcaaagaggtgcacagcggcgtgtgtaccgacccccagccactgaaagaacagcccgccctgaacgacagccggtactgcctgagcagcagactgagagtgtccgccaccttctggcagaacccccggaaccacttcagatgccaggtgcagttctacggcctgagcgagaacgacgagtggacccaggacagagccaagcccgtgacccagatcgtgtctgccgaagcctggggcagagccgattgcggctttaccagcgagagctaccagcagggcgtgctgagcgccaccatcctgtacgagatcctgctgggcaaggccaccctgtacgccgtgctggtgtctgccctggtgctgatggctatggtcaagcggaaggacagccggggaagggccaagcgatctggatctggagcaacaaacttctcactactcaaacaagcaggtgacgtggaggagaatcccgggcctactagtatggactggatttggcgcatccttttccttgtcggcgctgctaccggcgcccattccgggcccgaagtgcagctggttgaatctggcggaggactggttcaggctggcggatctctgagactgtcttgtgccgccagcggcagaacctttagcatgggctggtttagacaggcccctggcaaagagagagagttcgtcgccgccatcacatacagcggcggcagcccttactacgcctcttctgtcagaggccggttcaccatcagccgggacaacgccaagaacaccgtgtacctccagatgaacagcctgaagccagaggacaccgccgtgtactactgtgccgccaatccaacctacggcagcgactggaatgccgagaattggggccagggcacccaagtgacagtgtctagtggatccggcggcggaggatctggcggaggcggatctgggggcggaggctctttcgaacaagttcagctggttcagagcggcgctgaagtgaagaaacctggcagcagcgtgaaggtgtcctgcaaagcaagcggcggcacctttagcagctacggcatctcttgggtccgacaggctcctggacaaggactggaatggatgggctggatcagcgccatcttcggcacagccaattacgcccagaaattccagggccgcgtgacaatcacagccgacgagtctacaagcaccgcctacatggaactgagcagcctgagaagcgaggacaccgccgtgtactattgtgccagaggcgtggcctcctggtatctggattattggggccagggaaccctggtcaccgtgtcatctacgcgtatccagaaccctgatcctgccgtgtaccagctgcgggatagcaagagcagcgacaagagcgtgtgtctgttcaccgacttcgacagccagaccaacgtgtcccagagcaaggactccgacgtgtacatcaccgataagtgcgtgctggacatgcggagcatggacttcaagagcaactccgccgtggcctggtccaacaagtccgatttcgcctgcgccaacgccttcaacaacagcattatccccgaggacacattcttcccaagccccgagagcagctgcgacgtgaagctggtggaaaagagcttcgagacagacaccaacctgaacttccagaacctgagcgtgatcggcttcagaatcctgctgctgaaagtggccggctttaacctgctgatgaccctgcggctgtggtccagc

SEQ ID NO: 8582 - DNA, 2172 bp, Artificial Sequence
  Synthetic Polynucloetide
atggccttaccagtgaccgccttgctcctgccgctggccttgctgctccacgccgccaggccgcagatcgtgctgtctcagtctcctgccatcctgagtgcctctccaggcgagaaagtgaccatgacctgtagagccagcagcagcgtgtcctacatccactggttccagcagaagcctggcagcagccctaagccttggatctacgccaccagcaatctggcctctggcgtgccagtcagattttctggcagcggctctggcaccagctacagcctgacaatcagcagagtggaagccgaggatgccgccacctactactgtcagcagtggacctccaatcctcctacctttggcggaggcaccaagctggaaatcaaaggcggaggcggaagtggaggcggaggatctggcggcggaggctctcaggttcagctgcaacagcctggcgctgagcttgtgaaacctggcgcttccgtgaagatgagctgcaaggccagcggctacaccttcaccagctataacatgcactgggtcaagcagaccccaggcagaggactggaatggatcggagccatctatcccggcaacggcgacacctcctacaaccagaagttcaagggcaaagccacactgaccgccgacaagagcagcagcacagcctacatgcagctgagcagcctgaccagcgaagatagcgccgtgtactactgcgcccggtctacctattatggcggcgactggtacttcaacgtgtggggagctggcaccaccgtgacagtttctacgcgtgagcagaaactgatctcggaagaggatctggcgaagcccaccacgacgccagcgccgcgaccaccaacaccggcgcccaccatcgcgtcgcagcccctgtccctgcgcccagaggcgtgccggccagcggcggggggcgcagtgcacacgagggggctggacttcgcctgtgacatctacatctgggcgcccttggccgggacttgtggggtccttctcctgtcactggttatcaccctttactgcaaacggggcagaaagaaactcctgtatatattcaaacaaccatttatgagaccagtacaaactactcaagaggaagatggctgtagctgccgatttccagaagaagaagaaggaggatgtgaactgagagtgaagttcagcaggagcgcagacgcccccgcgtaccagcagggccagaaccagctctataacgagctgaatctaggacgaagagaggagtacgatgttttggacaagagacgtggccgggaccctgagatggggggaaagccgagaaggaagaaccctcaggaaggcctgtacaatgaactgcagaaagataagatggcggaggcctacagtgagattgggatgaaaggcgagcgccggaggggcaaggggcacgatggcctttaccagggtctcagtacagccaccaaggacacctacgacgcccttcacatgcaggccctgccccctcgctctagtggctccggcgagggcagaggaagtctactaacctgcggagatgtggaagaaaatcctggcccacatatgaccgagtacaagcccacggtgcgcctcgccacccgcgacgacgtccccagggccgtacgcaccctcgccgccgcgttcgccgactaccccgccacgcgccacaccgtcgatccggaccgccacatcgagcgggtcaccgagctgcaagaactcttcctcacgcgcgtcgggctcgacatcggcaaggtgtgggtcgcggacgacggcgccgcggtggcggtctggaccacgccggagagcgtcgaagcgggggcggtgttcgccgagatcggcccgcgcatggccgagttgagcggttcccggctggccgcgcagcaacagatggaaggcctcctggcgccgcaccggcccaaggagcccgcgtggttcctggccaccgtcggcgtctcgcccgaccaccagggcaagggtctgggcagcgccgtcgtgctccccggagtggaggcggccgagcgcgccggggtgcccgccttcctggagacctccgcgccccgcaacctccccttctacgagcggctcggcttcaccgtcaccgccgacgtcgaggtgcccgaaggaccgcgcacctggtgcatgacccgcaagcccggtgcctga

SEQ ID NO: 8583 - DNA, 2154 bp, Artificial Sequence
  Synthetic Polynucloetide
atggccttaccagtgaccgccttgctcctgccgctggccttgctgctccacgccgccaggccgcagatcgtgctgtctcagtctcctgccatcctgagtgcctctccaggcgagaaagtgaccatgacctgtagagccagcagcagcgtgtcctacatccactggttccagcagaagcctggcagcagccctaagccttggatctacgccaccagcaatctggcctctggcgtgccagtcagattttctggcagcggctctggcaccagctacagcctgacaatcagcagagtggaagccgaggatgccgccacctactactgtcagcagtggacctccaatcctcctacctttggcggaggcaccaagctggaaatcaaaggcggaggcggaagtggaggcggaggatctggcggcggaggctctcaggttcagctgcaacagcctggcgctgagcttgtgaaacctggcgcttccgtgaagatgagctgcaaggccagcggctacaccttcaccagctataacatgcactgggtcaagcagaccccaggcagaggactggaatggatcggagccatctatcccggcaacggcgacacctcctacaaccagaagttcaagggcaaagccacactgaccgccgacaagagcagcagcacagcctacatgcagctgagcagcctgaccagcgaagatagcgccgtgtactactgcgcccggtctacctattatggcggcgactggtacttcaacgtgtggggagctggcaccaccgtgacagtttctacgcgtgagcagaaactgatctcggaagaggatctgaaaattgaagttatgtatcctcctccttacctagacaatgagaagagcaatggaaccattatccatgtgaaagggaaacacctttgtccaagtcccctatttcccggaccttctaagcccttttgggtgctggtggtggttgggggagtcctggcttgctatagcttgctagtaacagtggcctttattattttctgggtgaggagtaagaggagcaggctcctgcacagtgactacatgaacatgactccacgccgccccggacccacccgcaagcattaccagccctatgccccaccacgcgacttcgcagcctatcgctccagagtgaagttcagcaggagcgcagacgcccccgcgtaccagcagggccagaaccagctctataacgagctcaatctaggacgaagagaggagtacgatgttttggacaagagacgtggccgggaccctgagatggggggaaagccgagaaggaagaaccctcaggaaggcctgtacaatgaactgcagaaagataagatggcggaggcctacagtgagattgggatgaaaggcgagcgccggaggggcaaggggcacgatggcctttaccagggtctcagtacagccaccaaggacacctacgacgcccttcacatgcaggccctgccccctcgctctagtggctccggcgagggcagaggaagtctactaacctgcggagatgtggaagaaaatcctggcccacatatgaccgagtacaagcccacggtgcgcctcgccacccgcgacgacgtccccagggccgtacgcaccctcgccgccgcgttcgccgactaccccgccacgcgccacaccgtcgatccggaccgccacatcgagcgggtcaccgagctgcaagaactcttcctcacgcgcgtcgggctcgacatcggcaaggtgtgggtcgcggacgacggcgccgcggtggcggtctggaccacgccggagagcgtcgaagcgggggcggtgttcgccgagatcggcccgcgcatggccgagttgagcggttcccggctggccgcgcagcaacagatggaaggcctcctggcgccgcaccggcccaaggagcccgcgtggttcctggccaccgtcggcgtctcgcccgaccaccagggcaagggtctgggcagcgccgtcgtgctccccggagtggaggcggccgagcgcgccggggtgcccgccttcctggagacctccgcgccccgcaacctccccttctacgagcggctcggcttcaccgtcaccgccgacgtcgaggtgcccgaaggaccgcgcacctggtgcatgacccgcaagcccggtgcctga

SEQ ID NO: 8584 - DNA, 1482 bp, Artificial Sequence
  Synthetic Polynucloetide
atggccttaccagtgaccgccttgctcctgccgctggccttgctgctccacgccgccaggccgcagatcgtgctgtctcagtctcctgccatcctgagtgcctctccaggcgagaaagtgaccatgacctgtagagccagcagcagcgtgtcctacatccactggttccagcagaagcctggcagcagccctaagccttggatctacgccaccagcaatctggcctctggcgtgccagtcagattttctggcagcggctctggcaccagctacagcctgacaatcagcagagtggaagccgaggatgccgccacctactactgtcagcagtggacctccaatcctcctacctttggcggaggcaccaagctggaaatcaaaggcggaggcggaagtggaggcggaggatctggcggcggaggctctcaggttcagctgcaacagcctggcgctgagcttgtgaaacctggcgcttccgtgaagatgagctgcaaggccagcggctacaccttcaccagctataacatgcactgggtcaagcagaccccaggcagaggactggaatggatcggagccatctatcccggcaacggcgacacctcctacaaccagaagttcaagggcaaagccacactgaccgccgacaagagcagcagcacagcctacatgcagctgagcagcctgaccagcgaagatagcgccgtgtactactgcgcccggtctacctattatggcggcgactggtacttcaacgtgtggggagctggcaccaccgtgacagtttctacgcgtgagcagaaactgatctcggaagaggatctgaaaattgaagttatgtatcctcctccttacctagacaatgagaagagcaatggaaccattatccatgtgaaagggaaacacctttgtccaagtcccctatttcccggaccttctaagcccttttgggtgctggtggtggttgggggagtcctggcttgctatagcttgctagtaacagtggcctttattattttctgggtgaggagtaagaggagcaggctcctgcacagtgactacatgaacatgactccacgccgccccggacccacccgcaagcattaccagccctatgccccaccacgcgacttcgcagcctatcgctccagagtgaagttcagcaggagcgcagacgcccccgcgtaccagcagggccagaaccagctctataacgagctcaatctaggacgaagagaggagtacgatgttttggacaagagacgtggccgggaccctgagatggggggaaagccgagaaggaagaaccctcaggaaggcctgtacaatgaactgcagaaagataagatggcggaggcctacagtgagattgggatgaaaggcgagcgccggaggggcaaggggcacgatggcctttaccagggtctcagtacagccaccaaggacacctacgacgcccttcacatgcaggccctgccccctcgc

SEQ ID NO: 8585 - DNA, 1503 bp, Artificial Sequence
  Synthetic Polynucloetide
atggccttaccagtgaccgccttgctcctgccgctggccttgctgctccacgccgccaggccgcagatcgtgctgtctcagtctcctgccatcctgagtgcctctccaggcgagaaagtgaccatgacctgtagagccagcagcagcgtgtcctacatccactggttccagcagaagcctggcagcagccctaagccttggatctacgccaccagcaatctggcctctggcgtgccagtcagattttctggcagcggctctggcaccagctacagcctgacaatcagcagagtggaagccgaggatgccgccacctactactgtcagcagtggacctccaatcctcctacctttggcggaggcaccaagctggaaatcaaaggcggaggcggaagtggaggcggaggatctggcggcggaggctctcaggttcagctgcaacagcctggcgctgagcttgtgaaacctggcgcttccgtgaagatgagctgcaaggccagcggctacaccttcaccagctataacatgcactgggtcaagcagaccccaggcagaggactggaatggatcggagccatctatcccggcaacggcgacacctcctacaaccagaagttcaagggcaaagccacactgaccgccgacaagagcagcagcacagcctacatgcagctgagcagcctgaccagcgaagatagcgccgtgtactactgcgcccggtctacctattatggcggcgactggtacttcaacgtgtggggagctggcaccaccgtgacagtttctacgcgtgagcagaaactgatctcggaagaggatctggcgaagcccaccacgacgccagcgccgcgaccaccaacaccggcgcccaccatcgcgtcgcagcccctgtccctgcgcccagaggcgtgccggccagcggcggggggcgcagtgcacacgagggggctggacttcgcctgtgacatctacatctgggcgcccttggccgggacttgtggggtccttctcctgtcactggttatcaccctttactgcaaacggggcagaaagaaactcctgtatatattcaaacaaccatttatgagaccagtacaaactactcaagaggaagatggctgtagctgccgatttccagaagaagaagaaggaggatgtgaactgagagtgaagttcagcaggagcgcagacgcccccgcgtaccagcagggccagaaccagctctataacgagctgaatctaggacgaagagaggagtacgatgttttggacaagagacgtggccgggaccctgagatggggggaaagccgagaaggaagaaccctcaggaaggcctgtacaatgaactgcagaaagataagatggcggaggcctacagtgagattgggatgaaaggcgagcgccggaggggcaaggggcacgatggcctttaccagggtctcagtacagccaccaaggacacctacgacgcccttcacatgcaggccctgccccctcgctga

SEQ ID NO: 8586 - DNA, 1503 bp, Artificial Sequence
  Synthetic Polynucloetide
atggccttaccagtgaccgccttgctcctgccgctggccttgctgctccacgccgccaggccgcaggttcagctgcaacagcctggcgctgagcttgtgaaacctggcgcttccgtgaagatgagctgcaaggccagcggctacaccttcaccagctataacatgcactgggtcaagcagaccccaggcagaggactggaatggatcggagccatctatcccggcaacggcgacacctcctacaaccagaagttcaagggcaaagccacactgaccgccgacaagagcagcagcacagcctacatgcagctgagcagcctgaccagcgaagatagcgccgtgtactactgcgcccggtctacctattatggcggcgactggtacttcaacgtgtggggagctggcaccaccgtgacagtttctggcggaggcggaagtggaggcggaggatctggcggcggaggctctcagatcgtgctgtctcagtctcctgccatcctgagtgcctctccaggcgagaaagtgaccatgacctgtagagccagcagcagcgtgtcctacatccactggttccagcagaagcctggcagcagccctaagccttggatctacgccaccagcaatctggcctctggcgtgccagtcagattttctggcagcggctctggcaccagctacagcctgacaatcagcagagtggaagccgaggatgccgccacctactactgtcagcagtggacctccaatcctcctacctttggcggaggcaccaagctggaaatcaaaacgcgtgagcagaaactgatctcggaagaggatctggcgaagcccaccacgacgccagcgccgcgaccaccaacaccggcgcccaccatcgcgtcgcagcccctgtccctgcgcccagaggcgtgccggccagcggcggggggcgcagtgcacacgagggggctggacttcgcctgtgacatctacatctgggcgcccttggccgggacttgtggggtccttctcctgtcactggttatcaccctttactgcaaacggggcagaaagaaactcctgtatatattcaaacaaccatttatgagaccagtacaaactactcaagaggaagatggctgtagctgccgatttccagaagaagaagaaggaggatgtgaactgagagtgaagttcagcaggagcgcagacgcccccgcgtaccagcagggccagaaccagctctataacgagctgaatctaggacgaagagaggagtacgatgttttggacaagagacgtggccgggaccctgagatggggggaaagccgagaaggaagaaccctcaggaaggcctgtacaatgaactgcagaaagataagatggcggaggcctacagtgagattgggatgaaaggcgagcgccggaggggcaaggggcacgatggcctttaccagggtctcagtacagccaccaaggacacctacgacgcccttcacatgcaggccctgccccctcgctga

SEQ ID NO: 8587 - DNA, 2742 bp, Artificial Sequence
  Synthetic Polynucloetide
atggccttaccagtgaccgccttgctcctgccgctggccttgctgctccacgccgccaggccgcagatcgtgctgtctcagtctcctgccatcctgagtgcctctccaggcgagaaagtgaccatgacctgtagagccagcagcagcgtgtcctacatccactggttccagcagaagcctggcagcagccctaagccttggatctacgccaccagcaatctggcctctggcgtgccagtcagattttctggcagcggctctggcaccagctacagcctgacaatcagcagagtggaagccgaggatgccgccacctactactgtcagcagtggacctccaatcctcctacctttggcggaggcaccaagctggaaatcaaaggcggaggcggaagtggaggcggaggatctggcggcggaggctctcaggttcagctgcaacagcctggcgctgagcttgtgaaacctggcgcttccgtgaagatgagctgcaaggccagcggctacaccttcaccagctataacatgcactgggtcaagcagaccccaggcagaggactggaatggatcggagccatctatcccggcaacggcgacacctcctacaaccagaagttcaagggcaaagccacactgaccgccgacaagagcagcagcacagcctacatgcagctgagcagcctgaccagcgaagatagcgccgtgtactactgcgcccggtctacctattatggcggcgactggtacttcaacgtgtggggagctggcaccaccgtgacagtttctacgcgtgagcagaaactgatctcggaagaggatctggcgaagcccaccacgacgccagcgccgcgaccaccaacaccggcgcccaccatcgcgtcgcagcccctgtccctgcgcccagaggcgtgccggccagcggcggggggcgcagtgcacacgagggggctggacttcgcctgtgacatctacatctgggcgcccttggccgggacttgtggggtccttctcctgtcactggttatcaccctttactgcgggcgcgccagagtgaagttcagcaggagcgcagacgcccccgcgtaccagcagggccagaaccagctctataacgagctgaatctaggacgaagagaggagtacgatgttttggacaagagacgtggccgggaccctgagatggggggaaagccgagaaggaagaaccctcaggaaggcctgtacaatgaactgcagaaagataagatggcggaggcctacagtgagattgggatgaaaggcgagcgccggaggggcaaggggcacgatggcctttaccagggtctcagtacagccaccaaggacacctacgacgcccttcacatgcaggccctgccccctcgctctagaggatctggagcaacaaacttctcactactcaaacaagcaggtgacgtggaggagaatcccgggcctgggatccacatggccacttacgaggttctctgtgaggtggcgcggaaactgggcacggatgacagggaagtggtattgttcctcctaaacgtgttcatacctcaacccacactggcccaattaattggagctcttagagctttaaaggaggagggcaggttaacgtttcccctgttagcggaatgtctgtttcgtgcaggtcgcagagacctcttgcgcgacctgcttcacttagacccgcgttttttagagcgccacctagcgggcacaatgagttatttcagcccttatcagctcactgttctccacgtagacggggagctgtgtgcgagggatattaggtctttgatatttttaagcaaggacactatagggtctcgcagcacaccacagacattcttacactgggtgtactgtatggaaaacttagacctactgggtcccactgacgtggatgccctaatgtcaatgcttagatctttgtcaagagtagacctacagcgccaagtgcaaaccctaatgggccttcacctttccggcccatcacactcccaacactatcgccatacaccactcgagaccgatttctacgactacaaggacgacgatgacaagactagtggctccggcgagggcagaggaagtctactaacctgcggagatgtggaagaaaatcctggcccacatatgaccgagtacaagcccacggtgcgcctcgccacccgcgacgacgtccccagggccgtacgcaccctcgccgccgcgttcgccgactaccccgccacgcgccacaccgtcgatccggaccgccacatcgagcgggtcaccgagctgcaagaactcttcctcacgcgcgtcgggctcgacatcggcaaggtgtgggtcgcggacgacggcgccgcggtggcggtctggaccacgccggagagcgtcgaagcgggggcggtgttcgccgagatcggcccgcgcatggccgagttgagcggttcccggctggccgcgcagcaacagatggaaggcctcctggcgccgcaccggcccaaggagcccgcgtggttcctggccaccgtcggcgtctcgcccgaccaccagggcaagggtctgggcagcgccgtcgtgctccccggagtggaggcggccgagcgcgccggggtgcccgccttcctggagacctccgcgccccgcaacctccccttctacgagcggctcggcttcaccgtcaccgccgacgtcgaggtgcccgaaggaccgcgcacctggtgcatgacccgcaagcccggtgcctga

SEQ ID NO: 8588 - DNA, 2562 bp, Artificial Sequence
  Synthetic Polynucloetide
atggccttaccagtgaccgccttgctcctgccgctggccttgctgctccacgccgccaggccgcagatcgtgctgtctcagtctcctgccatcctgagtgcctctccaggcgagaaagtgaccatgacctgtagagccagcagcagcgtgtcctacatccactggttccagcagaagcctggcagcagccctaagccttggatctacgccaccagcaatctggcctctggcgtgccagtcagattttctggcagcggctctggcaccagctacagcctgacaatcagcagagtggaagccgaggatgccgccacctactactgtcagcagtggacctccaatcctcctacctttggcggaggcaccaagctggaaatcaaactcgagatccagaaccctgatcctgccgtgtaccagctgcgggatagcaagagcagcgacaagagcgtgtgtctgttcaccgacttcgacagccagaccaacgtgtcccagagcaaggactccgacgtgtacatcaccgataagtgcgtgctggacatgcggagcatggacttcaagagcaactccgccgtggcctggtccaacaagtccgatttcgcctgcgccaacgccttcaacaacagcattatccccgaggacacattcttcccaagcagcgacgtgccctgcgacgtgaagctggtggaaaagagcttcgagacagacaccaacctgaacttccagaacctgagcgtgatcggcttcagaatcctgctgctgaaagtggccggctttaacctgctgatgaccctgcggctgtggtccagccgcgccaagagaagcggatctggcgtgaagcagaccctgaatttcgacctgctgaagctggctggcgacgtggaatccaacccaggccctactagtatggactggatttggcgcatccttttccttgtcggcgctgctaccggcgcgcattccttcgaacaggttcagctgcaacagcctggcgctgagcttgtgaaacctggcgcttccgtgaagatgagctgcaaggccagcggctacaccttcaccagctataacatgcactgggtcaagcagaccccaggcagaggactggaatggatcggagccatctatcccggcaacggcgacacctcctacaaccagaagttcaagggcaaagccacactgaccgccgacaagagcagcagcacagcctacatgcagctgagcagcctgaccagcgaagatagcgccgtgtactactgcgcccggtctacctattatggcggcgactggtacttcaacgtgtggggagctggcaccaccgtgacagtttctacgcgtgaggacctgaagaacgtgttcccacctgaggtggccgtgttcgagcctagcaaggccgagatcgcccacacccagaaagccaccctcgtgtgcctggctaccggcttctaccccgaccatgtggaactgtcttggtgggtcaacggcaaagaggtgcacagcggcgtgtgtaccgacccccagccactgaaagaacagcccgccctgaacgacagccggtactgcctgagcagcagactgagagtgtccgccaccttctggcagaacccccggaaccacttcagatgccaggtgcagttctacggcctgagcgagaacgacgagtggacccaggacagagccaagcccgtgacccagatcgtgtctgccgaagcctggggcagagccgattgcggcatcaccagcgccagctaccaccagggcgtgctgagcgccaccatcctgtacgagatcctgctgggcaaggccaccctgtacgccgtgctggtgtctgccctggtgctgatggctatggtcaagcggaaggacagccggggaagggccaagcgatctggatctggagcaacaaacttctcactactcaaacaagcaggtgacgtggaggagaatcccgggccttctagaggccatatgaccgagtacaagcccacggtgcgcctcgccacccgcgacgacgtccccagggccgtacgcaccctcgccgccgcgttcgccgactaccccgccacgcgccacaccgtcgatccggaccgccacatcgagcgggtcaccgagctgcaagaactcttcctcacgcgcgtcgggctcgacatcggcaaggtgtgggtcgcggacgacggcgccgcggtggcggtctggaccacgccggagagcgtcgaagcgggggcggtgttcgccgagatcggcccgcgcatggccgagttgagcggttcccggctggccgcgcagcaacagatggaaggcctcctggcgccgcaccggcccaaggagcccgcgtggttcctggccaccgtcggcgtctcgcccgaccaccagggcaagggtctgggcagcgccgtcgtgctccccggagtggaggcggccgagcgcgccggggtgcccgccttcctggagacctccgcgccccgcaacctccccttctacgagcggctcggcttcaccgtcaccgccgacgtcgaggtgcccgaaggaccgcgcacctggtgcatgacccgcaagcccggtgcctga

SEQ ID NO: 8589 - DNA, 2559 bp, Artificial Sequence
  Synthetic Polynucloetide
atggccttaccagtgaccgccttgctcctgccgctggccttgctgctccacgccgccaggccgcagatcgtgctgtctcagtctcctgccatcctgagtgcctctccaggcgagaaagtgaccatgacctgtagagccagcagcagcgtgtcctacatccactggttccagcagaagcctggcagcagccctaagccttggatctacgccaccagcaatctggcctctggcgtgccagtcagattttctggcagcggctctggcaccagctacagcctgacaatcagcagagtggaagccgaggatgccgccacctactactgtcagcagtggacctccaatcctcctacctttggcggaggcaccaagctggaaatcaaactcgaggacctgaagaacgtgttcccacctgaggtggccgtgttcgagcctagcaaggccgagatcgcccacacccagaaagccaccctcgtgtgcctggctaccggcttctaccccgaccatgtggaactgtcttggtgggtcaacggcaaagaggtgcacagcggcgtgtgtaccgacccccagccactgaaagaacagcccgccctgaacgacagccggtactgcctgagcagcagactgagagtgtccgccaccttctggcagaacccccggaaccacttcagatgccaggtgcagttctacggcctgagcgagaacgacgagtggacccaggacagagccaagcccgtgacccagatcgtgtctgccgaagcctggggcagagccgattgcggcatcaccagcgccagctaccaccagggcgtgctgagcgccaccatcctgtacgagatcctgctgggcaaggccaccctgtacgccgtgctggtgtctgccctggtgctgatggctatggtcaagcggaaggacagccggggaagggccaagcgatctggatctggagcaacaaacttctcactactcaaacaagcaggtgacgtggaggagaatcccgggcctactagtatggactggatttggcgcatccttttccttgtcggcgctgctaccggcgcgcattccttcgaacaggttcagctgcaacagcctggcgctgagcttgtgaaacctggcgcttccgtgaagatgagctgcaaggccagcggctacaccttcaccagctataacatgcactgggtcaagcagaccccaggcagaggactggaatggatcggagccatctatcccggcaacggcgacacctcctacaaccagaagttcaagggcaaagccacactgaccgccgacaagagcagcagcacagcctacatgcagctgagcagcctgaccagcgaagatagcgccgtgtactactgcgcccggtctacctattatggcggcgactggtacttcaacgtgtggggagctggcaccaccgtgacagtttctacgcgtatccagaaccctgatcctgccgtgtaccagctgcgggatagcaagagcagcgacaagagcgtgtgtctgttcaccgacttcgacagccagaccaacgtgtcccagagcaaggactccgacgtgtacatcaccgataagtgcgtgctggacatgcggagcatggacttcaagagcaactccgccgtggcctggtccaacaagtccgatttcgcctgcgccaacgccttcaacaacagcattatccccgaggacacattcttcccaagcagcgacgtgccctgcgacgtgaagctggtggaaaagagcttcgagacagacaccaacctgaacttccagaacctgagcgtgatcggcttcagaatcctgctgctgaaagtggccggctttaacctgctgatgaccctgcggctgtggtccagccgcgccaagagaagcggatctggcgtgaagcagaccctgaatttcgacctgctgaagctggctggcgacgtggaatccaacccaggcccttctagaggccatatgaccgagtacaagcccacggtgcgcctcgccacccgcgacgacgtccccagggccgtacgcaccctcgccgccgcgttcgccgactaccccgccacgcgccacaccgtcgatccggaccgccacatcgagcgggtcaccgagctgcaagaactcttcctcacgcgcgtcgggctcgacatcggcaaggtgtgggtcgcggacgacggcgccgcggtggcggtctggaccacgccggagagcgtcgaagcgggggcggtgttcgccgagatcggcccgcgcatggccgagttgagcggttcccggctggccgcgcagcaacagatggaaggcctcctggcgccgcaccggcccaaggagcccgcgtggttcctggccaccgtcggcgtctcgcccgaccaccagggcaagggtctgggcagcgccgtcgtgctccccggagtggaggcggccgagcgcgccggggtgcccgccttcctggagacctccgcgccccgcaacctccccttctacgagcggctcggcttcaccgtcaccgccgacgtcgaggtgcccgaaggaccgcgcacctggtgcatgacccgcaagcccggtgcctga

SEQ ID NO: 8590 - DNA, 1857 bp, Artificial Sequence
  Synthetic Polynucloetide
atggccttaccagtgaccgccttgctcctgccgctggccttgctgctccacgccgccaggccgcagatcgtgctgtctcagtctcctgccatcctgagtgcctctccaggcgagaaagtgaccatgacctgtagagccagcagcagcgtgtcctacatccactggttccagcagaagcctggcagcagccctaagccttggatctacgccaccagcaatctggcctctggcgtgccagtcagattttctggcagcggctctggcaccagctacagcctgacaatcagcagagtggaagccgaggatgccgccacctactactgtcagcagtggacctccaatcctcctacctttggcggaggcaccaagctggaaatcaaactcgaggacctgaagaacgtgttcccacctgaggtggccgtgttcgagcctagcgaggccgagatcagccacacccagaaagccaccctcgtgtgcctggctaccggcttctaccccgaccatgtggaactgtcttggtgggtcaacggcaaagaggtgcacagcggcgtgtgtaccgacccccagccactgaaagaacagcccgccctgaacgacagccggtactgcctgagcagcagactgagagtgtccgccaccttctggcagaacccccggaaccacttcagatgccaggtgcagttctacggcctgagcgagaacgacgagtggacccaggacagagccaagcccgtgacccagatcgtgtctgccgaagcctggggcagagccgattgcggctttaccagcgagagctaccagcagggcgtgctgagcgccaccatcctgtacgagatcctgctgggcaaggccaccctgtacgccgtgctggtgtctgccctggtgctgatggctatggtcaagcggaaggacagccggggaagggccaagcgatctggatctggagcaacaaacttctcactactcaaacaagcaggtgacgtggaggagaatcccgggcctactagtatggactggatttggcgcatccttttccttgtcggcgctgctaccggcgcgcattccttcgaacaggttcagctgcaacagcctggcgctgagcttgtgaaacctggcgcttccgtgaagatgagctgcaaggccagcggctacaccttcaccagctataacatgcactgggtcaagcagaccccaggcagaggactggaatggatcggagccatctatcccggcaacggcgacacctcctacaaccagaagttcaagggcaaagccacactgaccgccgacaagagcagcagcacagcctacatgcagctgagcagcctgaccagcgaagatagcgccgtgtactactgcgcccggtctacctattatggcggcgactggtacttcaacgtgtggggagctggcaccaccgtgacagtttctacgcgtatccagaaccctgatcctgccgtgtaccagctgcgggatagcaagagcagcgacaagagcgtgtgtctgttcaccgacttcgacagccagaccaacgtgtcccagagcaaggactccgacgtgtacatcaccgataagtgcgtgctggacatgcggagcatggacttcaagagcaactccgccgtggcctggtccaacaagtccgatttcgcctgcgccaacgccttcaacaacagcattatccccgaggacacattcttcccaagccccgagagcagctgcgacgtgaagctggtggaaaagagcttcgagacagacaccaacctgaacttccagaacctgagcgtgatcggcttcagaatcctgctgctgaaagtggccggctttaacctgctgatgaccctgcggctgtggtccagc

SEQ ID NO: 8591 - DNA, 2532 bp, Artificial Sequence
  Synthetic Polynucloetide
atggccttaccagtgaccgccttgctcctgccgctggccttgctgctccacgccgccaggccgcagatcgtgctgtctcagtctcctgccatcctgagtgcctctccaggcgagaaagtgaccatgacctgtagagccagcagcagcgtgtcctacatccactggttccagcagaagcctggcagcagccctaagccttggatctacgccaccagcaatctggcctctggcgtgccagtcagattttctggcagcggctctggcaccagctacagcctgacaatcagcagagtggaagccgaggatgccgccacctactactgtcagcagtggacctccaatcctcctacctttggcggaggcaccaagctggaaatcaaactcgaggacctgaagaacgtgttcccacctgaggtggccgtgttcgagcctagcgaggccgagatcagccacacccagaaagccaccctcgtgtgcctggctaccggcttctaccccgaccatgtggaactgtcttggtgggtcaacggcaaagaggtgcacagcggcgtgtgtaccgacccccagccactgaaagaacagcccgccctgaacgacagccggtactgcctgagcagcagactgagagtgtccgccaccttctggcagaacccccggaaccacttcagatgccaggtgcagttctacggcctgagcgagaacgacgagtggacccaggacagagccaagcccgtgacccagatcgtgtctgccgaagcctggggcagagccgattgcggctttaccagcgagagctaccagcagggcgtgctgagcgccaccatcctgtacgagatcctgctgggcaaggccaccctgtacgccgtgctggtgtctgccctggtgctgatggctatggtcaagcggaaggacagccggggaagggccaagcgatctggatctggagcaacaaacttctcactactcaaacaagcaggtgacgtggaggagaatcccgggcctactagtatggactggatttggcgcatccttttccttgtcggcgctgctaccggcgcgcattccttcgaacaggttcagctgcaacagcctggcgctgagcttgtgaaacctggcgcttccgtgaagatgagctgcaaggccagcggctacaccttcaccagctataacatgcactgggtcaagcagaccccaggcagaggactggaatggatcggagccatctatcccggcaacggcgacacctcctacaaccagaagttcaagggcaaagccacactgaccgccgacaagagcagcagcacagcctacatgcagctgagcagcctgaccagcgaagatagcgccgtgtactactgcgcccggtctacctattatggcggcgactggtacttcaacgtgtggggagctggcaccaccgtgacagtttctacgcgtatccagaaccctgatcctgccgtgtaccagctgcgggatagcaagagcagcgacaagagcgtgtgtctgttcaccgacttcgacagccagaccaacgtgtcccagagcaaggactccgacgtgtacatcaccgataagtgcgtgctggacatgcggagcatggacttcaagagcaactccgccgtggcctggtccaacaagtccgatttcgcctgcgccaacgccttcaacaacagcattatccccgaggacacattcttcccaagccccgagagcagctgcgacgtgaagctggtggaaaagagcttcgagacagacaccaacctgaacttccagaacctgagcgtgatcggcttcagaatcctgctgctgaaagtggccggctttaacctgctgatgaccctgcggctgtggtccagccgcgccaagagaagcggatctggcgtgaagcagaccctgaatttcgacctgctgaagctggctggcgacgtggaatccaacccaggcccttctagaggcgggatccacaccatggctacctacgaggtgctgtgcgaggtggcaagaaagctgggcaccgacgacagagaagtggtgctgttcctgctgaacgtgttcatccctcagcctacactggcccagctgatcggtgcactgagagccctgaaagaggaaggccggctgacctttcctctgctggccgaatgcctgttcagagccggaagaagggatctgctgcgggacctgctgcatctggaccccagatttctggaaagacacctggccggcaccatgagctacttcagcccttaccagctgaccgtgctgcacgttgacggcgaactgtgcgccagagatattcggagcctgatcttcctgagcaaggacaccatcggcagccggtctacccctcagacatttctgcactgggtgtactgcatggaaaacctggacctgctcggccccacagatgtggatgccctgatgtccatgctgagaagcctgagcagagtggacctccagagacaggtgcagacactgatgggactgcacctgagcggacctagccacagccagcactacagacacacccct

SEQ ID NO: 8592 - DNA, 1869 bp, Artificial Sequence
  Synthetic Polynucloetide
atggccttaccagtgaccgccttgctcctgccgctggccttgctgctccacgccgccaggccgcagatcgtgctgtctcagtctcctgccatcctgagtgcctctccaggcgagaaagtgaccatgacctgtagagccagcagcagcgtgtcctacatccactggttccagcagaagcctggcagcagccctaagccttggatctacgccaccagcaatctggcctctggcgtgccagtcagattttctggcagcggctctggcaccagctacagcctgacaatcagcagagtggaagccgaggatgccgccacctactactgtcagcagtggacctccaatcctcctacctttggcggaggcaccaagctggaaatcaaactcgagatccagaaccctgatcctgccgtgtaccagctgcgggatagcaagagcagcgacaagagcgtgtgtctgttcaccgacttcgacagccagaccaacgtgtcccagagcaaggactccgacgtgtacatcaccgataagtgcgtgctggacatgcggagcatggacttcaagagcaactccgccgtggcctggtccaacaagtccgatttcgcctgcgccaacgccttcaacaacagcattatccccgaggacacattcttcccaagccccgagagcagctgcgacgtgaagctggtggaaaagagcttcgagacagacaccaacctgaacttccagaacctgagcgtgatcggcttcagaatcctgctgctgaaagtggccggctttaacctgctgatgaccctgcggctgtggtccagccgcgccaagagaagcggatctggcgtgaagcagaccctgaatttcgacctgctgaagctggctggcgacgtggaatccaacccaggccctactagtatggactggatttggcgcatccttttccttgtcggcgctgctaccggcgcgcattccttcgaacaggttcagctgcaacagcctggcgctgagcttgtgaaacctggcgcttccgtgaagatgagctgcaaggccagcggctacaccttcaccagctataacatgcactgggtcaagcagaccccaggcagaggactggaatggatcggagccatctatcccggcaacggcgacacctcctacaaccagaagttcaagggcaaagccacactgaccgccgacaagagcagcagcacagcctacatgcagctgagcagcctgaccagcgaagatagcgccgtgtactactgcgcccggtctacctattatggcggcgactggtacttcaacgtgtggggagctggcaccaccgtgacagtttctacgcgtgaggacctgaagaacgtgttcccacctgaggtggccgtgttcgagcctagcgaggccgagatcagccacacccagaaagccaccctcgtgtgcctggctaccggcttctaccccgaccatgtggaactgtcttggtgggtcaacggcaaagaggtgcacagcggcgtgtgtaccgacccccagccactgaaagaacagcccgccctgaacgacagccggtactgcctgagcagcagactgagagtgtccgccaccttctggcagaacccccggaaccacttcagatgccaggtgcagttctacggcctgagcgagaacgacgagtggacccaggacagagccaagcccgtgacccagatcgtgtctgccgaagcctggggcagagccgattgcggctttaccagcgagagctaccagcagggcgtgctgagcgccaccatcctgtacgagatcctgctgggcaaggccaccctgtacgccgtgctggtgtctgccctggtgctgatggctatggtcaagcggaaggacagccgggga

SEQ ID NO: 8593 - DNA, 2535 bp, Artificial Sequence
  Synthetic Polynucloetide
atggccttaccagtgaccgccttgctcctgccgctggccttgctgctccacgccgccaggccgcagatcgtgctgtctcagtctcctgccatcctgagtgcctctccaggcgagaaagtgaccatgacctgtagagccagcagcagcgtgtcctacatccactggttccagcagaagcctggcagcagccctaagccttggatctacgccaccagcaatctggcctctggcgtgccagtcagattttctggcagcggctctggcaccagctacagcctgacaatcagcagagtggaagccgaggatgccgccacctactactgtcagcagtggacctccaatcctcctacctttggcggaggcaccaagctggaaatcaaactcgagatccagaaccctgatcctgccgtgtaccagctgcgggatagcaagagcagcgacaagagcgtgtgtctgttcaccgacttcgacagccagaccaacgtgtcccagagcaaggactccgacgtgtacatcaccgataagtgcgtgctggacatgcggagcatggacttcaagagcaactccgccgtggcctggtccaacaagtccgatttcgcctgcgccaacgccttcaacaacagcattatccccgaggacacattcttcccaagccccgagagcagctgcgacgtgaagctggtggaaaagagcttcgagacagacaccaacctgaacttccagaacctgagcgtgatcggcttcagaatcctgctgctgaaagtggccggctttaacctgctgatgaccctgcggctgtggtccagccgcgccaagagaagcggatctggcgtgaagcagaccctgaatttcgacctgctgaagctggctggcgacgtggaatccaacccaggccctactagtatggactggatttggcgcatccttttccttgtcggcgctgctaccggcgcgcattccttcgaacaggttcagctgcaacagcctggcgctgagcttgtgaaacctggcgcttccgtgaagatgagctgcaaggccagcggctacaccttcaccagctataacatgcactgggtcaagcagaccccaggcagaggactggaatggatcggagccatctatcccggcaacggcgacacctcctacaaccagaagttcaagggcaaagccacactgaccgccgacaagagcagcagcacagcctacatgcagctgagcagcctgaccagcgaagatagcgccgtgtactactgcgcccggtctacctattatggcggcgactggtacttcaacgtgtggggagctggcaccaccgtgacagtttctacgcgtgaggacctgaagaacgtgttcccacctgaggtggccgtgttcgagcctagcgaggccgagatcagccacacccagaaagccaccctcgtgtgcctggctaccggcttctaccccgaccatgtggaactgtcttggtgggtcaacggcaaagaggtgcacagcggcgtgtgtaccgacccccagccactgaaagaacagcccgccctgaacgacagccggtactgcctgagcagcagactgagagtgtccgccaccttctggcagaacccccggaaccacttcagatgccaggtgcagttctacggcctgagcgagaacgacgagtggacccaggacagagccaagcccgtgacccagatcgtgtctgccgaagcctggggcagagccgattgcggctttaccagcgagagctaccagcagggcgtgctgagcgccaccatcctgtacgagatcctgctgggcaaggccaccctgtacgccgtgctggtgtctgccctggtgctgatggctatggtcaagcggaaggacagccggggaagggccaagcgatctggatctggagcaacaaacttctcactactcaaacaagcaggtgacgtggaggagaatcccgggccttctagaggcgggatccacaccatggctacctacgaggtgctgtgcgaggtggcaagaaagctgggcaccgacgacagagaagtggtgctgttcctgctgaacgtgttcatccctcagcctacactggcccagctgatcggtgcactgagagccctgaaagaggaaggccggctgacctttcctctgctggccgaatgcctgttcagagccggaagaagggatctgctgcgggacctgctgcatctggaccccagatttctggaaagacacctggccggcaccatgagctacttcagcccttaccagctgaccgtgctgcacgttgacggcgaactgtgcgccagagatattcggagcctgatcttcctgagcaaggacaccatcggcagccggtctacccctcagacatttctgcactgggtgtactgcatggaaaacctggacctgctcggccccacagatgtggatgccctgatgtccatgctgagaagcctgagcagagtggacctccagagacaggtgcagacactgatgggactgcacctgagcggacctagccacagccagcactacagacacacccct

SEQ ID NO: 8594 - DNA, 2694 bp, Artificial Sequence
  Synthetic Polynucloetide
atggccttaccagtgaccgccttgctcctgccgctggccttgctgctccacgccgccaggccgctcgaggggaaaccaattcccaaccctcttctgggactggattcaaccggcagcggcgaggacctgaagaacgtgttcccacctgaggtggccgtgttcgagcctagcaaggccgagatcgcccacacccagaaagccaccctcgtgtgcctggctaccggcttctaccccgaccatgtggaactgtcttggtgggtcaacggcaaagaggtgcacagcggcgtgtgtaccgacccccagccactgaaagaacagcccgccctgaacgacagccggtactgcctgagcagcagactgagagtgtccgccaccttctggcagaacccccggaaccacttcagatgccaggtgcagttctacggcctgagcgagaacgacgagtggacccaggacagagccaagcccgtgacccagatcgtgtctgccgaagcctggggcagagccgattgcggcatcaccagcgccagctaccaccagggcgtgctgagcgccaccatcctgtacgagatcctgctgggcaaggccaccctgtacgccgtgctggtgtctgccctggtgctgatggctatggtcaagcggaaggacagccggggaagggccaagcgatctggatctggagcaacaaacttctcactactcaaacaagcaggtgacgtggaggagaatcccgggcctactagcatggccttaccagtgaccgccttgctcctgccgctggccttgctgctccacgccgccaggccgcagatcgtgctgtctcagtctcctgccatcctgagtgcctctccaggcgagaaagtgaccatgacctgtagagccagcagcagcgtgtcctacatccactggttccagcagaagcctggcagcagccctaagccttggatctacgccaccagcaatctggcctctggcgtgccagtcagattttctggcagcggctctggcaccagctacagcctgacaatcagcagagtggaagccgaggatgccgccacctactactgtcagcagtggacctccaatcctcctacctttggcggaggcaccaagctggaaatcaaaggcggaggcggaagtggaggcggaggatctggcggcggaggctctcaggttcagctgcaacagcctggcgctgagcttgtgaaacctggcgcttccgtgaagatgagctgcaaggccagcggctacaccttcaccagctataacatgcactgggtcaagcagaccccaggcagaggactggaatggatcggagccatctatcccggcaacggcgacacctcctacaaccagaagttcaagggcaaagccacactgaccgccgacaagagcagcagcacagcctacatgcagctgagcagcctgaccagcgaagatagcgccgtgtactactgcgcccggtctacctattatggcggcgactggtacttcaacgtgtggggagctggcaccaccgtgacagtttctacgcgtgagcagaaactgatctcggaagaggatgggagcggcatccagaaccctgatcctgccgtgtaccagctgcgggatagcaagagcagcgacaagagcgtgtgtctgttcaccgacttcgacagccagaccaacgtgtcccagagcaaggactccgacgtgtacatcaccgataagtgcgtgctggacatgcggagcatggacttcaagagcaactccgccgtggcctggtccaacaagtccgatttcgcctgcgccaacgccttcaacaacagcattatccccgaggacacattcttcccaagcagcgacgtgccctgcgacgtgaagctggtggaaaagagcttcgagacagacaccaacctgaacttccagaacctgagcgtgatcggcttcagaatcctgctgctgaaagtggccggctttaacctgctgatgaccctgcggctgtggtccagccgcgccaagagaagcggatctggcgtgaagcagaccctgaatttcgacctgctgaagctggctggcgacgtggaatccaacccaggcccttctagaggccatatgaccgagtacaagcccacggtgcgcctcgccacccgcgacgacgtccccagggccgtacgcaccctcgccgccgcgttcgccgactaccccgccacgcgccacaccgtcgatccggaccgccacatcgagcgggtcaccgagctgcaagaactcttcctcacgcgcgtcgggctcgacatcggcaaggtgtgggtcgcggacgacggcgccgcggtggcggtctggaccacgccggagagcgtcgaagcgggggcggtgttcgccgagatcggcccgcgcatggccgagttgagcggttcccggctggccgcgcagcaacagatggaaggcctcctggcgccgcaccggcccaaggagcccgcgtggttcctggccaccgtcggcgtctcgcccgaccaccagggcaagggtctgggcagcgccgtcgtgctccccggagtggaggcggccgagcgcgccggggtgcccgccttcctggagacctccgcgccccgcaacctccccttctacgagcggctcggcttcaccgtcaccgccgacgtcgaggtgcccgaaggaccgcgcacctggtgcatgacccgcaagcccggtgcctga

SEQ ID NO: 8595 - DNA, 2697 bp, Artificial Sequence
  Synthetic Polynucloetide
atggccttaccagtgaccgccttgctcctgccgctggccttgctgctccacgccgccaggccgctcgagcagaaactgatctcggaagaggatctgggctccggcgatcgccctgatcctgccgtgtaccagctgcgggatagcaagagcagcgacaagagcgtgtgtctgttcaccgacttcgacagccagaccaacgtgtcccagagcaaggactccgacgtgtacatcaccgataagtgcgtgctggacatgcggagcatggacttcaagagcaactccgccgtggcctggtccaacaagtccgatttcgcctgcgccaacgccttcaacaacagcattatccccgaggacacattcttcccaagccccgagagcagctgcgacgtgaagctggtggaaaagagcttcgagacagacaccaacctgaacttccagaacctgagcgtgatcggcttcagaatcctgctgctgaaagtggccggctttaacctgctgatgaccctgcggctgtggtccagctctagtcgcgccaagagaagcggatctggcgtgaagcagaccctgaatttcgacctgctgaagctggctggcgacgtggaatccaacccaggccccactagcatggccttaccagtgaccgccttgctcctgccgctggccttgctgctccacgccgccaggccgcagatcgtgctgtctcagtctcctgccatcctgagtgcctctccaggcgagaaagtgaccatgacctgtagagccagcagcagcgtgtcctacatccactggttccagcagaagcctggcagcagccctaagccttggatctacgccaccagcaatctggcctctggcgtgccagtcagattttctggcagcggctctggcaccagctacagcctgacaatcagcagagtggaagccgaggatgccgccacctactactgtcagcagtggacctccaatcctcctacctttggcggaggcaccaagctggaaatcaaaggcggaggcggaagtggaggcggaggatctggcggcggaggctctcaggttcagctgcaacagcctggcgctgagcttgtgaaacctggcgcttccgtgaagatgagctgcaaggccagcggctacaccttcaccagctataacatgcactgggtcaagcagaccccaggcagaggactggaatggatcggagccatctatcccggcaacggcgacacctcctacaaccagaagttcaagggcaaagccacactgaccgccgacaagagcagcagcacagcctacatgcagctgagcagcctgaccagcgaagatagcgccgtgtactactgcgcccggtctacctattatggcggcgactggtacttcaacgtgtggggagctggcaccaccgtgacagtttctacgcgtgggaaaccaattcccaaccctcttctgggactggattcaaccggcagcggcgaggacctgaagaacgtgttcccacctgaggtggccgtgttcgagcctagcgaggccgagatcagccacacccagaaagccaccctcgtgtgcctggctaccggcttctaccccgaccatgtggaactgtcttggtgggtcaacggcaaagaggtgcacagcggcgtgtgtaccgacccccagccactgaaagaacagcccgccctgaacgacagccggtactgcctgagcagcagactgagagtgtccgccaccttctggcagaacccccggaaccacttcagatgccaggtgcagttctacggcctgagcgagaacgacgagtggacccaggacagagccaagcccgtgacccagatcgtgtctgccgaagcctggggcagagccgattgcggctttaccagcgagagctaccagcagggcgtgctgagcgccaccatcctgtacgagatcctgctgggcaaggccaccctgtacgccgtgctggtgtctgccctggtgctgatggctatggtcaagcggaaggacagccggggaagggccaagcgatctggatctggagcaacaaacttctcactactcaaacaagcaggtgacgtggaggagaatcccgggccttctagaggccatatgaccgagtacaagcccacggtgcgcctcgccacccgcgacgacgtccccagggccgtacgcaccctcgccgccgcgttcgccgactaccccgccacgcgccacaccgtcgatccggaccgccacatcgagcgggtcaccgagctgcaagaactcttcctcacgcgcgtcgggctcgacatcggcaaggtgtgggtcgcggacgacggcgccgcggtggcggtctggaccacgccggagagcgtcgaagcgggggcggtgttcgccgagatcggcccgcgcatggccgagttgagcggttcccggctggccgcgcagcaacagatggaaggcctcctggcgccgcaccggcccaaggagcccgcgtggttcctggccaccgtcggcgtctcgcccgaccaccagggcaagggtctgggcagcgccgtcgtgctccccggagtggaggcggccgagcgcgccggggtgcccgccttcctggagacctccgcgccccgcaacctccccttctacgagcggctcggcttcaccgtcaccgccgacgtcgaggtgcccgaaggaccgcgcacctggtgcatgacccgcaagcccggtgcctga

SEQ ID NO: 8596 - DNA, 2559 bp, Artificial Sequence
  Synthetic Polynucloetide
atggccttaccagtgaccgccttgctcctgccgctggccttgctgctccacgccgccaggccgcagatcgtgctgtctcagtctcctgccatcctgagtgcctctccaggcgagaaagtgaccatgacctgtagagccagcagcagcgtgtcctacatccactggttccagcagaagcctggcagcagccctaagccttggatctacgccaccagcaatctggcctctggcgtgccagtcagattttctggcagcggctctggcaccagctacagcctgacaatcagcagagtggaagccgaggatgccgccacctactactgtcagcagtggacctccaatcctcctacctttggcggaggcaccaagctggaaatcaaactcgaggacctgaagaacgtgttcccacctgaggtggccgtgttcgagcctagcgaggccgagatcagccacacccagaaagccaccctcgtgtgcctggctaccggcttctaccccgaccatgtggaactgtcttggtgggtcaacggcaaagaggtgcacagcggcgtgtctaccgacccccagccactgaaagaacagcccgccctgaacgacagccggtactgcctgagcagcagactgagagtgtccgccaccttctggcagaacccccggaaccacttcagatgccaggtgcagttctacggcctgagcgagaacgacgagtggacccaggacagagccaagcccgtgacccagatcgtgtctgccgaagcctggggcagagccgattgcggctttaccagcgagagctaccagcagggcgtgctgagcgccaccatcctgtacgagatcctgctgggcaaggccaccctgtacgccgtgctggtgtctgccctggtgctgatggctatggtcaagcggaaggacagccggggaagggccaagcgatctggatctggagcaacaaacttctcactactcaaacaagcaggtgacgtggaggagaatcccgggcctactagtatggactggatttggcgcatccttttccttgtcggcgctgctaccggcgcgcattccttcgaacaggttcagctgcaacagcctggcgctgagcttgtgaaacctggcgcttccgtgaagatgagctgcaaggccagcggctacaccttcaccagctataacatgcactgggtcaagcagaccccaggcagaggactggaatggatcggagccatctatcccggcaacggcgacacctcctacaaccagaagttcaagggcaaagccacactgaccgccgacaagagcagcagcacagcctacatgcagctgagcagcctgaccagcgaagatagcgccgtgtactactgcgcccggtctacctattatggcggcgactggtacttcaacgtgtggggagctggcaccaccgtgacagtttctacgcgtatccagaaccctgatcctgccgtgtaccagctgcgggatagcaagagcagcgacaagagcgtgtgtctgttcaccgacttcgacagccagaccaacgtgtcccagagcaaggactccgacgtgtacatcaccgataagaccgtgctggacatgcggagcatggacttcaagagcaactccgccgtggcctggtccaacaagtccgatttcgcctgcgccaacgccttcaacaacagcattatccccgaggacacattcttcccaagccccgagagcagctgcgacgtgaagctggtggaaaagagcttcgagacagacaccaacctgaacttccagaacctgagcgtgatcggcttcagaatcctgctgctgaaagtggccggctttaacctgctgatgaccctgcggctgtggtccagccgcgccaagagaagcggatctggcgtgaagcagaccctgaatttcgacctgctgaagctggctggcgacgtggaatccaacccaggcccttctagaggccatatgaccgagtacaagcccacggtgcgcctcgccacccgcgacgacgtccccagggccgtacgcaccctcgccgccgcgttcgccgactaccccgccacgcgccacaccgtcgatccggaccgccacatcgagcgggtcaccgagctgcaagaactcttcctcacgcgcgtcgggctcgacatcggcaaggtgtgggtcgcggacgacggcgccgcggtggcggtctggaccacgccggagagcgtcgaagcgggggcggtgttcgccgagatcggcccgcgcatggccgagttgagcggttcccggctggccgcgcagcaacagatggaaggcctcctggcgccgcaccggcccaaggagcccgcgtggttcctggccaccgtcggcgtctcgcccgaccaccagggcaagggtctgggcagcgccgtcgtgctccccggagtggaggcggccgagcgcgccggggtgcccgccttcctggagacctccgcgccccgcaacctccccttctacgagcggctcggcttcaccgtcaccgccgacgtcgaggtgcccgaaggaccgcgcacctggtgcatgacccgcaagcccggtgcctga

SEQ ID NO: 8597 - DNA, 2805 bp, Artificial Sequence
  Synthetic Polynucloetide
atggccttaccagtgaccgccttgctcctgccgctggccttgctgctccacgccgccaggccgcagatcgtgctgtctcagtctcctgccatcctgagtgcctctccaggcgagaaagtgaccatgacctgtagagccagcagcagcgtgtcctacatccactggttccagcagaagcctggcagcagccctaagccttggatctacgccaccagcaatctggcctctggcgtgccagtcagattttctggcagcggctctggcaccagctacagcctgacaatcagcagagtggaagccgaggatgccgccacctactactgtcagcagtggacctccaatcctcctacctttggcggaggcaccaagctggaaatcaaactcgaggacctgaagaacgtgttcccacctgaggtggccgtgttcgagcctagcgaggccgagatcagccacacccagaaagccaccctcgtgtgcctggctaccggcttctaccccgaccatgtggaactgtcttggtgggtcaacggcaaagaggtgcacagcggcgtgtctaccgacccccagccactgaaagaacagcccgccctgaacgacagccggtactgcctgagcagcagactgagagtgtccgccaccttctggcagaacccccggaaccacttcagatgccaggtgcagttctacggcctgagcgagaacgacgagtggacccaggacagagccaagcccgtgacccagatcgtgtctgccgaagcctggggcagagccgattgcggctttaccagcgagagctaccagcagggcgtgctgagcgccaccatcctgtacgagatcctgctgggcaaggccaccctgtacgccgtgctggtgtctgccctggtgctgatggctatggtcaagcggaaggacagccggggaagggccaagcgatctggatctggagcaacaaacttctcactactcaaacaagcaggtgacgtggaggagaatcccgggcctactagtatggactggatttggcgcatccttttccttgtcggcgctgctaccggcgcgcattccttcgaacaggttcagctgcaacagcctggcgctgagcttgtgaaacctggcgcttccgtgaagatgagctgcaaggccagcggctacaccttcaccagctataacatgcactgggtcaagcagaccccaggcagaggactggaatggatcggagccatctatcccggcaacggcgacacctcctacaaccagaagttcaagggcaaagccacactgaccgccgacaagagcagcagcacagcctacatgcagctgagcagcctgaccagcgaagatagcgccgtgtactactgcgcccggtctacctattatggcggcgactggtacttcaacgtgtggggagctggcaccaccgtgacagtttctacgcgtgagcagaaactgatctcggaagaggatgggagcggcaccccattcccttctctggcccctcccatcatgctgctggtggacggcaagcagcagatggtggtcgtgtgcctggtgctggatgtggccccacctggactggacagccccatctggtttagcgccggcaatggctctgccctggacgcctttacctacggcccaagccctgccaccgatggcacctggacaaatctggcccacctgagcctgcccagcgaggaactggcttcttgggagcctctcgtgtgccacacaggacctggcgctgagggacacagcagatccacccagcctatgcacctgtctggcgaggccagcaccgccagaacctgtcctcaggaacctctgagaggcacccctggcggagcactgtggctgggagtgctgagactgctgctgttcaagctgctgctgtttgacctgctgctgacctgctcctgtctgtgcgatcctgccggccctctgccttctcctgccaccaccacaagactgagagccctgggcagccacagactgcaccctgccacagagacaggcggcagagaggccacaagcagccctagaccccagcccagagacagaagatggggcgataccccccctggcagaaagcctggatctccagtccgcgccaagagaagcggatctggcgtgaagcagaccctgaatttcgacctgctgaagctggctggcgacgtggaatccaacccaggcccttctagaggccatatgaccgagtacaagcccacggtgcgcctcgccacccgcgacgacgtccccagggccgtacgcaccctcgccgccgcgttcgccgactaccccgccacgcgccacaccgtcgatccggaccgccacatcgagcgggtcaccgagctgcaagaactcttcctcacgcgcgtcgggctcgacatcggcaaggtgtgggtcgcggacgacggcgccgcggtggcggtctggaccacgccggagagcgtcgaagcgggggcggtgttcgccgagatcggcccgcgcatggccgagttgagcggttcccggctggccgcgcagcaacagatggaaggcctcctggcgccgcaccggcccaaggagcccgcgtggttcctggccaccgtcggcgtctcgcccgaccaccagggcaagggtctgggcagcgccgtcgtgctccccggagtggaggcggccgagcgcgccggggtgcccgccttcctggagacctccgcgccccgcaacctccccttctacgagcggctcggcttcaccgtcaccgccgacgtcgaggtgcccgaaggaccgcgcacctggtgcatgacccgcaagcccggtgcctga

SEQ ID NO: 8598 - DNA, 2859 bp, Artificial Sequence
  Synthetic Polynucloetide
atggccttaccagtgaccgccttgctcctgccgctggccttgctgctccacgccgccaggccgctcgaggacctgaagaacgtgttcccacctgaggtggccgtgttcgagcctagcgaggccgagatcagccacacccagaaagccaccctcgtgtgcctggctaccggcttctaccccgaccatgtggaactgtcttggtgggtcaacggcaaagaggtgcacagcggcgtgtctaccgacccccagccactgaaagaacagcccgccctgaacgacagccggtactgcctgagcagcagactgagagtgtccgccaccttctggcagaacccccggaaccacttcagatgccaggtgcagttctacggcctgagcgagaacgacgagtggacccaggacagagccaagcccgtgacccagatcgtgtctgccgaagcctggggcagagccgattgcggctttaccagcgagagctaccagcagggcgtgctgagcgccaccatcctgtacgagatcctgctgggcaaggccaccctgtacgccgtgctggtgtctgccctggtgctgatggctatggtcaagcggaaggacagccggggaagggccaagcgatctggatctggagcaacaaacttctcactactcaaacaagcaggtgacgtggaggagaatcccgggcctactagcatggccttaccagtgaccgccttgctcctgccgctggccttgctgctccacgccgccaggccgcagatcgtgctgtctcagtctcctgccatcctgagtgcctctccaggcgagaaagtgaccatgacctgtagagccagcagcagcgtgtcctacatccactggttccagcagaagcctggcagcagccctaagccttggatctacgccaccagcaatctggcctctggcgtgccagtcagattttctggcagcggctctggcaccagctacagcctgacaatcagcagagtggaagccgaggatgccgccacctactactgtcagcagtggacctccaatcctcctacctttggcggaggcaccaagctggaaatcaaaggcggaggcggaagtggaggcggaggatctggcggcggaggctctcaggttcagctgcaacagcctggcgctgagcttgtgaaacctggcgcttccgtgaagatgagctgcaaggccagcggctacaccttcaccagctataacatgcactgggtcaagcagaccccaggcagaggactggaatggatcggagccatctatcccggcaacggcgacacctcctacaaccagaagttcaagggcaaagccacactgaccgccgacaagagcagcagcacagcctacatgcagctgagcagcctgaccagcgaagatagcgccgtgtactactgcgcccggtctacctattatggcggcgactggtacttcaacgtgtggggagctggcaccaccgtgacagtttctacgcgtgagcagaaactgatctcggaagaggatctggggagcggcaccccattcccttctctggcccctcccatcatgctgctggtggacggcaagcagcagatggtggtcgtgtgcctggtgctggatgtggccccacctggactggacagccccatctggtttagcgccggcaatggctctgccctggacgcctttacctacggcccaagccctgccaccgatggcacctggacaaatctggcccacctgagcctgcccagcgaggaactggcttcttgggagcctctcgtgtgccacacaggacctggcgctgagggacacagcagatccacccagcctatgcacctgtctggcgaggccagcaccgccagaacctgtcctcaggaacctctgagaggcacccctggcggagcactgtggctgggagtgctgagactgctgctgttcaagctgctgctgtttgacctgctgctgacctgctcctgtctgtgcgatcctgccggccctctgccttctcctgccaccaccacaagactgagagccctgggcagccacagactgcaccctgccacagagacaggcggcagagaggccacaagcagccctagaccccagcccagagacagaagatggggcgataccccccctggcagaaagcctggatctccagtccgcgccaagagaagcggatctggcgtgaagcagaccctgaatttcgacctgctgaagctggctggcgacgtggaatccaacccaggcccttctagatctagaggccatatgaccgagtacaagcccacggtgcgcctcgccacccgcgacgacgtccccagggccgtacgcaccctcgccgccgcgttcgccgactaccccgccacgcgccacaccgtcgatccggaccgccacatcgagcgggtcaccgagctgcaagaactcttcctcacgcgcgtcgggctcgacatcggcaaggtgtgggtcgcggacgacggcgccgcggtggcggtctggaccacgccggagagcgtcgaagcgggggcggtgttcgccgagatcggcccgcgcatggccgagttgagcggttcccggctggccgcgcagcaacagatggaaggcctcctggcgccgcaccggcccaaggagcccgcgtggttcctggccaccgtcggcgtctcgcccgaccaccagggcaagggtctgggcagcgccgtcgtgctccccggagtggaggcggccgagcgcgccggggtgcccgccttcctggagacctccgcgccccgcaacctccccttctacgagcggctcggcttcaccgtcaccgccgacgtcgaggtgcccgaaggaccgcgcacctggtgcatgacccgcaagcccggtgcctga

SEQ ID NO: 8599 - DNA, 2670 bp, Artificial Sequence
  Synthetic Polynucloetide
atggccttaccagtgaccgccttgctcctgccgctggccttgctgctccacgccgccaggccgcagatcgtgctgtctcagtctcctgccatcctgagtgcctctccaggcgagaaagtgaccatgacctgtagagccagcagcagcgtgtcctacatccactggttccagcagaagcctggcagcagccctaagccttggatctacgccaccagcaatctggcctctggcgtgccagtcagattttctggcagcggctctggcaccagctacagcctgacaatcagcagagtggaagccgaggatgccgccacctactactgtcagcagtggacctccaatcctcctacctttggcggaggcaccaagctggaaatcaaactcgaggggaaaccaattcccaaccctcttctgggactggattcaaccggcagcggcgacaagcagctggacgccgacgtgtcccccaagcctaccatcttcctgccctctatcgccgagacaaagctccagaaggccggcacctacctgtgcctgctggaaaagttcttcccagatgtgattaagatccactggcaggaaaagaagtccaacaccatcctgggcagccaggaaggcaacaccatgaagaccaacgacacctacatgaagttcagctggctgaccgtgcccgagaagtccctggacaaagaacacagatgcatcgtgcggcacgaaaacaacaagaacggcgtggaccaggaaatcatcttcccacccatcaagaccgatgtgattacaatggaccccaaggacaactgctccaaggacgccaacgataccctgctgctccagctgaccaacaccagcgcctactacatgtacttgttgctgctgctgaagtccgtggtgtacttcgccatcatcacatgctgcctgctgcggagaaccgccttctgctgcaacggcgagaagtctagggccaagcgatctggatctggagcaacaaacttctcactactcaaacaagcaggtgacgtggaggagaatcccgggcctactagtatggactggatttggcgcatccttttccttgtcggcgctgctaccggcgcgcattccttcgaacaggttcagctgcaacagcctggcgctgagcttgtgaaacctggcgcttccgtgaagatgagctgcaaggccagcggctacaccttcaccagctataacatgcactgggtcaagcagaccccaggcagaggactggaatggatcggagccatctatcccggcaacggcgacacctcctacaaccagaagttcaagggcaaagccacactgaccgccgacaagagcagcagcacagcctacatgcagctgagcagcctgaccagcgaagatagcgccgtgtactactgcgcccggtctacctattatggcggcgactggtacttcaacgtgtggggagctggcaccaccgtgacagtttctacgcgtgagcagaaactgatctcggaagaggatgggagcggcagccagcctcacaccaagcccagcgtgttcgtgatgaagaacggcaccaacgtggcctgcctcgtgaaagagttctaccccaaggacatcaggatcaacctggtgtccagcaagaagatcaccgagttcgaccccgccatcgtgatctcccccagcggcaagtacaacgccgtgaagctggggaagtacgaggacagcaacagcgtgacctgctccgtgcagcacgacaacaagaccgtgcacagcaccgactttgaagtgaaaaccgactccaccgaccacgtgaagcccaaagagacagagaacaccaagcagcccagcaagagctgccacaagcccaaggccatcgtgcacaccgagaaagtgaacatgatgagcctgaccgtgctgggcctgcggatgctgttcgccaaaaccgtggccgtgaacttcctgctgaccgccaagctgttcttcctccgcgccaagagaagcggatctggcgtgaagcagaccctgaatttcgacctgctgaagctggctggcgacgtggaatccaacccaggcccttctagaggccatatgaccgagtacaagcccacggtgcgcctcgccacccgcgacgacgtccccagggccgtacgcaccctcgccgccgcgttcgccgactaccccgccacgcgccacaccgtcgatccggaccgccacatcgagcgggtcaccgagctgcaagaactcttcctcacgcgcgtcgggctcgacatcggcaaggtgtgggtcgcggacgacggcgccgcggtggcggtctggaccacgccggagagcgtcgaagcgggggcggtgttcgccgagatcggcccgcgcatggccgagttgagcggttcccggctggccgcgcagcaacagatggaaggcctcctggcgccgcaccggcccaaggagcccgcgtggttcctggccaccgtcggcgtctcgcccgaccaccagggcaagggtctgggcagcgccgtcgtgctccccggagtggaggcggccgagcgcgccggggtgcccgccttcctggagacctccgcgccccgcaacctccccttctacgagcggctcggcttcaccgtcaccgccgacgtcgaggtgcccgaaggaccgcgcacctggtgcatgacccgcaagcccggtgcctga

SEQ ID NO: 8600 - DNA, 1881 bp, Artificial Sequence
  Synthetic Polynucloetide
atggccttaccagtgaccgccttgctcctgccgctggccttgctgctccacgccgccaggccgcagatcgtgctgtctcagtctcctgccatcctgagtgcctctccaggcgagaaagtgaccatgacctgtagagccagcagcagcgtgtcctacatccactggttccagcagaagcctggcagcagccctaagccttggatctacgccaccagcaatctggcctctggcgtgccagtcagattttctggcagcggctctggcaccagctacagcctgacaatcagcagagtggaagccgaggatgccgccacctactactgtcagcagtggacctccaatcctcctacctttggcggaggcaccaagctggaaatcaaactcgagagccagcctcacaccaagcccagcgtgttcgtgatgaagaacggcaccaacgtggcctgcctcgtgaaagagttctaccccaaggacatcaggatcaacctggtgtccagcaagaagatcaccgagttcgaccccgccatcgtgatctcccccagcggcaagtacaacgccgtgaagctggggaagtacgaggacagcaacagcgtgacctgctccgtgcagcacgacaacaagaccgtgcacagcaccgactttgaagtgaaaaccgactccaccgaccacgtgaagcccaaagagacagagaacaccaagcagcccagcaagagctgccacaagcccaaggccatcgtgcacaccgagaaagtgaacatgatgagcctgaccgtgctgggcctgcggatgctgttcgccaaaaccgtggccgtgaacttcctgctgaccgccaagctgttcttcctcagggccaagcgatctggatctggagcaacaaacttctcactactcaaacaagcaggtgacgtggaggagaatcccgggcctactagtatggactggatttggcgcatccttttccttgtcggcgctgctaccggcgcgcattccttcgaacaggttcagctgcaacagcctggcgctgagcttgtgaaacctggcgcttccgtgaagatgagctgcaaggccagcggctacaccttcaccagctataacatgcactgggtcaagcagaccccaggcagaggactggaatggatcggagccatctatcccggcaacggcgacacctcctacaaccagaagttcaagggcaaagccacactgaccgccgacaagagcagcagcacagcctacatgcagctgagcagcctgaccagcgaagatagcgccgtgtactactgcgcccggtctacctattatggcggcgactggtacttcaacgtgtggggagctggcaccaccgtgacagtttctacgcgtgacaagcagctggacgccgacgtgtcccccaagcctaccatcttcctgccctctatcgccgagacaaagctccagaaggccggcacctacctgtgcctgctggaaaagttcttcccagatgtgattaagatccactggcaggaaaagaagtccaacaccatcctgggcagccaggaaggcaacaccatgaagaccaacgacacctacatgaagttcagctggctgaccgtgcccgagaagtccctggacaaagaacacagatgcatcgtgcggcacgaaaacaacaagaacggcgtggaccaggaaatcatcttcccacccatcaagaccgatgtgattacaatggaccccaaggacaactgctccaaggacgccaacgataccctgctgctccagctgaccaacaccagcgcctactacatgtacttgttgctgctgctgaagtccgtggtgtacttcgccatcatcacatgctgcctgctgcggagaaccgccttctgctgcaacggcgagaagtct

SEQ ID NO: 8601 - DNA, 2715 bp, Artificial Sequence
  Synthetic Polynucloetide
atggccttaccagtgaccgccttgctcctgccgctggccttgctgctccacgccgccaggccgctcgaggggaaaccaattcccaaccctcttctgggactggattcaaccggcagcggcgacaagcagctggacgccgacgtgtcccccaagcctaccatcttcctgccctctatcgccgagacaaagctccagaaggccggcacctacctgtgcctgctggaaaagttcttcccagatgtgattaagatccactggcaggaaaagaagtccaacaccatcctgggcagccaggaaggcaacaccatgaagaccaacgacacctacatgaagttcagctggctgaccgtgcccgagaagtccctggacaaagaacacagatgcatcgtgcggcacgaaaacaacaagaacggcgtggaccaggaaatcatcttcccacccatcaagaccgatgtgattacaatggaccccaaggacaactgctccaaggacgccaacgataccctgctgctccagctgaccaacaccagcgcctactacatgtacttgttgctgctgctgaagtccgtggtgtacttcgccatcatcacatgctgcctgctgcggagaaccgccttctgctgcaacggcgagaagtctagggccaagcgatctggatctggagcaacaaacttctcactactcaaacaagcaggtgacgtggaggagaatcccgggcctactagcatggccttaccagtgaccgccttgctcctgccgctggccttgctgctccacgccgccaggccgcagatcgtgctgtctcagtctcctgccatcctgagtgcctctccaggcgagaaagtgaccatgacctgtagagccagcagcagcgtgtcctacatccactggttccagcagaagcctggcagcagccctaagccttggatctacgccaccagcaatctggcctctggcgtgccagtcagattttctggcagcggctctggcaccagctacagcctgacaatcagcagagtggaagccgaggatgccgccacctactactgtcagcagtggacctccaatcctcctacctttggcggaggcaccaagctggaaatcaaaggcggaggcggaagtggaggcggaggatctggcggcggaggctctcaggttcagctgcaacagcctggcgctgagcttgtgaaacctggcgcttccgtgaagatgagctgcaaggccagcggctacaccttcaccagctataacatgcactgggtcaagcagaccccaggcagaggactggaatggatcggagccatctatcccggcaacggcgacacctcctacaaccagaagttcaagggcaaagccacactgaccgccgacaagagcagcagcacagcctacatgcagctgagcagcctgaccagcgaagatagcgccgtgtactactgcgcccggtctacctattatggcggcgactggtacttcaacgtgtggggagctggcaccaccgtgacagtttctacgcgtgagcagaaactgatctcggaagaggatgggagcggcagccagcctcacaccaagcccagcgtgttcgtgatgaagaacggcaccaacgtggcctgcctcgtgaaagagttctaccccaaggacatcaggatcaacctggtgtccagcaagaagatcaccgagttcgaccccgccatcgtgatctcccccagcggcaagtacaacgccgtgaagctggggaagtacgaggacagcaacagcgtgacctgctccgtgcagcacgacaacaagaccgtgcacagcaccgactttgaagtgaaaaccgactccaccgaccacgtgaagcccaaagagacagagaacaccaagcagcccagcaagagctgccacaagcccaaggccatcgtgcacaccgagaaagtgaacatgatgagcctgaccgtgctgggcctgcggatgctgttcgccaaaaccgtggccgtgaacttcctgctgaccgccaagctgttcttcctccgcgccaagagaagcggatctggcgtgaagcagaccctgaatttcgacctgctgaagctggctggcgacgtggaatccaacccaggcccttctagaggccatatgaccgagtacaagcccacggtgcgcctcgccacccgcgacgacgtccccagggccgtacgcaccctcgccgccgcgttcgccgactaccccgccacgcgccacaccgtcgatccggaccgccacatcgagcgggtcaccgagctgcaagaactcttcctcacgcgcgtcgggctcgacatcggcaaggtgtgggtcgcggacgacggcgccgcggtggcggtctggaccacgccggagagcgtcgaagcgggggcggtgttcgccgagatcggcccgcgcatggccgagttgagcggttcccggctggccgcgcagcaacagatggaaggcctcctggcgccgcaccggcccaaggagcccgcgtggttcctggccaccgtcggcgtctcgcccgaccaccagggcaagggtctgggcagcgccgtcgtgctccccggagtggaggcggccgagcgcgccggggtgcccgccttcctggagacctccgcgccccgcaacctccccttctacgagcggctcggcttcaccgtcaccgccgacgtcgaggtgcccgaaggaccgcgcacctggtgcatgacccgcaagcccggtgcctga

SEQ ID NO: 8602 - DNA, 3090 bp, Artificial Sequence
  Synthetic Polynucloetide
atggccttaccagtgaccgccttgctcctgccgctggccttgctgctccacgccgccaggccgcagatcgtgctgtctcagtctcctgccatcctgagtgcctctccaggcgagaaagtgaccatgacctgtagagccagcagcagcgtgtcctacatccactggttccagcagaagcctggcagcagccctaagccttggatctacgccaccagcaatctggcctctggcgtgccagtcagattttctggcagcggctctggcaccagctacagcctgacaatcagcagagtggaagccgaggatgccgccacctactactgtcagcagtggacctccaatcctcctacctttggcggaggcaccaagctggaaatcaaaggacagcctaaggccaatcctaccgtgacactgttccctccaagcagcgaagaactccaggccaacaaggccacacttgtgtgcctgatctccgacttctaccctggggctgtgacagtggcttggaaggccgatggatctcctgtgaaagccggcgtggaaaccaccaagccatccaagcagagcaacaacaaatacgccgccagctcctacctgagcctgacacctgagcagtggaagtcccacagatcctacagctgccaagtgacccacgaaggcagcaccgtggaaaagacagtggcccctacagagtgcagcggatcccagagcttcggcctgctggaccccaagctgtgctacctgctggatggcatcctgttcatctacggcgtgatcctgaccgccctgttcctgagagtgaagttcagcagaagcgccgacgcccctgcctaccagcagggacagaaccaactgtacaacgagctgaacctgggcagacgggaagagtacgacgtgctggacaagcggagaggcagggaccctgagatgggcggaaagccccagcggagaaagaacccccaggaaggactgtataacgaactccagaaagacaagatggccgaagcctacagcgagatcggcatgaagggcgagcggagaagaggcaagggccacgatggcctgtaccagggcctgagcaccgccaccaaggacacctatgacgccctgcacatgcaggccctgcctccaagaagggccaagcgatctggatctggagcaacaaacttctcactactcaaacaagcaggtgacgtggaggagaatcccgggcctactagtatggactggatttggcgcatccttttccttgtcggcgctgctaccggcgcgcattccttcgaacaggttcagctgcaacagcctggcgctgagcttgtgaaacctggcgcttccgtgaagatgagctgcaaggccagcggctacaccttcaccagctataacatgcactgggtcaagcagaccccaggcagaggactggaatggatcggagccatctatcccggcaacggcgacacctcctacaaccagaagttcaagggcaaagccacactgaccgccgacaagagcagcagcacagcctacatgcagctgagcagcctgaccagcgaagatagcgccgtgtactactgcgcccggtctacctattatggcggcgactggtacttcaacgtgtggggagctggcaccaccgtgacagtttctgcctctacaaagggaccctccgtgtttcctctggctcccagcagcaagtctacaagcggaggaacagccgctctgggctgcctggtcaaggattactttcccgagcctgtgaccgtgtcctggaatagcggagcactgacaagcggcgtgcacacctttccagccgtgctgcaaagcagcggcctgtactctctgagcagcgtggtcacagtgcctagctctagcctgggcacccagacctacatctgcaatgtgaaccacaagcctagcaacaccaaggtggacaagagagtggaacccaagagctgtggtacccagagttttgggttgttggaccctaaattgtgctatctgttggacggaatcctgttcatttacggagtgatcctgaccgcattgttcctgcgggttaagttttccagatccgcagacgcacccgcttaccaacaagggcagaaccaactctacaatgaacttaatttggggcggagggaagagtacgacgttctggacaaaaggaggggacgagatcccgagatgggcggaaagcctcagcgaaggaagaatccgcaagaggggctttataacgaactccagaaagataaaatggcagaagcctatagtgagattgggatgaagggagaaaggaggaggggtaaaggtcacgatgggttgtaccaaggattgagcacagccactaaagatacctatgatgcgctccacatgcaggccctgccgccaagacgcgccaagagaagcggatctggcgtgaagcagaccctgaatttcgacctgctgaagctggctggcgacgtggaatccaacccaggcccttctagaggccatatgaccgagtacaagcccacggtgcgcctcgccacccgcgacgacgtccccagggccgtacgcaccctcgccgccgcgttcgccgactaccccgccacgcgccacaccgtcgatccggaccgccacatcgagcgggtcaccgagctgcaagaactcttcctcacgcgcgtcgggctcgacatcggcaaggtgtgggtcgcggacgacggcgccgcggtggcggtctggaccacgccggagagcgtcgaagcgggggcggtgttcgccgagatcggcccgcgcatggccgagttgagcggttcccggctggccgcgcagcaacagatggaaggcctcctggcgccgcaccggcccaaggagcccgcgtggttcctggccaccgtcggcgtctcgcccgaccaccagggcaagggtctgggcagcgccgtcgtgctccccggagtggaggcggccgagcgcgccggggtgcccgccttcctggagacctccgcgccccgcaacctccccttctacgagcggctcggcttcaccgtcaccgccgacgtcgaggtgcccgaaggaccgcgcacctggtgcatgacccgcaagcccggtgcctga

SEQ ID NO: 8603 - DNA, 2445 bp, Artificial Sequence
  Synthetic Polynucloetide
atggccttaccagtgaccgccttgctcctgccgctggccttgctgctccacgccgccaggccgcagatcgtgctgtctcagtctcctgccatcctgagtgcctctccaggcgagaaagtgaccatgacctgtagagccagcagcagcgtgtcctacatccactggttccagcagaagcctggcagcagccctaagccttggatctacgccaccagcaatctggcctctggcgtgccagtcagattttctggcagcggctctggcaccagctacagcctgacaatcagcagagtggaagccgaggatgccgccacctactactgtcagcagtggacctccaatcctcctacctttggcggaggcaccaagctggaaatcaaactcgaggacctgaagaacgtgttcccacctgaggtggccgtgttcgagcctagcgaggccgagatcagccacacccagaaagccaccctcgtgtgcctggctaccggcttctaccccgaccatgtggaactgtcttggtgggtcaacggcaaagaggtgcacagcggcgtgtctaccgacccccagccactgaaagaacagcccgccctgaacgacagccggtactgcctgagcagcagactgagagtgtccgccaccttctggcagaacccccggaaccacttcagatgccaggtgcagttctacggcctgagcgagaacgacgagtggacccaggacagagccaagcccgtgacccagatcgtgtctgccgaagcctggggcagagccgattgcggatcccagagcttcggcctgctggaccccaagctgtgctacctgctggatggcatcctgttcatctacggcgtgatcctgaccgccctgttcctgagagtgaagttcagcagaagcgccgacgcccctgcctaccagcagggacagaaccaactgtacaacgagctgaacctgggcagacgggaagagtacgacgtgctggacaagcggagaggcagggaccctgagatgggcggaaagccccagcggagaaagaacccccaggaaggactgtataacgaactccagaaagacaagatggccgaagcctacagcgagatcggcatgaagggcgagcggagaagaggcaagggccacgatggcctgtaccagggcctgagcaccgccaccaaggacacctatgacgccctgcacatgcaggccctgcctccaagaagggccaagcgatctggatctggagcaacaaacttctcactactcaaacaagcaggtgacgtggaggagaatcccgggcctactagtatggactggatttggcgcatccttttccttgtcggcgctgctaccggcgcgcattccttcgaacaggttcagctgcaacagcctggcgctgagcttgtgaaacctggcgcttccgtgaagatgagctgcaaggccagcggctacaccttcaccagctataacatgcactgggtcaagcagaccccaggcagaggactggaatggatcggagccatctatcccggcaacggcgacacctcctacaaccagaagttcaagggcaaagccacactgaccgccgacaagagcagcagcacagcctacatgcagctgagcagcctgaccagcgaagatagcgccgtgtactactgcgcccggtctacctattatggcggcgactggtacttcaacgtgtggggagctggcaccaccgtgacagtttctacgcgtatccagaaccctgatcctgccgtgtaccagctgcgggatagcaagagcagcgacaagagcgtgtgtctgttcaccgacttcgacagccagaccaacgtgtcccagagcaaggactccgacgtgtacatcaccgataagaccgtgctggacatgcggagcatggacttcaagagcaactccgccgtggcctggtccaacaagtccgatttcgcctgcgccaacgccttcaacaacagcattatccccgaggacacattcttcccaagccccgagagcagctgcggtacccagagttttgggttgttggaccctaaattgtgctatctgttggacggaatcctgttcatttacggagtgatcctgaccgcattgttcctgcgggttaagttttccagatccgcagacgcacccgcttaccaacaagggcagaaccaactctacaatgaacttaatttggggcggagggaagagtacgacgttctggacaaaaggaggggacgagatcccgagatgggcggaaagcctcagcgaaggaagaatccgcaagaggggctttataacgaactccagaaagataaaatggcagaagcctatagtgagattgggatgaagggagaaaggaggaggggtaaaggtcacgatgggttgtaccaaggattgagcacagccactaaagatacctatgatgcgctccacatgcaggccctgccgccaaga

SEQ ID NO: 8604 - DNA, 2445 bp, Artificial Sequence
  Synthetic Polynucloetide
atggccttaccagtgaccgccttgctcctgccgctggccttgctgctccacgccgccaggccgcagatcgtgctgtctcagtctcctgccatcctgagtgcctctccaggcgagaaagtgaccatgacctgtagagccagcagcagcgtgtcctacatccactggttccagcagaagcctggcagcagccctaagccttggatctacgccaccagcaatctggcctctggcgtgccagtcagattttctggcagcggctctggcaccagctacagcctgacaatcagcagagtggaagccgaggatgccgccacctactactgtcagcagtggacctccaatcctcctacctttggcggaggcaccaagctggaaatcaaactcgaggacctgaagaacgtgttcccacctgaggtggccgtgttcgagcctagcaaggccgagatcgcccacacccagaaagccaccctcgtgtgcctggctaccggcttctaccccgaccatgtggaactgtcttggtgggtcaacggcaaagaggtgcacagcggcgtgtgtaccgacccccagccactgaaagaacagcccgccctgaacgacagccggtactgcctgagcagcagactgagagtgtccgccaccttctggcagaacccccggaaccacttcagatgccaggtgcagttctacggcctgagcgagaacgacgagtggacccaggacagagccaagcccgtgacccagatcgtgtctgccgaagcctggggcagagccgattgcggatcccagagcttcggcctgctggaccccaagctgtgctacctgctggatggcatcctgttcatctacggcgtgatcctgaccgccctgttcctgagagtgaagttcagcagaagcgccgacgcccctgcctaccagcagggacagaaccaactgtacaacgagctgaacctgggcagacgggaagagtacgacgtgctggacaagcggagaggcagggaccctgagatgggcggaaagccccagcggagaaagaacccccaggaaggactgtataacgaactccagaaagacaagatggccgaagcctacagcgagatcggcatgaagggcgagcggagaagaggcaagggccacgatggcctgtaccagggcctgagcaccgccaccaaggacacctatgacgccctgcacatgcaggccctgcctccaagaagggccaagcgatctggatctggagcaacaaacttctcactactcaaacaagcaggtgacgtggaggagaatcccgggcctactagtatggactggatttggcgcatccttttccttgtcggcgctgctaccggcgcgcattccttcgaacaggttcagctgcaacagcctggcgctgagcttgtgaaacctggcgcttccgtgaagatgagctgcaaggccagcggctacaccttcaccagctataacatgcactgggtcaagcagaccccaggcagaggactggaatggatcggagccatctatcccggcaacggcgacacctcctacaaccagaagttcaagggcaaagccacactgaccgccgacaagagcagcagcacagcctacatgcagctgagcagcctgaccagcgaagatagcgccgtgtactactgcgcccggtctacctattatggcggcgactggtacttcaacgtgtggggagctggcaccaccgtgacagtttctacgcgtatccagaaccctgatcctgccgtgtaccagctgcgggatagcaagagcagcgacaagagcgtgtgtctgttcaccgacttcgacagccagaccaacgtgtcccagagcaaggactccgacgtgtacatcaccgataagtgcgtgctggacatgcggagcatggacttcaagagcaactccgccgtggcctggtccaacaagtccgatttcgcctgcgccaacgccttcaacaacagcattatccccgaggacacattcttcccaagcagcgacgtgccctgcggtacccagagttttgggttgttggaccctaaattgtgctatctgttggacggaatcctgttcatttacggagtgatcctgaccgcattgttcctgcgggttaagttttccagatccgcagacgcacccgcttaccaacaagggcagaaccaactctacaatgaacttaatttggggcggagggaagagtacgacgttctggacaaaaggaggggacgagatcccgagatgggcggaaagcctcagcgaaggaagaatccgcaagaggggctttataacgaactccagaaagataaaatggcagaagcctatagtgagattgggatgaagggagaaaggaggaggggtaaaggtcacgatgggttgtaccaaggattgagcacagccactaaagatacctatgatgcgctccacatgcaggccctgccgccaaga

SEQ ID NO: 8605 - DNA, 2658 bp, Artificial Sequence
  Synthetic Polynucloetide
atggccttaccagtgaccgccttgctcctgccgctggccttgctgctccacgccgccaggccgcagatcgtgctgtctcagtctcctgccatcctgagtgcctctccaggcgagaaagtgaccatgacctgtagagccagcagcagcgtgtcctacatccactggttccagcagaagcctggcagcagccctaagccttggatctacgccaccagcaatctggcctctggcgtgccagtcagattttctggcagcggctctggcaccagctacagcctgacaatcagcagagtggaagccgaggatgccgccacctactactgtcagcagtggacctccaatcctcctacctttggcggaggcaccaagctggaaatcaaactcgaggggaaaccaattcccaaccctcttctgggactggattcaaccggcagcggcgaggacctgaagaacgtgttcccacctgaggtggccgtgttcgagcctagcgaggccgagatcagccacacccagaaagccaccctcgtgtgcctggctaccggcttctaccccgaccatgtggaactgtcttggtgggtcaacggcaaagaggtgcacagcggcgtgtctaccgacccccagccactgaaagaacagcccgccctgaacgacagccggtactgcctgagcagcagactgagagtgtccgccaccttctggcagaacccccggaaccacttcagatgccaggtgcagttctacggcctgagcgagaacgacgagtggacccaggacagagccaagcccgtgacccagatcgtgtctgccgaagcctggggcagagccgattgcggatcccagagcttcggcctgctggaccccaagctgtgctacctgctggatggcatcctgttcatctacggcgtgatcctgaccgccctgttcctgagagtgaagttcagcagaagcgccgacgcccctgcctaccagcagggacagaaccaactgtacaacgagctgaacctgggcagacgggaagagtacgacgtgctggacaagcggagaggcagggaccctgagatgggcggaaagccccagcggagaaagaacccccaggaaggactgtataacgaactccagaaagacaagatggccgaagcctacagcgagatcggcatgaagggcgagcggagaagaggcaagggccacgatggcctgtaccagggcctgagcaccgccaccaaggacacctatgacgccctgcacatgcaggccctgcctccaagaagggccaagcgatctggatctggagcaacaaacttctcactactcaaacaagcaggtgacgtggaggagaatcccgggcctactagtatggactggatttggcgcatccttttccttgtcggcgctgctaccggcgcgcattccttcgaacaggttcagctgcaacagcctggcgctgagcttgtgaaacctggcgcttccgtgaagatgagctgcaaggccagcggctacaccttcaccagctataacatgcactgggtcaagcagaccccaggcagaggactggaatggatcggagccatctatcccggcaacggcgacacctcctacaaccagaagttcaagggcaaagccacactgaccgccgacaagagcagcagcacagcctacatgcagctgagcagcctgaccagcgaagatagcgccgtgtactactgcgcccggtctacctattatggcggcgactggtacttcaacgtgtggggagctggcaccaccgtgacagtttctacgcgtgagcagaaactgatctcggaagaggatgggagcggcatccagaaccctgatcctgccgtgtaccagctgcgggatagcaagagcagcgacaagagcgtgtgtctgttcaccgacttcgacagccagaccaacgtgtcccagagcaaggactccgacgtgtacatcaccgataagaccgtgctggacatgcggagcatggacttcaagagcaactccgccgtggcctggtccaacaagtccgatttcgcctgcgccaacgccttcaacaacagcattatccccgaggacacattcttcccaagccccgagagcagctgcggtacccagagttttgggttgttggaccctaaattgtgctatctgttggacggaatcctgttcatttacggagtgatcctgaccgcattgttcctgaggagcaagcggtcacggctgctccacagcgattacatgaatatgacaccacgaagaccgggtcctactcgcaaacactaccaaccctacgcacctccccgcgactttgcagcgtaccgatctcgggttaagttttccagatccgcagacgcacccgcttaccaacaagggcagaaccaactctacaatgaacttaatttggggcggagggaagagtacgacgttctggacaaaaggaggggacgagatcccgagatgggcggaaagcctcagcgaaggaagaatccgcaagaggggctttataacgaactccagaaagataaaatggcagaagcctatagtgagattgggatgaagggagaaaggaggaggggtaaaggtcacgatgggttgtaccaaggattgagcacagccactaaagatacctatgatgcgctccacatgcaggccctgccgccaaga

SEQ ID NO: 8606 - DNA, 2781 bp, Artificial Sequence
  Synthetic Polynucloetide
atggccttaccagtgaccgccttgctcctgccgctggccttgctgctccacgccgccaggccgcagatcgtgctgtctcagtctcctgccatcctgagtgcctctccaggcgagaaagtgaccatgacctgtagagccagcagcagcgtgtcctacatccactggttccagcagaagcctggcagcagccctaagccttggatctacgccaccagcaatctggcctctggcgtgccagtcagattttctggcagcggctctggcaccagctacagcctgacaatcagcagagtggaagccgaggatgccgccacctactactgtcagcagtggacctccaatcctcctacctttggcggaggcaccaagctggaaatcaaactcgaggggaaaccaattcccaaccctcttctgggactggattcaaccggcagcggcgaggacctgaagaacgtgttcccacctgaggtggccgtgttcgagcctagcgaggccgagatcagccacacccagaaagccaccctcgtgtgcctggctaccggcttctaccccgaccatgtggaactgtcttggtgggtcaacggcaaagaggtgcacagcggcgtgtctaccgacccccagccactgaaagaacagcccgccctgaacgacagccggtactgcctgagcagcagactgagagtgtccgccaccttctggcagaacccccggaaccacttcagatgccaggtgcagttctacggcctgagcgagaacgacgagtggacccaggacagagccaagcccgtgacccagatcgtgtctgccgaagcctggggcagagccgattgcggatcccagagcttcggcctgctggaccccaagctgtgctacctgctggatggcatcctgttcatctacggcgtgatcctgaccgccctgttcctgaggagtaagaggagcaggctcctgcacagtgactacatgaacatgactccacgccgccccggacccacccgcaagcattaccagccctatgccccaccacgcgacttcgcagcctatcgctccagagtgaagttcagcagaagcgccgacgcccctgcctaccagcagggacagaaccaactgtacaacgagctgaacctgggcagacgggaagagtacgacgtgctggacaagcggagaggcagggaccctgagatgggcggaaagccccagcggagaaagaacccccaggaaggactgtataacgaactccagaaagacaagatggccgaagcctacagcgagatcggcatgaagggcgagcggagaagaggcaagggccacgatggcctgtaccagggcctgagcaccgccaccaaggacacctatgacgccctgcacatgcaggccctgcctccaagaagggccaagcgatctggatctggagcaacaaacttctcactactcaaacaagcaggtgacgtggaggagaatcccgggcctactagtatggactggatttggcgcatccttttccttgtcggcgctgctaccggcgcgcattccttcgaacaggttcagctgcaacagcctggcgctgagcttgtgaaacctggcgcttccgtgaagatgagctgcaaggccagcggctacaccttcaccagctataacatgcactgggtcaagcagaccccaggcagaggactggaatggatcggagccatctatcccggcaacggcgacacctcctacaaccagaagttcaagggcaaagccacactgaccgccgacaagagcagcagcacagcctacatgcagctgagcagcctgaccagcgaagatagcgccgtgtactactgcgcccggtctacctattatggcggcgactggtacttcaacgtgtggggagctggcaccaccgtgacagtttctacgcgtgagcagaaactgatctcggaagaggatgggagcggcatccagaaccctgatcctgccgtgtaccagctgcgggatagcaagagcagcgacaagagcgtgtgtctgttcaccgacttcgacagccagaccaacgtgtcccagagcaaggactccgacgtgtacatcaccgataagaccgtgctggacatgcggagcatggacttcaagagcaactccgccgtggcctggtccaacaagtccgatttcgcctgcgccaacgccttcaacaacagcattatccccgaggacacattcttcccaagccccgagagcagctgcggtacccagagttttgggttgttggaccctaaattgtgctatctgttggacggaatcctgttcatttacggagtgatcctgaccgcattgttcctgaggagcaagcggtcacggctgctccacagcgattacatgaatatgacaccacgaagaccgggtcctactcgcaaacactaccaaccctacgcacctccccgcgactttgcagcgtaccgatctcgggttaagttttccagatccgcagacgcacccgcttaccaacaagggcagaaccaactctacaatgaacttaatttggggcggagggaagagtacgacgttctggacaaaaggaggggacgagatcccgagatgggcggaaagcctcagcgaaggaagaatccgcaagaggggctttataacgaactccagaaagataaaatggcagaagcctatagtgagattgggatgaagggagaaaggaggaggggtaaaggtcacgatgggttgtaccaaggattgagcacagccactaaagatacctatgatgcgctccacatgcaggccctgccgccaaga

SEQ ID NO: 8607 - DNA, 2664 bp, Artificial Sequence
  Synthetic Polynucloetide
atggccttaccagtgaccgccttgctcctgccgctggccttgctgctccacgccgccaggccgcagatcgtgctgtctcagtctcctgccatcctgagtgcctctccaggcgagaaagtgaccatgacctgtagagccagcagcagcgtgtcctacatccactggttccagcagaagcctggcagcagccctaagccttggatctacgccaccagcaatctggcctctggcgtgccagtcagattttctggcagcggctctggcaccagctacagcctgacaatcagcagagtggaagccgaggatgccgccacctactactgtcagcagtggacctccaatcctcctacctttggcggaggcaccaagctggaaatcaaactcgaggggaaaccaattcccaaccctcttctgggactggattcaaccggcagcggcgaggacctgaagaacgtgttcccacctgaggtggccgtgttcgagcctagcgaggccgagatcagccacacccagaaagccaccctcgtgtgcctggctaccggcttctaccccgaccatgtggaactgtcttggtgggtcaacggcaaagaggtgcacagcggcgtgtctaccgacccccagccactgaaagaacagcccgccctgaacgacagccggtactgcctgagcagcagactgagagtgtccgccaccttctggcagaacccccggaaccacttcagatgccaggtgcagttctacggcctgagcgagaacgacgagtggacccaggacagagccaagcccgtgacccagatcgtgtctgccgaagcctggggcagagccgattgcggatcccagagcttcggcctgctggaccccaagctgtgctacctgctggatggcatcctgttcatctacggcgtgatcctgaccgccctgttcctgagagtgaagttcagcagaagcgccgacgcccctgcctaccagcagggacagaaccaactgtacaacgagctgaacctgggcagacgggaagagtacgacgtgctggacaagcggagaggcagggaccctgagatgggcggaaagccccagcggagaaagaacccccaggaaggactgtataacgaactccagaaagacaagatggccgaagcctacagcgagatcggcatgaagggcgagcggagaagaggcaagggccacgatggcctgtaccagggcctgagcaccgccaccaaggacacctatgacgccctgcacatgcaggccctgcctccaagaagggccaagcgatctggatctggagcaacaaacttctcactactcaaacaagcaggtgacgtggaggagaatcccgggcctactagtatggactggatttggcgcatccttttccttgtcggcgctgctaccggcgcgcattccttcgaacaggttcagctgcaacagcctggcgctgagcttgtgaaacctggcgcttccgtgaagatgagctgcaaggccagcggctacaccttcaccagctataacatgcactgggtcaagcagaccccaggcagaggactggaatggatcggagccatctatcccggcaacggcgacacctcctacaaccagaagttcaagggcaaagccacactgaccgccgacaagagcagcagcacagcctacatgcagctgagcagcctgaccagcgaagatagcgccgtgtactactgcgcccggtctacctattatggcggcgactggtacttcaacgtgtggggagctggcaccaccgtgacagtttctacgcgtgagcagaaactgatctcggaagaggatctggggagcggcatccagaaccctgatcctgccgtgtaccagctgcgggatagcaagagcagcgacaagagcgtgtgtctgttcaccgacttcgacagccagaccaacgtgtcccagagcaaggactccgacgtgtacatcaccgataagaccgtgctggacatgcggagcatggacttcaagagcaactccgccgtggcctggtccaacaagtccgatttcgcctgcgccaacgccttcaacaacagcattatccccgaggacacattcttcccaagccccgagagcagctgcggtacccagagttttgggttgttggaccctaaattgtgctatctgttggacggaatcctgttcatttacggagtgatcctgaccgcattgttcctgaagagaggccggaagaagctgctgtacatcttcaagcagcctttcatgcggcccgtgcagaccacccaggaagaggacggctgctcctgccggttccccgaggaagaagaaggcggctgcgagctgcgggttaagttttccagatccgcagacgcacccgcttaccaacaagggcagaaccaactctacaatgaacttaatttggggcggagggaagagtacgacgttctggacaaaaggaggggacgagatcccgagatgggcggaaagcctcagcgaaggaagaatccgcaagaggggctttataacgaactccagaaagataaaatggcagaagcctatagtgagattgggatgaagggagaaaggaggaggggtaaaggtcacgatgggttgtaccaaggattgagcacagccactaaagatacctatgatgcgctccacatgcaggccctgccgccaaga

SEQ ID NO: 8608 - DNA, 2790 bp, Artificial Sequence
  Synthetic Polynucloetide
atggccttaccagtgaccgccttgctcctgccgctggccttgctgctccacgccgccaggccgcagatcgtgctgtctcagtctcctgccatcctgagtgcctctccaggcgagaaagtgaccatgacctgtagagccagcagcagcgtgtcctacatccactggttccagcagaagcctggcagcagccctaagccttggatctacgccaccagcaatctggcctctggcgtgccagtcagattttctggcagcggctctggcaccagctacagcctgacaatcagcagagtggaagccgaggatgccgccacctactactgtcagcagtggacctccaatcctcctacctttggcggaggcaccaagctggaaatcaaactcgaggggaaaccaattcccaaccctcttctgggactggattcaaccggcagcggcgaggacctgaagaacgtgttcccacctgaggtggccgtgttcgagcctagcgaggccgagatcagccacacccagaaagccaccctcgtgtgcctggctaccggcttctaccccgaccatgtggaactgtcttggtgggtcaacggcaaagaggtgcacagcggcgtgtctaccgacccccagccactgaaagaacagcccgccctgaacgacagccggtactgcctgagcagcagactgagagtgtccgccaccttctggcagaacccccggaaccacttcagatgccaggtgcagttctacggcctgagcgagaacgacgagtggacccaggacagagccaagcccgtgacccagatcgtgtctgccgaagcctggggcagagccgattgcggatcccagagcttcggcctgctggaccccaagctgtgctacctgctggatggcatcctgttcatctacggcgtgatcctgaccgccctgttcctgaaacggggcagaaagaaactcctgtatatattcaaacaaccatttatgagaccagtacaaactactcaagaggaagatggctgtagctgccgatttccagaagaagaagaaggaggatgtgaactgagagtgaagttcagcagaagcgccgacgcccctgcctaccagcagggacagaaccaactgtacaacgagctgaacctgggcagacgggaagagtacgacgtgctggacaagcggagaggcagggaccctgagatgggcggaaagccccagcggagaaagaacccccaggaaggactgtataacgaactccagaaagacaagatggccgaagcctacagcgagatcggcatgaagggcgagcggagaagaggcaagggccacgatggcctgtaccagggcctgagcaccgccaccaaggacacctatgacgccctgcacatgcaggccctgcctccaagaagggccaagcgatctggatctggagcaacaaacttctcactactcaaacaagcaggtgacgtggaggagaatcccgggcctactagtatggactggatttggcgcatccttttccttgtcggcgctgctaccggcgcgcattccttcgaacaggttcagctgcaacagcctggcgctgagcttgtgaaacctggcgcttccgtgaagatgagctgcaaggccagcggctacaccttcaccagctataacatgcactgggtcaagcagaccccaggcagaggactggaatggatcggagccatctatcccggcaacggcgacacctcctacaaccagaagttcaagggcaaagccacactgaccgccgacaagagcagcagcacagcctacatgcagctgagcagcctgaccagcgaagatagcgccgtgtactactgcgcccggtctacctattatggcggcgactggtacttcaacgtgtggggagctggcaccaccgtgacagtttctacgcgtgagcagaaactgatctcggaagaggatctggggagcggcatccagaaccctgatcctgccgtgtaccagctgcgggatagcaagagcagcgacaagagcgtgtgtctgttcaccgacttcgacagccagaccaacgtgtcccagagcaaggactccgacgtgtacatcaccgataagaccgtgctggacatgcggagcatggacttcaagagcaactccgccgtggcctggtccaacaagtccgatttcgcctgcgccaacgccttcaacaacagcattatccccgaggacacattcttcccaagccccgagagcagctgcggtacccagagttttgggttgttggaccctaaattgtgctatctgttggacggaatcctgttcatttacggagtgatcctgaccgcattgttcctgaagagaggccggaagaagctgctgtacatcttcaagcagcctttcatgcggcccgtgcagaccacccaggaagaggacggctgctcctgccggttccccgaggaagaagaaggcggctgcgagctgcgggttaagttttccagatccgcagacgcacccgcttaccaacaagggcagaaccaactctacaatgaacttaatttggggcggagggaagagtacgacgttctggacaaaaggaggggacgagatcccgagatgggcggaaagcctcagcgaaggaagaatccgcaagaggggctttataacgaactccagaaagataaaatggcagaagcctatagtgagattgggatgaagggagaaaggaggaggggtaaaggtcacgatgggttgtaccaaggattgagcacagccactaaagatacctatgatgcgctccacatgcaggccctgccgccaaga

SEQ ID NO: 8609 - DNA, 2463 bp, Artificial Sequence
  Synthetic Polynucloetide
atggccttaccagtgaccgccttgctcctgccgctggccttgctgctccacgccgccaggccgcagatcgtgctgtctcagtctcctgccatcctgagtgcctctccaggcgagaaagtgaccatgacctgtagagccagcagcagcgtgtcctacatccactggttccagcagaagcctggcagcagccctaagccttggatctacgccaccagcaatctggcctctggcgtgccagtcagattttctggcagcggctctggcaccagctacagcctgacaatcagcagagtggaagccgaggatgccgccacctactactgtcagcagtggacctccaatcctcctacctttggcggaggcaccaagctggaaatcaaactcgagcagagcttcggcctgctggaccccaagctgtgctacctgctggatggcatcctgttcatctacggcgtgatcctgaccgccctgttcctgagagtgaagttcagcagaagcgccgacgcccctgcctaccagcagggacagaaccaactgtacaacgagctgaacctgggcagacgggaagagtacgacgtgctggacaagcggagaggcagggaccctgagatgggcggaaagccccagcggagaaagaacccccaggaaggactgtataacgaactccagaaagacaagatggccgaagcctacagcgagatcggcatgaagggcgagcggagaagaggcaagggccacgatggcctgtaccagggcctgagcaccgccaccaaggacacctatgacgccctgcacatgcaggccctgcctccaagaagggccaagcgatctggatctggagcaacaaacttctcactactcaaacaagcaggtgacgtggaggagaatcccgggcctactagtatggactggatttggcgcatccttttccttgtcggcgctgctaccggcgcgcattccttcgaacaggttcagctgcaacagcctggcgctgagcttgtgaaacctggcgcttccgtgaagatgagctgcaaggccagcggctacaccttcaccagctataacatgcactgggtcaagcagaccccaggcagaggactggaatggatcggagccatctatcccggcaacggcgacacctcctacaaccagaagttcaagggcaaagccacactgaccgccgacaagagcagcagcacagcctacatgcagctgagcagcctgaccagcgaagatagcgccgtgtactactgcgcccggtctacctattatggcggcgactggtacttcaacgtgtggggagctggcaccaccgtgacagtttctacgcgtcagagttttgggttgttggaccctaaattgtgctatctgttggacggaatcctgttcatttacggagtgatcctgaccgcattgttcctgcgggttaagttttccagatccgcagacgcacccgcttaccaacaagggcagaaccaactctacaatgaacttaatttggggcggagggaagagtacgacgttctggacaaaaggaggggacgagatcccgagatgggcggaaagcctcagcgaaggaagaatccgcaagaggggctttataacgaactccagaaagataaaatggcagaagcctatagtgagattgggatgaagggagaaaggaggaggggtaaaggtcacgatgggttgtaccaaggattgagcacagccactaaagatacctatgatgcgctccacatgcaggccctgccgccaagacgcgccaagagaagcggatctggcgtgaagcagaccctgaatttcgacctgctgaagctggctggcgacgtggaatccaacccaggcccttctagaggccatatgaccgagtacaagcccacggtgcgcctcgccacccgcgacgacgtccccagggccgtacgcaccctcgccgccgcgttcgccgactaccccgccacgcgccacaccgtcgatccggaccgccacatcgagcgggtcaccgagctgcaagaactcttcctcacgcgcgtcgggctcgacatcggcaaggtgtgggtcgcggacgacggcgccgcggtggcggtctggaccacgccggagagcgtcgaagcgggggcggtgttcgccgagatcggcccgcgcatggccgagttgagcggttcccggctggccgcgcagcaacagatggaaggcctcctggcgccgcaccggcccaaggagcccgcgtggttcctggccaccgtcggcgtctcgcccgaccaccagggcaagggtctgggcagcgccgtcgtgctccccggagtggaggcggccgagcgcgccggggtgcccgccttcctggagacctccgcgccccgcaacctccccttctacgagcggctcggcttcaccgtcaccgccgacgtcgaggtgcccgaaggaccgcgcacctggtgcatgacccgcaagcccggtgcctga

SEQ ID NO: 8610 - DNA, 1935 bp, Artificial Sequence
  Synthetic Polynucloetide
atggccttaccagtgaccgccttgctcctgccgctggccttgctgctccacgccgccaggccgcagatcgtgctgtctcagtctcctgccatcctgagtgcctctccaggcgagaaagtgaccatgacctgtagagccagcagcagcgtgtcctacatccactggttccagcagaagcctggcagcagccctaagccttggatctacgccaccagcaatctggcctctggcgtgccagtcagattttctggcagcggctctggcaccagctacagcctgacaatcagcagagtggaagccgaggatgccgccacctactactgtcagcagtggacctccaatcctcctacctttggcggaggcaccaagctggaaatcaaactcgagggacagcctaaggccaatcctaccgtgacactgttccctccaagcagcgaagaactccaggccaacaaggccacacttgtgtgcctgatctccgacttctaccctggggctgtgacagtggcttggaaggccgatggatctcctgtgaaagccggcgtggaaaccaccaagccatccaagcagagcaacaacaaatacgccgccagctcctacctgagcctgacacctgagcagtggaagtcccacagatcctacagctgccaagtgacccacgaaggcagcaccgtggaaaagacagtggcccctacagagtgcagccccatcaagaccgatgtgattacaatggaccccaaggacaactgctccaaggacgccaacgataccctgctgctccagctgaccaacaccagcgcctactacatgtacttgttgctgctgctgaagtccgtggtgtacttcgccatcatcacatgctgcctgctgcggagaaccgccttctgctgcaacggcgagaagtctagggccaagcgatctggatctggagcaacaaacttctcactactcaaacaagcaggtgacgtggaggagaatcccgggcctactagtatggactggatttggcgcatccttttccttgtcggcgctgctaccggcgcgcattccttcgaacaggttcagctgcaacagcctggcgctgagcttgtgaaacctggcgcttccgtgaagatgagctgcaaggccagcggctacaccttcaccagctataacatgcactgggtcaagcagaccccaggcagaggactggaatggatcggagccatctatcccggcaacggcgacacctcctacaaccagaagttcaagggcaaagccacactgaccgccgacaagagcagcagcacagcctacatgcagctgagcagcctgaccagcgaagatagcgccgtgtactactgcgcccggtctacctattatggcggcgactggtacttcaacgtgtggggagctggcaccaccgtgacagtttctacgcgtgcctctacaaagggaccctccgtgtttcctctggctcccagcagcaagtctacaagcggaggaacagccgctctgggctgcctggtcaaggattactttcccgagcctgtgaccgtgtcctggaatagcggagcactgacaagcggcgtgcacacctttccagccgtgctgcaaagcagcggcctgtactctctgagcagcgtggtcacagtgcctagctctagcctgggcacccagacctacatctgcaatgtgaaccacaagcctagcaacaccaaggtggacaagagagtggaacccaagagctgtgaagtgaaaaccgactccaccgaccacgtgaagcccaaagagacagagaacaccaagcagcccagcaagagctgccacaagcccaaggccatcgtgcacaccgagaaagtgaacatgatgagcctgaccgtgctgggcctgcggatgctgttcgccaaaaccgtggccgtgaacttcctgctgaccgccaagctgttcttcctc

SEQ ID NO: 8611 - DNA, 1869 bp, Artificial Sequence
  Synthetic Polynucloetide
atggccttaccagtgaccgccttgctcctgccgctggccttgctgctccacgccgccaggccgcagatcgtgctgtctcagtctcctgccatcctgagtgcctctccaggcgagaaagtgaccatgacctgtagagccagcagcagcgtgtcctacatccactggttccagcagaagcctggcagcagccctaagccttggatctacgccaccagcaatctggcctctggcgtgccagtcagattttctggcagcggctctggcaccagctacagcctgacaatcagcagagtggaagccgaggatgccgccacctactactgtcagcagtggacctccaatcctcctacctttggcggaggcaccaagctggaaatcaaactcgagggacagcctaaggccaatcctaccgtgacactgttccctccaagcagcgaagaactccaggccaacaaggccacacttgtgtgcctgatctccgacttctaccctggggctgtgacagtggcttggaaggccgatggatctcctgtgaaagccggcgtggaaaccaccaagccatccaagcagagcaacaacaaatacgccgccagctcctacctgagcctgacacctgagcagtggaagtcccacagatcctacagctgccaagtgacccacgaaggcagcaccgtggaaaagacagtggcccctacagagtgcagcggcagagccgattgcggcatcaccagcgccagctaccaccagggcgtgctgagcgccaccatcctgtacgagatcctgctgggcaaggccaccctgtacgccgtgctggtgtctgccctggtgctgatggctatggtcaagcggaaggacagccggggaagggccaagcgatctggatctggagcaacaaacttctcactactcaaacaagcaggtgacgtggaggagaatcccgggcctactagtatggactggatttggcgcatccttttccttgtcggcgctgctaccggcgcgcattccttcgaacaggttcagctgcaacagcctggcgctgagcttgtgaaacctggcgcttccgtgaagatgagctgcaaggccagcggctacaccttcaccagctataacatgcactgggtcaagcagaccccaggcagaggactggaatggatcggagccatctatcccggcaacggcgacacctcctacaaccagaagttcaagggcaaagccacactgaccgccgacaagagcagcagcacagcctacatgcagctgagcagcctgaccagcgaagatagcgccgtgtactactgcgcccggtctacctattatggcggcgactggtacttcaacgtgtggggagctggcaccaccgtgacagtttctacgcgtgcctctacaaagggaccctccgtgtttcctctggctcccagcagcaagtctacaagcggaggaacagccgctctgggctgcctggtcaaggattactttcccgagcctgtgaccgtgtcctggaatagcggagcactgacaagcggcgtgcacacctttccagccgtgctgcaaagcagcggcctgtactctctgagcagcgtggtcacagtgcctagctctagcctgggcacccagacctacatctgcaatgtgaaccacaagcctagcaacaccaaggtggacaagagagtggaacccaagagctgtatccccgaggacacattcttcccaagcagcgacgtgccctgcgacgtgaagctggtggaaaagagcttcgagacagacaccaacctgaacttccagaacctgagcgtgatcggcttcagaatcctgctgctgaaagtggccggctttaacctgctgatgaccctgcggctgtggtccagc

SEQ ID NO: 8612 - DNA, 1869 bp, Artificial Sequence
  Synthetic Polynucloetide
atggccttaccagtgaccgccttgctcctgccgctggccttgctgctccacgccgccaggccgcagatcgtgctgtctcagtctcctgccatcctgagtgcctctccaggcgagaaagtgaccatgacctgtagagccagcagcagcgtgtcctacatccactggttccagcagaagcctggcagcagccctaagccttggatctacgccaccagcaatctggcctctggcgtgccagtcagattttctggcagcggctctggcaccagctacagcctgacaatcagcagagtggaagccgaggatgccgccacctactactgtcagcagtggacctccaatcctcctacctttggcggaggcaccaagctggaaatcaaactcgagggacagcctaaggccaatcctaccgtgacactgttccctccaagcagcgaagaactccaggccaacaaggccacacttgtgtgcctgatctccgacttctaccctggggctgtgacagtggcttggaaggccgatggatctcctgtgaaagccggcgtggaaaccaccaagccatccaagcagagcaacaacaaatacgccgccagctcctacctgagcctgacacctgagcagtggaagtcccacagatcctacagctgccaagtgacccacgaaggcagcaccgtggaaaagacagtggcccctacagagtgcagcggcagagccgattgcggctttaccagcgagagctaccagcagggcgtgctgagcgccaccatcctgtacgagatcctgctgggcaaggccaccctgtacgccgtgctggtgtctgccctggtgctgatggctatggtcaagcggaaggacagccggggaagggccaagcgatctggatctggagcaacaaacttctcactactcaaacaagcaggtgacgtggaggagaatcccgggcctactagtatggactggatttggcgcatccttttccttgtcggcgctgctaccggcgcgcattccttcgaacaggttcagctgcaacagcctggcgctgagcttgtgaaacctggcgcttccgtgaagatgagctgcaaggccagcggctacaccttcaccagctataacatgcactgggtcaagcagaccccaggcagaggactggaatggatcggagccatctatcccggcaacggcgacacctcctacaaccagaagttcaagggcaaagccacactgaccgccgacaagagcagcagcacagcctacatgcagctgagcagcctgaccagcgaagatagcgccgtgtactactgcgcccggtctacctattatggcggcgactggtacttcaacgtgtggggagctggcaccaccgtgacagtttctacgcgtgcctctacaaagggaccctccgtgtttcctctggctcccagcagcaagtctacaagcggaggaacagccgctctgggctgcctggtcaaggattactttcccgagcctgtgaccgtgtcctggaatagcggagcactgacaagcggcgtgcacacctttccagccgtgctgcaaagcagcggcctgtactctctgagcagcgtggtcacagtgcctagctctagcctgggcacccagacctacatctgcaatgtgaaccacaagcctagcaacaccaaggtggacaagagagtggaacccaagagctgtatccccgaggacacattcttcccaagccccgagagcagctgcgacgtgaagctggtggaaaagagcttcgagacagacaccaacctgaacttccagaacctgagcgtgatcggcttcagaatcctgctgctgaaagtggccggctttaacctgctgatgaccctgcggctgtggtccagc

SEQ ID NO: 8613 - DNA, 1347 bp, Artificial Sequence
  Synthetic Polynucloetide
atggccttaccagtgaccgccttgctcctgccgctggccttgctgctccacgccgccaggccgcagatcgtgctgtctcagtctcctgccatcctgagtgcctctccaggcgagaaagtgaccatgacctgtagagccagcagcagcgtgtcctacatccactggttccagcagaagcctggcagcagccctaagccttggatctacgccaccagcaatctggcctctggcgtgccagtcagattttctggcagcggctctggcaccagctacagcctgacaatcagcagagtggaagccgaggatgccgccacctactactgtcagcagtggacctccaatcctcctacctttggcggaggcaccaagctggaaatcaaaggcggaggcggaagtggaggcggaggatctggcggcggaggctctcaggttcagctgcaacagcctggcgctgagcttgtgaaacctggcgcttccgtgaagatgagctgcaaggccagcggctacaccttcaccagctataacatgcactgggtcaagcagaccccaggcagaggactggaatggatcggagccatctatcccggcaacggcgacacctcctacaaccagaagttcaagggcaaagccacactgaccgccgacaagagcagcagcacagcctacatgcagctgagcagcctgaccagcgaagatagcgccgtgtactactgcgcccggtctacctattatggcggcgactggtacttcaacgtgtggggagctggcaccaccgtgacagtttctacgcgtgacggtaacgaggagatgggaggaatcactcaaaccccttacaaagtctcaatttcaggaacaactgttatccttacatgtccccagtatcctggcagcgagatcctttggcagcataacgacaagaatatagggggagatgaagacgataagaatatcggatctgacgaggatcacttgagcctgaaagagttctccgagcttgaacaaagcggatattatgtgtgctatccgcgcgggtcaaagccggaagacgctaacttttacctttatctccgagccagagtgtgcgaaaattgcatggaaatggacgttatgtccgttgctacaatagttatcgtagatatatgcatcacgggtggactgcttctgctggtttattattggtccaagaatagaaaggccaaagctaaacccgtgaccagaggcgctggcgcaggcggaaggcaaaggggacaaaacaaagaacggccaccaccagtgccaaatccagattatgagcctattcggaaaggacagagggacctgtactctggcctgaatcagagaagaatc

SEQ ID NO: 8614 - DNA, 1242 bp, Artificial Sequence
  Synthetic Polynucloetide
atggccttaccagtgaccgccttgctcctgccgctggccttgctgctccacgccgccaggccgcagatcgtgctgtctcagtctcctgccatcctgagtgcctctccaggcgagaaagtgaccatgacctgtagagccagcagcagcgtgtcctacatccactggttccagcagaagcctggcagcagccctaagccttggatctacgccaccagcaatctggcctctggcgtgccagtcagattttctggcagcggctctggcaccagctacagcctgacaatcagcagagtggaagccgaggatgccgccacctactactgtcagcagtggacctccaatcctcctacctttggcggaggcaccaagctggaaatcaaaggcggaggcggaagtggaggcggaggatctggcggcggaggctctcaggttcagctgcaacagcctggcgctgagcttgtgaaacctggcgcttccgtgaagatgagctgcaaggccagcggctacaccttcaccagctataacatgcactgggtcaagcagaccccaggcagaggactggaatggatcggagccatctatcccggcaacggcgacacctcctacaaccagaagttcaagggcaaagccacactgaccgccgacaagagcagcagcacagcctacatgcagctgagcagcctgaccagcgaagatagcgccgtgtactactgcgcccggtctacctattatggcggcgactggtacttcaacgtgtggggagctggcaccaccgtgacagtttctacgcgtttcaagatccccatcgaggaactggaagatcgggtgttcgtgaactgcaacacctctatcacctgggtggaaggcaccgtgggaacactgctgagcgacatcaccagactggacctcggcaagcggattctggaccctcggggcatctacagatgcaacggcaccgacatctacaaggacaaagaaagcaccgtgcaggtccactacagaatgtgccagtcctgcgtggaactggaccctgctacagtggccggcatcatcgtgaccgatgtgatcgctactctgctgctggctctgggagtgttctgcttcgccggacacgaaacaggcagactgtctggcgctgccgatacacaggccctgctgagaaacgaccaagtgtatcagcccctgcgcgacagagatgatgcccagtattctcacctcggcggcaactgggctagaaacaag

SEQ ID NO: 8615 - DNA, 1272 bp, Artificial Sequence
  Synthetic Polynucloetide
atggccttaccagtgaccgccttgctcctgccgctggccttgctgctccacgccgccaggccgcagatcgtgctgtctcagtctcctgccatcctgagtgcctctccaggcgagaaagtgaccatgacctgtagagccagcagcagcgtgtcctacatccactggttccagcagaagcctggcagcagccctaagccttggatctacgccaccagcaatctggcctctggcgtgccagtcagattttctggcagcggctctggcaccagctacagcctgacaatcagcagagtggaagccgaggatgccgccacctactactgtcagcagtggacctccaatcctcctacctttggcggaggcaccaagctggaaatcaaaggcggaggcggaagtggaggcggaggatctggcggcggaggctctcaggttcagctgcaacagcctggcgctgagcttgtgaaacctggcgcttccgtgaagatgagctgcaaggccagcggctacaccttcaccagctataacatgcactgggtcaagcagaccccaggcagaggactggaatggatcggagccatctatcccggcaacggcgacacctcctacaaccagaagttcaagggcaaagccacactgaccgccgacaagagcagcagcacagcctacatgcagctgagcagcctgaccagcgaagatagcgccgtgtactactgcgcccggtctacctattatggcggcgactggtacttcaacgtgtggggagctggcaccaccgtgacagtttctacgcgtcagagcatcaagggcaaccacctggtcaaggtgtacgactaccaagaggacggcagcgtgctgctgacatgtgatgccgaggccaagaacatcacctggtttaaggacggcaagatgatcggcttcctgaccgaggacaagaagaagtggaacctgggcagcaacgctaaggaccccagaggcatgtatcagtgcaagggcagccagaacaagagcaagcccctccaggtgtactaccggatgtgccagaactgcatcgagctgaacgccgctaccatcagcggctttctgttcgccgagatcgtgtccatcttcgtgctggccgtgggcgtgtactttatcgctggacaggatggcgtgcggcagagcagagcttccgataagcaaaccctgctgcctaacgaccagctgtaccagcctctgaaggacagagaggacgaccagtacagccacctccagggcaatcagctgagaagaaac

SEQ ID NO: 8616 - DNA, 1221 bp, Artificial Sequence
  Synthetic Polynucloetide
atggccttaccagtgaccgccttgctcctgccgctggccttgctgctccacgccgccaggccgcagatcgtgctgtctcagtctcctgccatcctgagtgcctctccaggcgagaaagtgaccatgacctgtagagccagcagcagcgtgtcctacatccactggttccagcagaagcctggcagcagccctaagccttggatctacgccaccagcaatctggcctctggcgtgccagtcagattttctggcagcggctctggcaccagctacagcctgacaatcagcagagtggaagccgaggatgccgccacctactactgtcagcagtggacctccaatcctcctacctttggcggaggcaccaagctggaaatcaaaggcggaggcggaagtggaggcggaggatctggcggcggaggctctcaggttcagctgcaacagcctggcgctgagcttgtgaaacctggcgcttccgtgaagatgagctgcaaggccagcggctacaccttcaccagctataacatgcactgggtcaagcagaccccaggcagaggactggaatggatcggagccatctatcccggcaacggcgacacctcctacaaccagaagttcaagggcaaagccacactgaccgccgacaagagcagcagcacagcctacatgcagctgagcagcctgaccagcgaagatagcgccgtgtactactgcgcccggtctacctattatggcggcgactggtacttcaacgtgtggggagctggcaccaccgtgacagtttctacgcgtcagagttttgggttgttggaccctaaattgtgctatctgttggacggaatcctgttcatttacggagtgatcctgaccgcattgttcctgcgggttaagttttccagatccgcagacgcacccgcttaccaacaagggcagaaccaactctacaatgaacttaatttggggcggagggaagagtacgacgttctggacaaaaggaggggacgagatcccgagatgggcggaaagcctcagcgaaggaagaatccgcaagaggggctttataacgaactccagaaagataaaatggcagaagcctatagtgagattgggatgaagggagaaaggaggaggggtaaaggtcacgatgggttgtaccaaggattgagcacagccactaaagatacctatgatgcgctccacatgcaggccctgccgccaaga

SEQ ID NO: 8617 - DNA, 1347 bp, Artificial Sequence
  Synthetic Polynucloetide
atggccttaccagtgaccgccttgctcctgccgctggccttgctgctccacgccgccaggccgcaggttcagctgcaacagcctggcgctgagcttgtgaaacctggcgcttccgtgaagatgagctgcaaggccagcggctacaccttcaccagctataacatgcactgggtcaagcagaccccaggcagaggactggaatggatcggagccatctatcccggcaacggcgacacctcctacaaccagaagttcaagggcaaagccacactgaccgccgacaagagcagcagcacagcctacatgcagctgagcagcctgaccagcgaagatagcgccgtgtactactgcgcccggtctacctattatggcggcgactggtacttcaacgtgtggggagctggcaccaccgtgacagtttctggcggaggcggaagtggaggcggaggatctggcggcggaggctctcagatcgtgctgtctcagtctcctgccatcctgagtgcctctccaggcgagaaagtgaccatgacctgtagagccagcagcagcgtgtcctacatccactggttccagcagaagcctggcagcagccctaagccttggatctacgccaccagcaatctggcctctggcgtgccagtcagattttctggcagcggctctggcaccagctacagcctgacaatcagcagagtggaagccgaggatgccgccacctactactgtcagcagtggacctccaatcctcctacctttggcggaggcaccaagctggaaatcaaaacgcgtgacggtaacgaggagatgggaggaatcactcaaaccccttacaaagtctcaatttcaggaacaactgttatccttacatgtccccagtatcctggcagcgagatcctttggcagcataacgacaagaatatagggggagatgaagacgataagaatatcggatctgacgaggatcacttgagcctgaaagagttctccgagcttgaacaaagcggatattatgtgtgctatccgcgcgggtcaaagccggaagacgctaacttttacctttatctccgagccagagtgtgcgaaaattgcatggaaatggacgttatgtccgttgctacaatagttatcgtagatatatgcatcacgggtggactgcttctgctggtttattattggtccaagaatagaaaggccaaagctaaacccgtgaccagaggcgctggcgcaggcggaaggcaaaggggacaaaacaaagaacggccaccaccagtgccaaatccagattatgagcctattcggaaaggacagagggacctgtactctggcctgaatcagagaagaatc

SEQ ID NO: 8618 - DNA, 1242 bp, Artificial Sequence
  Synthetic Polynucloetide
atggccttaccagtgaccgccttgctcctgccgctggccttgctgctccacgccgccaggccgcaggttcagctgcaacagcctggcgctgagcttgtgaaacctggcgcttccgtgaagatgagctgcaaggccagcggctacaccttcaccagctataacatgcactgggtcaagcagaccccaggcagaggactggaatggatcggagccatctatcccggcaacggcgacacctcctacaaccagaagttcaagggcaaagccacactgaccgccgacaagagcagcagcacagcctacatgcagctgagcagcctgaccagcgaagatagcgccgtgtactactgcgcccggtctacctattatggcggcgactggtacttcaacgtgtggggagctggcaccaccgtgacagtttctggcggaggcggaagtggaggcggaggatctggcggcggaggctctcagatcgtgctgtctcagtctcctgccatcctgagtgcctctccaggcgagaaagtgaccatgacctgtagagccagcagcagcgtgtcctacatccactggttccagcagaagcctggcagcagccctaagccttggatctacgccaccagcaatctggcctctggcgtgccagtcagattttctggcagcggctctggcaccagctacagcctgacaatcagcagagtggaagccgaggatgccgccacctactactgtcagcagtggacctccaatcctcctacctttggcggaggcaccaagctggaaatcaaaacgcgtttcaagatccccatcgaggaactggaagatcgggtgttcgtgaactgcaacacctctatcacctgggtggaaggcaccgtgggaacactgctgagcgacatcaccagactggacctcggcaagcggattctggaccctcggggcatctacagatgcaacggcaccgacatctacaaggacaaagaaagcaccgtgcaggtccactacagaatgtgccagtcctgcgtggaactggaccctgctacagtggccggcatcatcgtgaccgatgtgatcgctactctgctgctggctctgggagtgttctgcttcgccggacacgaaacaggcagactgtctggcgctgccgatacacaggccctgctgagaaacgaccaagtgtatcagcccctgcgcgacagagatgatgcccagtattctcacctcggcggcaactgggctagaaacaag

SEQ ID NO: 8619 - DNA, 1272 bp, Artificial Sequence
  Synthetic Polynucloetide
atggccttaccagtgaccgccttgctcctgccgctggccttgctgctccacgccgccaggccgcaggttcagctgcaacagcctggcgctgagcttgtgaaacctggcgcttccgtgaagatgagctgcaaggccagcggctacaccttcaccagctataacatgcactgggtcaagcagaccccaggcagaggactggaatggatcggagccatctatcccggcaacggcgacacctcctacaaccagaagttcaagggcaaagccacactgaccgccgacaagagcagcagcacagcctacatgcagctgagcagcctgaccagcgaagatagcgccgtgtactactgcgcccggtctacctattatggcggcgactggtacttcaacgtgtggggagctggcaccaccgtgacagtttctggcggaggcggaagtggaggcggaggatctggcggcggaggctctcagatcgtgctgtctcagtctcctgccatcctgagtgcctctccaggcgagaaagtgaccatgacctgtagagccagcagcagcgtgtcctacatccactggttccagcagaagcctggcagcagccctaagccttggatctacgccaccagcaatctggcctctggcgtgccagtcagattttctggcagcggctctggcaccagctacagcctgacaatcagcagagtggaagccgaggatgccgccacctactactgtcagcagtggacctccaatcctcctacctttggcggaggcaccaagctggaaatcaaaacgcgtcagagcatcaagggcaaccacctggtcaaggtgtacgactaccaagaggacggcagcgtgctgctgacatgtgatgccgaggccaagaacatcacctggtttaaggacggcaagatgatcggcttcctgaccgaggacaagaagaagtggaacctgggcagcaacgctaaggaccccagaggcatgtatcagtgcaagggcagccagaacaagagcaagcccctccaggtgtactaccggatgtgccagaactgcatcgagctgaacgccgctaccatcagcggctttctgttcgccgagatcgtgtccatcttcgtgctggccgtgggcgtgtactttatcgctggacaggatggcgtgcggcagagcagagcttccgataagcaaaccctgctgcctaacgaccagctgtaccagcctctgaaggacagagaggacgaccagtacagccacctccagggcaatcagctgagaagaaac

SEQ ID NO: 8620 - DNA, 1221 bp, Artificial Sequence
  Synthetic Polynucloetide
atggccttaccagtgaccgccttgctcctgccgctggccttgctgctccacgccgccaggccgcaggttcagctgcaacagcctggcgctgagcttgtgaaacctggcgcttccgtgaagatgagctgcaaggccagcggctacaccttcaccagctataacatgcactgggtcaagcagaccccaggcagaggactggaatggatcggagccatctatcccggcaacggcgacacctcctacaaccagaagttcaagggcaaagccacactgaccgccgacaagagcagcagcacagcctacatgcagctgagcagcctgaccagcgaagatagcgccgtgtactactgcgcccggtctacctattatggcggcgactggtacttcaacgtgtggggagctggcaccaccgtgacagtttctggcggaggcggaagtggaggcggaggatctggcggcggaggctctcagatcgtgctgtctcagtctcctgccatcctgagtgcctctccaggcgagaaagtgaccatgacctgtagagccagcagcagcgtgtcctacatccactggttccagcagaagcctggcagcagccctaagccttggatctacgccaccagcaatctggcctctggcgtgccagtcagattttctggcagcggctctggcaccagctacagcctgacaatcagcagagtggaagccgaggatgccgccacctactactgtcagcagtggacctccaatcctcctacctttggcggaggcaccaagctggaaatcaaaacgcgtcagagttttgggttgttggaccctaaattgtgctatctgttggacggaatcctgttcatttacggagtgatcctgaccgcattgttcctgcgggttaagttttccagatccgcagacgcacccgcttaccaacaagggcagaaccaactctacaatgaacttaatttggggcggagggaagagtacgacgttctggacaaaaggaggggacgagatcccgagatgggcggaaagcctcagcgaaggaagaatccgcaagaggggctttataacgaactccagaaagataaaatggcagaagcctatagtgagattgggatgaagggagaaaggaggaggggtaaaggtcacgatgggttgtaccaaggattgagcacagccactaaagatacctatgatgcgctccacatgcaggccctgccgccaaga

SEQ ID NO: 8621 - DNA, 1923 bp, Artificial Sequence
  Synthetic Polynucloetide
atggccttaccagtgaccgccttgctcctgccgctggccttgctgctccacgccgccaggccgcagatcgtgctgtctcagtctcctgccatcctgagtgcctctccaggcgagaaagtgaccatgacctgtagagccagcagcagcgtgtcctacatccactggttccagcagaagcctggcagcagccctaagccttggatctacgccaccagcaatctggcctctggcgtgccagtcagattttctggcagcggctctggcaccagctacagcctgacaatcagcagagtggaagccgaggatgccgccacctactactgtcagcagtggacctccaatcctcctacctttggcggaggcaccaagctggaaatcaaaggcggaggcggaagtggaggcggaggatctggcggcggaggctctcaggttcagctgcaacagcctggcgctgagcttgtgaaacctggcgcttccgtgaagatgagctgcaaggccagcggctacaccttcaccagctataacatgcactgggtcaagcagaccccaggcagaggactggaatggatcggagccatctatcccggcaacggcgacacctcctacaaccagaagttcaagggcaaagccacactgaccgccgacaagagcagcagcacagcctacatgcagctgagcagcctgaccagcgaagatagcgccgtgtactactgcgcccggtctacctattatggcggcgactggtacttcaacgtgtggggagctggcaccaccgtgacagtttctacgcgtgggagcggcatccagaaccctgatcctgccgtgtaccagctgcgggatagcaagagcagcgacaagagcgtgtgtctgttcaccgacttcgacagccagaccaacgtgtcccagagcaaggactccgacgtgtacatcaccgataagaccgtgctggacatgcggagcatggacttcaagagcaactccgccgtggcctggtccaacaagtccgatttcgcctgcgccaacgccttcaacaacagcattatccccgaggacacattcttcccaagccccgagagcagctgcgacgtgaagctggtggaaaagagcttcgagacagacaccaacctgaacttccagaacctgagcgtgatcggcttcagaatcctgctgctgaaagtggccggctttaacctgctgatgaccctgcggctgtggtccagccgcgccaagagaagcggatctggcgtgaagcagaccctgaatttcgacctgctgaagctggctggcgacgtggaatccaacccaggcccttctagaggccatatgaccgagtacaagcccacggtgcgcctcgccacccgcgacgacgtccccagggccgtacgcaccctcgccgccgcgttcgccgactaccccgccacgcgccacaccgtcgatccggaccgccacatcgagcgggtcaccgagctgcaagaactcttcctcacgcgcgtcgggctcgacatcggcaaggtgtgggtcgcggacgacggcgccgcggtggcggtctggaccacgccggagagcgtcgaagcgggggcggtgttcgccgagatcggcccgcgcatggccgagttgagcggttcccggctggccgcgcagcaacagatggaaggcctcctggcgccgcaccggcccaaggagcccgcgtggttcctggccaccgtcggcgtctcgcccgaccaccagggcaagggtctgggcagcgccgtcgtgctccccggagtggaggcggccgagcgcgccggggtgcccgccttcctggagacctccgcgccccgcaacctccccttctacgagcggctcggcttcaccgtcaccgccgacgtcgaggtgcccgaaggaccgcgcacctggtgcatgacccgcaagcccggtgcctga

SEQ ID NO: 8622 - DNA, 2019 bp, Artificial Sequence
  Synthetic Polynucloetide
atggccttaccagtgaccgccttgctcctgccgctggccttgctgctccacgccgccaggccgcagatcgtgctgtctcagtctcctgccatcctgagtgcctctccaggcgagaaagtgaccatgacctgtagagccagcagcagcgtgtcctacatccactggttccagcagaagcctggcagcagccctaagccttggatctacgccaccagcaatctggcctctggcgtgccagtcagattttctggcagcggctctggcaccagctacagcctgacaatcagcagagtggaagccgaggatgccgccacctactactgtcagcagtggacctccaatcctcctacctttggcggaggcaccaagctggaaatcaaaggcggaggcggaagtggaggcggaggatctggcggcggaggctctcaggttcagctgcaacagcctggcgctgagcttgtgaaacctggcgcttccgtgaagatgagctgcaaggccagcggctacaccttcaccagctataacatgcactgggtcaagcagaccccaggcagaggactggaatggatcggagccatctatcccggcaacggcgacacctcctacaaccagaagttcaagggcaaagccacactgaccgccgacaagagcagcagcacagcctacatgcagctgagcagcctgaccagcgaagatagcgccgtgtactactgcgcccggtctacctattatggcggcgactggtacttcaacgtgtggggagctggcaccaccgtgacagtttctctcgaggacctgaagaacgtgttcccacctgaggtggccgtgttcgagcctagcgaggccgagatcagccacacccagaaagccaccctcgtgtgcctggctaccggcttctaccccgaccatgtggaactgtcttggtgggtcaacggcaaagaggtgcacagcggcgtgtctaccgacccccagccactgaaagaacagcccgccctgaacgacagccggtactgcctgagcagcagactgagagtgtccgccaccttctggcagaacccccggaaccacttcagatgccaggtgcagttctacggcctgagcgagaacgacgagtggacccaggacagagccaagcccgtgacccagatcgtgtctgccgaagcctggggcagagccgattgcggctttaccagcgagagctaccagcagggcgtgctgagcgccaccatcctgtacgagatcctgctgggcaaggccaccctgtacgccgtgctggtgtctgccctggtgctgatggctatggtcaagcggaaggacagccggggaagggccaagcgatctggatctggagcaacaaacttctcactactcaaacaagcaggtgacgtggaggagaatcccgggcctactagaggccatatgaccgagtacaagcccacggtgcgcctcgccacccgcgacgacgtccccagggccgtacgcaccctcgccgccgcgttcgccgactaccccgccacgcgccacaccgtcgatccggaccgccacatcgagcgggtcaccgagctgcaagaactcttcctcacgcgcgtcgggctcgacatcggcaaggtgtgggtcgcggacgacggcgccgcggtggcggtctggaccacgccggagagcgtcgaagcgggggcggtgttcgccgagatcggcccgcgcatggccgagttgagcggttcccggctggccgcgcagcaacagatggaaggcctcctggcgccgcaccggcccaaggagcccgcgtggttcctggccaccgtcggcgtctcgcccgaccaccagggcaagggtctgggcagcgccgtcgtgctccccggagtggaggcggccgagcgcgccggggtgcccgccttcctggagacctccgcgccccgcaacctccccttctacgagcggctcggcttcaccgtcaccgccgacgtcgaggtgcccgaaggaccgcgcacctggtgcatgacccgcaagcccggtgcctga

SEQ ID NO: 8623 - DNA, 2169 bp, Artificial Sequence
  Synthetic Polynucloetide
atggccttaccagtgaccgccttgctcctgccgctggccttgctgctccacgccgccaggccgcagatcgtgctgtctcagtctcctgccatcctgagtgcctctccaggcgagaaagtgaccatgacctgtagagccagcagcagcgtgtcctacatccactggttccagcagaagcctggcagcagccctaagccttggatctacgccaccagcaatctggcctctggcgtgccagtcagattttctggcagcggctctggcaccagctacagcctgacaatcagcagagtggaagccgaggatgccgccacctactactgtcagcagtggacctccaatcctcctacctttggcggaggcaccaagctggaaatcaaaggcggaggcggaagtggaggcggaggatctggcggcggaggctctcaggttcagctgcaacagcctggcgctgagcttgtgaaacctggcgcttccgtgaagatgagctgcaaggccagcggctacaccttcaccagctataacatgcactgggtcaagcagaccccaggcagaggactggaatggatcggagccatctatcccggcaacggcgacacctcctacaaccagaagttcaagggcaaagccacactgaccgccgacaagagcagcagcacagcctacatgcagctgagcagcctgaccagcgaagatagcgccgtgtactactgcgcccggtctacctattatggcggcgactggtacttcaacgtgtggggagctggcaccaccgtgacagtttctacgcgtgagcagaaactgatctcggaagaggatctggggagcggcaccccattcccttctctggcccctcccatcatgctgctggtggacggcaagcagcagatggtggtcgtgtgcctggtgctggatgtggccccacctggactggacagccccatctggtttagcgccggcaatggctctgccctggacgcctttacctacggcccaagccctgccaccgatggcacctggacaaatctggcccacctgagcctgcccagcgaggaactggcttcttgggagcctctcgtgtgccacacaggacctggcgctgagggacacagcagatccacccagcctatgcacctgtctggcgaggccagcaccgccagaacctgtcctcaggaacctctgagaggcacccctggcggagcactgtggctgggagtgctgagactgctgctgttcaagctgctgctgtttgacctgctgctgacctgctcctgtctgtgcgatcctgccggccctctgccttctcctgccaccaccacaagactgagagccctgggcagccacagactgcaccctgccacagagacaggcggcagagaggccacaagcagccctagaccccagcccagagacagaagatggggcgataccccccctggcagaaagcctggatctccagtccgcgccaagagaagcggatctggcgtgaagcagaccctgaatttcgacctgctgaagctggctggcgacgtggaatccaacccaggcccttctagatctagaggccatatgaccgagtacaagcccacggtgcgcctcgccacccgcgacgacgtccccagggccgtacgcaccctcgccgccgcgttcgccgactaccccgccacgcgccacaccgtcgatccggaccgccacatcgagcgggtcaccgagctgcaagaactcttcctcacgcgcgtcgggctcgacatcggcaaggtgtgggtcgcggacgacggcgccgcggtggcggtctggaccacgccggagagcgtcgaagcgggggcggtgttcgccgagatcggcccgcgcatggccgagttgagcggttcccggctggccgcgcagcaacagatggaaggcctcctggcgccgcaccggcccaaggagcccgcgtggttcctggccaccgtcggcgtctcgcccgaccaccagggcaagggtctgggcagcgccgtcgtgctccccggagtggaggcggccgagcgcgccggggtgcccgccttcctggagacctccgcgccccgcaacctccccttctacgagcggctcggcttcaccgtcaccgccgacgtcgaggtgcccgaaggaccgcgcacctggtgcatgacccgcaagcccggtgcctga

SEQ ID NO: 8624 - DNA, 1614 bp, Artificial Sequence
  Synthetic Polynucloetide
atggccttaccagtgaccgccttgctcctgccgctggccttgctgctccacgccgccaggccgcagatcgtgctgtctcagtctcctgccatcctgagtgcctctccaggcgagaaagtgaccatgacctgtagagccagcagcagcgtgtcctacatccactggttccagcagaagcctggcagcagccctaagccttggatctacgccaccagcaatctggcctctggcgtgccagtcagattttctggcagcggctctggcaccagctacagcctgacaatcagcagagtggaagccgaggatgccgccacctactactgtcagcagtggacctccaatcctcctacctttggcggaggcaccaagctggaaatcaaactcgaggacctgaagaacgtgttcccacctgaggtggccgtgttcgagcctagcgaggccgagatcagccacacccagaaagccaccctcgtgtgcctggctaccggcttctaccccgaccatgtggaactgtcttggtgggtcaacggcaaagaggtgcacagcggcgtgtctaccgacccccagccactgaaagaacagcccgccctgaacgacagccggtactgcctgagcagcagactgagagtgtccgccaccttctggcagaacccccggaaccacttcagatgccaggtgcagttctacggcctgagcgagaacgacgagtggacccaggacagagccaagcccgtgacccagatcgtgtctgccgaagcctggggcagagccgattgcggctttaccagcgagagctaccagcagggcgtgctgagcgccaccatcctgtacgagatcctgctgggcaaggccaccctgtacgccgtgctggtgtctgccctggtgctgatggctatggtcaagcggaaggacagccggggaagggccaagcgatctggatctggagcaacaaacttctcactactcaaacaagcaggtgacgtggaggagaatcccgggcctactagaggccatatgaccgagtacaagcccacggtgcgcctcgccacccgcgacgacgtccccagggccgtacgcaccctcgccgccgcgttcgccgactaccccgccacgcgccacaccgtcgatccggaccgccacatcgagcgggtcaccgagctgcaagaactcttcctcacgcgcgtcgggctcgacatcggcaaggtgtgggtcgcggacgacggcgccgcggtggcggtctggaccacgccggagagcgtcgaagcgggggcggtgttcgccgagatcggcccgcgcatggccgagttgagcggttcccggctggccgcgcagcaacagatggaaggcctcctggcgccgcaccggcccaaggagcccgcgtggttcctggccaccgtcggcgtctcgcccgaccaccagggcaagggtctgggcagcgccgtcgtgctccccggagtggaggcggccgagcgcgccggggtgcccgccttcctggagacctccgcgccccgcaacctccccttctacgagcggctcggcttcaccgtcaccgccgacgtcgaggtgcccgaaggaccgcgcacctggtgcatgacccgcaagcccggtgcctga

SEQ ID NO: 8625 - DNA, 921 bp, Artificial Sequence
  Synthetic Polynucloetide
atggccttaccagtgaccgccttgctcctgccgctggccttgctgctccacgccgccaggccgcagatcgtgctgtctcagtctcctgccatcctgagtgcctctccaggcgagaaagtgaccatgacctgtagagccagcagcagcgtgtcctacatccactggttccagcagaagcctggcagcagccctaagccttggatctacgccaccagcaatctggcctctggcgtgccagtcagattttctggcagcggctctggcaccagctacagcctgacaatcagcagagtggaagccgaggatgccgccacctactactgtcagcagtggacctccaatcctcctacctttggcggaggcaccaagctggaaatcaaactcgaggacctgaagaacgtgttcccacctgaggtggccgtgttcgagcctagcgaggccgagatcagccacacccagaaagccaccctcgtgtgcctggctaccggcttctaccccgaccatgtggaactgtcttggtgggtcaacggcaaagaggtgcacagcggcgtgtctaccgacccccagccactgaaagaacagcccgccctgaacgacagccggtactgcctgagcagcagactgagagtgtccgccaccttctggcagaacccccggaaccacttcagatgccaggtgcagttctacggcctgagcgagaacgacgagtggacccaggacagagccaagcccgtgacccagatcgtgtctgccgaagcctggggcagagccgattgcggctttaccagcgagagctaccagcagggcgtgctgagcgccaccatcctgtacgagatcctgctgggcaaggccaccctgtacgccgtgctggtgtctgccctggtgctgatggctatggtcaagcggaaggacagccgggga

SEQ ID NO: 8626 - DNA, 1350 bp, Artificial Sequence
  Synthetic Polynucloetide
atggactggatttggcgcatccttttccttgtcggcgctgctaccggcgcgcattccttcgaacaggttcagctgcaacagcctggcgctgagcttgtgaaacctggcgcttccgtgaagatgagctgcaaggccagcggctacaccttcaccagctataacatgcactgggtcaagcagaccccaggcagaggactggaatggatcggagccatctatcccggcaacggcgacacctcctacaaccagaagttcaagggcaaagccacactgaccgccgacaagagcagcagcacagcctacatgcagctgagcagcctgaccagcgaagatagcgccgtgtactactgcgcccggtctacctattatggcggcgactggtacttcaacgtgtggggagctggcaccaccgtgacagtttctacgcgtatccagaaccctgatcctgccgtgtaccagctgcgggatagcaagagcagcgacaagagcgtgtgtctgttcaccgacttcgacagccagaccaacgtgtcccagagcaaggactccgacgtgtacatcaccgataagaccgtgctggacatgcggagcatggacttcaagagcaactccgccgtggcctggtccaacaagtccgatttcgcctgcgccaacgccttcaacaacagcattatccccgaggacacattcttcccaagccccgagagcagctgcgacgtgaagctggtggaaaagagcttcgagacagacaccaacctgaacttccagaacctgagcgtgatcggcttcagaatcctgctgctgaaagtggccggctttaacctgctgatgaccctgcggctgtggtccagccgcgccaagagaagcggatctggcgtgaagcagaccctgaatttcgacctgctgaagctggctggcgacgtggaatccaacccaggcccttctagaggccatatggccaagcctttgtctcaagaagaatccaccctcattgaaagagcaacggctacaatcaacagcatccccatctctgaagactacagcgtcgccagcgcagctctctctagcgacggccgcatcttcactggtgtcaatgtatatcattttactgggggaccttgtgcagaactcgtggtgctgggcactgctgctgctgcggcagctggcaacctgacttgtatcgtcgcgatcggaaatgagaacaggggcatcttgagcccctgcggacggtgccgacaggtgcttctcgatctgcatcctgggatcaaagccatagtgaaggacagtgatggacagccgacggcagttgggattcgtgaattgctgccctctggttatgtgtgggagggctga

SEQ ID NO: 8627 - DNA, 849 bp, Artificial Sequence
  Synthetic Polynucloetide
atggactggatttggcgcatccttttccttgtcggcgctgctaccggcgcgcattccttcgaacaggttcagctgcaacagcctggcgctgagcttgtgaaacctggcgcttccgtgaagatgagctgcaaggccagcggctacaccttcaccagctataacatgcactgggtcaagcagaccccaggcagaggactggaatggatcggagccatctatcccggcaacggcgacacctcctacaaccagaagttcaagggcaaagccacactgaccgccgacaagagcagcagcacagcctacatgcagctgagcagcctgaccagcgaagatagcgccgtgtactactgcgcccggtctacctattatggcggcgactggtacttcaacgtgtggggagctggcaccaccgtgacagtttctacgcgtatccagaaccctgatcctgccgtgtaccagctgcgggatagcaagagcagcgacaagagcgtgtgtctgttcaccgacttcgacagccagaccaacgtgtcccagagcaaggactccgacgtgtacatcaccgataagaccgtgctggacatgcggagcatggacttcaagagcaactccgccgtggcctggtccaacaagtccgatttcgcctgcgccaacgccttcaacaacagcattatccccgaggacacattcttcccaagccccgagagcagctgcgacgtgaagctggtggaaaagagcttcgagacagacaccaacctgaacttccagaacctgagcgtgatcggcttcagaatcctgctgctgaaagtggccggctttaacctgctgatgaccctgcggctgtggtccagc

SEQ ID NO: 8628 - DNA, 1668 bp, Artificial Sequence
  Synthetic Polynucloetide
atggccttaccagtgaccgccttgctcctgccgctggccttgctgctccacgccgccaggccgcagatcgtgctgtctcagtctcctgccatcctgagtgcctctccaggcgagaaagtgaccatgacctgtagagccagcagcagcgtgtcctacatccactggttccagcagaagcctggcagcagccctaagccttggatctacgccaccagcaatctggcctctggcgtgccagtcagattttctggcagcggctctggcaccagctacagcctgacaatcagcagagtggaagccgaggatgccgccacctactactgtcagcagtggacctccaatcctcctacctttggcggaggcaccaagctggaaatcaaactcgaggggaaaccaattcccaaccctcttctgggactggattcaaccggcagcggcgaggacctgaagaacgtgttcccacctgaggtggccgtgttcgagcctagcgaggccgagatcagccacacccagaaagccaccctcgtgtgcctggctaccggcttctaccccgaccatgtggaactgtcttggtgggtcaacggcaaagaggtgcacagcggcgtgtgtaccgacccccagccactgaaagaacagcccgccctgaacgacagccggtactgcctgagcagcagactgagagtgtccgccaccttctggcagaacccccggaaccacttcagatgccaggtgcagttctacggcctgagcgagaacgacgagtggacccaggacagagccaagcccgtgacccagatcgtgtctgccgaagcctggggcagagccgattgcggctttaccagcgagagctaccagcagggcgtgctgagcgccaccatcctgtacgagatcctgctgggcaaggccaccctgtacgccgtgctggtgtctgccctggtgctgatggctatggtcaagcggaaggacagccggggaagggccaagcgatctggatctggagcaacaaacttctcactactcaaacaagcaggtgacgtggaggagaatcccgggcctactagaggccatatgaccgagtacaagcccacggtgcgcctcgccacccgcgacgacgtccccagggccgtacgcaccctcgccgccgcgttcgccgactaccccgccacgcgccacaccgtcgatccggaccgccacatcgagcgggtcaccgagctgcaagaactcttcctcacgcgcgtcgggctcgacatcggcaaggtgtgggtcgcggacgacggcgccgcggtggcggtctggaccacgccggagagcgtcgaagcgggggcggtgttcgccgagatcggcccgcgcatggccgagttgagcggttcccggctggccgcgcagcaacagatggaaggcctcctggcgccgcaccggcccaaggagcccgcgtggttcctggccaccgtcggcgtctcgcccgaccaccagggcaagggtctgggcagcgccgtcgtgctccccggagtggaggcggccgagcgcgccggggtgcccgccttcctggagacctccgcgccccgcaacctccccttctacgagcggctcggcttcaccgtcaccgccgacgtcgaggtgcccgaaggaccgcgcacctggtgcatgacccgcaagcccggtgcctga

SEQ ID NO: 8629 - DNA, 978 bp, Artificial Sequence
  Synthetic Polynucloetide
atggccttaccagtgaccgccttgctcctgccgctggccttgctgctccacgccgccaggccgcagatcgtgctgtctcagtctcctgccatcctgagtgcctctccaggcgagaaagtgaccatgacctgtagagccagcagcagcgtgtcctacatccactggttccagcagaagcctggcagcagccctaagccttggatctacgccaccagcaatctggcctctggcgtgccagtcagattttctggcagcggctctggcaccagctacagcctgacaatcagcagagtggaagccgaggatgccgccacctactactgtcagcagtggacctccaatcctcctacctttggcggaggcaccaagctggaaatcaaactcgaggggaaaccaattcccaaccctcttctgggactggattcaaccggcagcggcgaggacctgaagaacgtgttcccacctgaggtggccgtgttcgagcctagcgaggccgagatcagccacacccagaaagccaccctcgtgtgcctggctaccggcttctaccccgaccatgtggaactgtcttggtgggtcaacggcaaagaggtgcacagcggcgtgtgtaccgacccccagccactgaaagaacagcccgccctgaacgacagccggtactgcctgagcagcagactgagagtgtccgccaccttctggcagaacccccggaaccacttcagatgccaggtgcagttctacggcctgagcgagaacgacgagtggacccaggacagagccaagcccgtgacccagatcgtgtctgccgaagcctggggcagagccgattgcggctttaccagcgagagctaccagcagggcgtgctgagcgccaccatcctgtacgagatcctgctgggcaaggccaccctgtacgccgtgctggtgtctgccctggtgctgatggctatggtcaagcggaaggacagccggggatga

SEQ ID NO: 8630 - DNA, 1386 bp, Artificial Sequence
  Synthetic Polynucloetide
atggactggatttggcgcatccttttccttgtcggcgctgctaccggcgcgcattccttcgaacaggttcagctgcaacagcctggcgctgagcttgtgaaacctggcgcttccgtgaagatgagctgcaaggccagcggctacaccttcaccagctataacatgcactgggtcaagcagaccccaggcagaggactggaatggatcggagccatctatcccggcaacggcgacacctcctacaaccagaagttcaagggcaaagccacactgaccgccgacaagagcagcagcacagcctacatgcagctgagcagcctgaccagcgaagatagcgccgtgtactactgcgcccggtctacctattatggcggcgactggtacttcaacgtgtggggagctggcaccaccgtgacagtttctacgcgtgagcagaaactgatctcggaagaggatgggagcggcatccagaaccctgatcctgccgtgtaccagctgcgggatagcaagagcagcgacaagagcgtgtgtctgttcaccgacttcgacagccagaccaacgtgtcccagagcaaggactccgacgtgtacatcaccgataagtgcgtgctggacatgcggagcatggacttcaagagcaactccgccgtggcctggtccaacaagtccgatttcgcctgcgccaacgccttcaacaacagcattatccccgaggacacattcttcccaagccccgagagcagctgcgacgtgaagctggtggaaaagagcttcgagacagacaccaacctgaacttccagaacctgagcgtgatcggcttcagaatcctgctgctgaaagtggccggctttaacctgctgatgaccctgcggctgtggtccagccgcgccaagagaagcggatctggcgtgaagcagaccctgaatttcgacctgctgaagctggctggcgacgtggaatccaacccaggcccttctagaggccatatggccaagcctttgtctcaagaagaatccaccctcattgaaagagcaacggctacaatcaacagcatccccatctctgaagactacagcgtcgccagcgcagctctctctagcgacggccgcatcttcactggtgtcaatgtatatcattttactgggggaccttgtgcagaactcgtggtgctgggcactgctgctgctgcggcagctggcaacctgacttgtatcgtcgcgatcggaaatgagaacaggggcatcttgagcccctgcggacggtgccgacaggtgcttctcgatctgcatcctgggatcaaagccatagtgaaggacagtgatggacagccgacggcagttgggattcgtgaattgctgccctctggttatgtgtgggagggctga

SEQ ID NO: 8631 - DNA, 888 bp, Artificial Sequence
  Synthetic Polynucloetide
atggactggatttggcgcatccttttccttgtcggcgctgctaccggcgcgcattccttcgaacaggttcagctgcaacagcctggcgctgagcttgtgaaacctggcgcttccgtgaagatgagctgcaaggccagcggctacaccttcaccagctataacatgcactgggtcaagcagaccccaggcagaggactggaatggatcggagccatctatcccggcaacggcgacacctcctacaaccagaagttcaagggcaaagccacactgaccgccgacaagagcagcagcacagcctacatgcagctgagcagcctgaccagcgaagatagcgccgtgtactactgcgcccggtctacctattatggcggcgactggtacttcaacgtgtggggagctggcaccaccgtgacagtttctacgcgtgagcagaaactgatctcggaagaggatgggagcggcatccagaaccctgatcctgccgtgtaccagctgcgggatagcaagagcagcgacaagagcgtgtgtctgttcaccgacttcgacagccagaccaacgtgtcccagagcaaggactccgacgtgtacatcaccgataagtgcgtgctggacatgcggagcatggacttcaagagcaactccgccgtggcctggtccaacaagtccgatttcgcctgcgccaacgccttcaacaacagcattatccccgaggacacattcttcccaagccccgagagcagctgcgacgtgaagctggtggaaaagagcttcgagacagacaccaacctgaacttccagaacctgagcgtgatcggcttcagaatcctgctgctgaaagtggccggctttaacctgctgatgaccctgcggctgtggtccagctga

SEQ ID NO: 8632 - DNA, 1923 bp, Artificial Sequence
  Synthetic Polynucloetide
atggccttaccagtgaccgccttgctcctgccgctggccttgctgctccacgccgccaggccgcagatcgtgctgtctcagtctcctgccatcctgagtgcctctccaggcgagaaagtgaccatgacctgtagagccagcagcagcgtgtcctacatccactggttccagcagaagcctggcagcagccctaagccttggatctacgccaccagcaatctggcctctggcgtgccagtcagattttctggcagcggctctggcaccagctacagcctgacaatcagcagagtggaagccgaggatgccgccacctactactgtcagcagtggacctccaatcctcctacctttggcggaggcaccaagctggaaatcaaaggcggaggcggaagtggaggcggaggatctggcggcggaggctctcaggttcagctgcaacagcctggcgctgagcttgtgaaacctggcgcttccgtgaagatgagctgcaaggccagcggctacaccttcaccagctataacatgcactgggtcaagcagaccccaggcagaggactggaatggatcggagccatctatcccggcaacggcgacacctcctacaaccagaagttcaagggcaaagccacactgaccgccgacaagagcagcagcacagcctacatgcagctgagcagcctgaccagcgaagatagcgccgtgtactactgcgcccggtctacctattatggcggcgactggtacttcaacgtgtggggagctggcaccaccgtgacagtttctacgcgtgggagcggcatccagaaccctgatcctgccgtgtaccagctgcgggatagcaagagcagcgacaagagcgtgtgtctgttcaccgacttcgacagccagaccaacgtgtcccagagcaaggactccgacgtgtacatcaccgataagaccgtgctggacatgcggagcatggacttcaagagcaactccgccgtggcctggtccaacaagtccgatttcgcctgcgccaacgccttcaacaacagcattatccccgaggacacattcttcccaagcagcgacgtgccctgcgacgtgaagctggtggaaaagagcttcgagacagacaccaacctgaacttccagaacctgagcgtgatcggcttcagaatcctgctgctgaaagtggccggctttaacctgctgatgaccctgcggctgtggtccagccgcgccaagagaagcggatctggcgtgaagcagaccctgaatttcgacctgctgaagctggctggcgacgtggaatccaacccaggcccttctagaggccatatgaccgagtacaagcccacggtgcgcctcgccacccgcgacgacgtccccagggccgtacgcaccctcgccgccgcgttcgccgactaccccgccacgcgccacaccgtcgatccggaccgccacatcgagcgggtcaccgagctgcaagaactcttcctcacgcgcgtcgggctcgacatcggcaaggtgtgggtcgcggacgacggcgccgcggtggcggtctggaccacgccggagagcgtcgaagcgggggcggtgttcgccgagatcggcccgcgcatggccgagttgagcggttcccggctggccgcgcagcaacagatggaaggcctcctggcgccgcaccggcccaaggagcccgcgtggttcctggccaccgtcggcgtctcgcccgaccaccagggcaagggtctgggcagcgccgtcgtgctccccggagtggaggcggccgagcgcgccggggtgcccgccttcctggagacctccgcgccccgcaacctccccttctacgagcggctcggcttcaccgtcaccgccgacgtcgaggtgcccgaaggaccgcgcacctggtgcatgacccgcaagcccggtgcctga

SEQ ID NO: 8633 - DNA, 2019 bp, Artificial Sequence
  Synthetic Polynucloetide
atggccttaccagtgaccgccttgctcctgccgctggccttgctgctccacgccgccaggccgcagatcgtgctgtctcagtctcctgccatcctgagtgcctctccaggcgagaaagtgaccatgacctgtagagccagcagcagcgtgtcctacatccactggttccagcagaagcctggcagcagccctaagccttggatctacgccaccagcaatctggcctctggcgtgccagtcagattttctggcagcggctctggcaccagctacagcctgacaatcagcagagtggaagccgaggatgccgccacctactactgtcagcagtggacctccaatcctcctacctttggcggaggcaccaagctggaaatcaaaggcggaggcggaagtggaggcggaggatctggcggcggaggctctcaggttcagctgcaacagcctggcgctgagcttgtgaaacctggcgcttccgtgaagatgagctgcaaggccagcggctacaccttcaccagctataacatgcactgggtcaagcagaccccaggcagaggactggaatggatcggagccatctatcccggcaacggcgacacctcctacaaccagaagttcaagggcaaagccacactgaccgccgacaagagcagcagcacagcctacatgcagctgagcagcctgaccagcgaagatagcgccgtgtactactgcgcccggtctacctattatggcggcgactggtacttcaacgtgtggggagctggcaccaccgtgacagtttctctcgaggacctgaagaacgtgttcccacctgaggtggccgtgttcgagcctagcaaggccgagatcgcccacacccagaaagccaccctcgtgtgcctggctaccggcttctaccccgaccatgtggaactgtcttggtgggtcaacggcaaagaggtgcacagcggcgtgtctaccgacccccagccactgaaagaacagcccgccctgaacgacagccggtactgcctgagcagcagactgagagtgtccgccaccttctggcagaacccccggaaccacttcagatgccaggtgcagttctacggcctgagcgagaacgacgagtggacccaggacagagccaagcccgtgacccagatcgtgtctgccgaagcctggggcagagccgattgcggcatcaccagcgccagctaccaccagggcgtgctgagcgccaccatcctgtacgagatcctgctgggcaaggccaccctgtacgccgtgctggtgtctgccctggtgctgatggctatggtcaagcggaaggacagccggggaagggccaagcgatctggatctggagcaacaaacttctcactactcaaacaagcaggtgacgtggaggagaatcccgggcctactagaggccatatgaccgagtacaagcccacggtgcgcctcgccacccgcgacgacgtccccagggccgtacgcaccctcgccgccgcgttcgccgactaccccgccacgcgccacaccgtcgatccggaccgccacatcgagcgggtcaccgagctgcaagaactcttcctcacgcgcgtcgggctcgacatcggcaaggtgtgggtcgcggacgacggcgccgcggtggcggtctggaccacgccggagagcgtcgaagcgggggcggtgttcgccgagatcggcccgcgcatggccgagttgagcggttcccggctggccgcgcagcaacagatggaaggcctcctggcgccgcaccggcccaaggagcccgcgtggttcctggccaccgtcggcgtctcgcccgaccaccagggcaagggtctgggcagcgccgtcgtgctccccggagtggaggcggccgagcgcgccggggtgcccgccttcctggagacctccgcgccccgcaacctccccttctacgagcggctcggcttcaccgtcaccgccgacgtcgaggtgcccgaaggaccgcgcacctggtgcatgacccgcaagcccggtgcctga

SEQ ID NO: 8634 - DNA, 2088 bp, Artificial Sequence
  Synthetic Polynucloetide
atggccttaccagtgaccgccttgctcctgccgctggccttgctgctccacgccgccaggccgcagatcgtgctgtctcagtctcctgccatcctgagtgcctctccaggcgagaaagtgaccatgacctgtagagccagcagcagcgtgtcctacatccactggttccagcagaagcctggcagcagccctaagccttggatctacgccaccagcaatctggcctctggcgtgccagtcagattttctggcagcggctctggcaccagctacagcctgacaatcagcagagtggaagccgaggatgccgccacctactactgtcagcagtggacctccaatcctcctacctttggcggaggcaccaagctggaaatcaaaggcggaggcggaagtggaggcggaggatctggcggcggaggctctcaggttcagctgcaacagcctggcgctgagcttgtgaaacctggcgcttccgtgaagatgagctgcaaggccagcggctacaccttcaccagctataacatgcactgggtcaagcagaccccaggcagaggactggaatggatcggagccatctatcccggcaacggcgacacctcctacaaccagaagttcaagggcaaagccacactgaccgccgacaagagcagcagcacagcctacatgcagctgagcagcctgaccagcgaagatagcgccgtgtactactgcgcccggtctacctattatggcggcgactggtacttcaacgtgtggggagctggcaccaccgtgacagtttctacgcgtgggtctggaggcggaggcagcggcggaggcgggagcggcgacggtaacgaggagatgggaggaatcactcaaaccccttacaaagtctcaatttcaggaacaactgttatccttacatgtccccagtatcctggcagcgagatcctttggcagcataacgacaagaatatagggggagatgaagacgataagaatatcggatctgacgaggatcacttgagcctgaaagagttctccgagcttgaacaaagcggatattatgtgtgctatccgcgcgggtcaaagccggaagacgctaacttttacctttatctccgagccagagtgtgcgaaaattgcatggaaatggacgttatgtccgttgctacaatagttatcgtagatatatgcatcacgggtggactgcttctgctggtttattattggtccaagaatagaaaggccaaagctaaacccgtgaccagaggcgctggcgcaggcggaaggcaaaggggacaaaacaaagaacggccaccaccagtgccaaatccagattatgagcctattcggaaaggacagagggacctgtactctggcctgaatcagagaagaatccgcgccaagagaagcggatctggcgtgaagcagaccctgaatttcgacctgctgaagctggctggcgacgtggaatccaacccaggcccttctagaggccatatgaccgagtacaagcccacggtgcgcctcgccacccgcgacgacgtccccagggccgtacgcaccctcgccgccgcgttcgccgactaccccgccacgcgccacaccgtcgatccggaccgccacatcgagcgggtcaccgagctgcaagaactcttcctcacgcgcgtcgggctcgacatcggcaaggtgtgggtcgcggacgacggcgccgcggtggcggtctggaccacgccggagagcgtcgaagcgggggcggtgttcgccgagatcggcccgcgcatggccgagttgagcggttcccggctggccgcgcagcaacagatggaaggcctcctggcgccgcaccggcccaaggagcccgcgtggttcctggccaccgtcggcgtctcgcccgaccaccagggcaagggtctgggcagcgccgtcgtgctccccggagtggaggcggccgagcgcgccggggtgcccgccttcctggagacctccgcgccccgcaacctccccttctacgagcggctcggcttcaccgtcaccgccgacgtcgaggtgcccgaaggaccgcgcacctggtgcatgacccgcaagcccggtgcctga

SEQ ID NO: 8635 - DNA, 1983 bp, Artificial Sequence
  Synthetic Polynucloetide
atggccttaccagtgaccgccttgctcctgccgctggccttgctgctccacgccgccaggccgcagatcgtgctgtctcagtctcctgccatcctgagtgcctctccaggcgagaaagtgaccatgacctgtagagccagcagcagcgtgtcctacatccactggttccagcagaagcctggcagcagccctaagccttggatctacgccaccagcaatctggcctctggcgtgccagtcagattttctggcagcggctctggcaccagctacagcctgacaatcagcagagtggaagccgaggatgccgccacctactactgtcagcagtggacctccaatcctcctacctttggcggaggcaccaagctggaaatcaaaggcggaggcggaagtggaggcggaggatctggcggcggaggctctcaggttcagctgcaacagcctggcgctgagcttgtgaaacctggcgcttccgtgaagatgagctgcaaggccagcggctacaccttcaccagctataacatgcactgggtcaagcagaccccaggcagaggactggaatggatcggagccatctatcccggcaacggcgacacctcctacaaccagaagttcaagggcaaagccacactgaccgccgacaagagcagcagcacagcctacatgcagctgagcagcctgaccagcgaagatagcgccgtgtactactgcgcccggtctacctattatggcggcgactggtacttcaacgtgtggggagctggcaccaccgtgacagtttctacgcgtgggtctggaggcggaggcagcggcggaggcgggagcggcttcaagatccccatcgaggaactggaagatcgggtgttcgtgaactgcaacacctctatcacctgggtggaaggcaccgtgggaacactgctgagcgacatcaccagactggacctcggcaagcggattctggaccctcggggcatctacagatgcaacggcaccgacatctacaaggacaaagaaagcaccgtgcaggtccactacagaatgtgccagtcctgcgtggaactggaccctgctacagtggccggcatcatcgtgaccgatgtgatcgctactctgctgctggctctgggagtgttctgcttcgccggacacgaaacaggcagactgtctggcgctgccgatacacaggccctgctgagaaacgaccaagtgtatcagcccctgcgcgacagagatgatgcccagtattctcacctcggcggcaactgggctagaaacaagcgcgccaagagaagcggatctggcgtgaagcagaccctgaatttcgacctgctgaagctggctggcgacgtggaatccaacccaggcccttctagaggccatatgaccgagtacaagcccacggtgcgcctcgccacccgcgacgacgtccccagggccgtacgcaccctcgccgccgcgttcgccgactaccccgccacgcgccacaccgtcgatccggaccgccacatcgagcgggtcaccgagctgcaagaactcttcctcacgcgcgtcgggctcgacatcggcaaggtgtgggtcgcggacgacggcgccgcggtggcggtctggaccacgccggagagcgtcgaagcgggggcggtgttcgccgagatcggcccgcgcatggccgagttgagcggttcccggctggccgcgcagcaacagatggaaggcctcctggcgccgcaccggcccaaggagcccgcgtggttcctggccaccgtcggcgtctcgcccgaccaccagggcaagggtctgggcagcgccgtcgtgctccccggagtggaggcggccgagcgcgccggggtgcccgccttcctggagacctccgcgccccgcaacctccccttctacgagcggctcggcttcaccgtcaccgccgacgtcgaggtgcccgaaggaccgcgcacctggtgcatgacccgcaagcccggtgcctga

SEQ ID NO: 8636 - DNA, 2013 bp, Artificial Sequence
  Synthetic Polynucloetide
atggccttaccagtgaccgccttgctcctgccgctggccttgctgctccacgccgccaggccgcagatcgtgctgtctcagtctcctgccatcctgagtgcctctccaggcgagaaagtgaccatgacctgtagagccagcagcagcgtgtcctacatccactggttccagcagaagcctggcagcagccctaagccttggatctacgccaccagcaatctggcctctggcgtgccagtcagattttctggcagcggctctggcaccagctacagcctgacaatcagcagagtggaagccgaggatgccgccacctactactgtcagcagtggacctccaatcctcctacctttggcggaggcaccaagctggaaatcaaaggcggaggcggaagtggaggcggaggatctggcggcggaggctctcaggttcagctgcaacagcctggcgctgagcttgtgaaacctggcgcttccgtgaagatgagctgcaaggccagcggctacaccttcaccagctataacatgcactgggtcaagcagaccccaggcagaggactggaatggatcggagccatctatcccggcaacggcgacacctcctacaaccagaagttcaagggcaaagccacactgaccgccgacaagagcagcagcacagcctacatgcagctgagcagcctgaccagcgaagatagcgccgtgtactactgcgcccggtctacctattatggcggcgactggtacttcaacgtgtggggagctggcaccaccgtgacagtttctacgcgtgggtctggaggcggaggcagcggcggaggcgggagcggccagagcatcaagggcaaccacctggtcaaggtgtacgactaccaagaggacggcagcgtgctgctgacatgtgatgccgaggccaagaacatcacctggtttaaggacggcaagatgatcggcttcctgaccgaggacaagaagaagtggaacctgggcagcaacgctaaggaccccagaggcatgtatcagtgcaagggcagccagaacaagagcaagcccctccaggtgtactaccggatgtgccagaactgcatcgagctgaacgccgctaccatcagcggctttctgttcgccgagatcgtgtccatcttcgtgctggccgtgggcgtgtactttatcgctggacaggatggcgtgcggcagagcagagcttccgataagcaaaccctgctgcctaacgaccagctgtaccagcctctgaaggacagagaggacgaccagtacagccacctccagggcaatcagctgagaagaaaccgcgccaagagaagcggatctggcgtgaagcagaccctgaatttcgacctgctgaagctggctggcgacgtggaatccaacccaggcccttctagaggccatatgaccgagtacaagcccacggtgcgcctcgccacccgcgacgacgtccccagggccgtacgcaccctcgccgccgcgttcgccgactaccccgccacgcgccacaccgtcgatccggaccgccacatcgagcgggtcaccgagctgcaagaactcttcctcacgcgcgtcgggctcgacatcggcaaggtgtgggtcgcggacgacggcgccgcggtggcggtctggaccacgccggagagcgtcgaagcgggggcggtgttcgccgagatcggcccgcgcatggccgagttgagcggttcccggctggccgcgcagcaacagatggaaggcctcctggcgccgcaccggcccaaggagcccgcgtggttcctggccaccgtcggcgtctcgcccgaccaccagggcaagggtctgggcagcgccgtcgtgctccccggagtggaggcggccgagcgcgccggggtgcccgccttcctggagacctccgcgccccgcaacctccccttctacgagcggctcggcttcaccgtcaccgccgacgtcgaggtgcccgaaggaccgcgcacctggtgcatgacccgcaagcccggtgcctga

SEQ ID NO: 8637 - DNA, 1962 bp, Artificial Sequence
  Synthetic Polynucloetide
atggccttaccagtgaccgccttgctcctgccgctggccttgctgctccacgccgccaggccgcagatcgtgctgtctcagtctcctgccatcctgagtgcctctccaggcgagaaagtgaccatgacctgtagagccagcagcagcgtgtcctacatccactggttccagcagaagcctggcagcagccctaagccttggatctacgccaccagcaatctggcctctggcgtgccagtcagattttctggcagcggctctggcaccagctacagcctgacaatcagcagagtggaagccgaggatgccgccacctactactgtcagcagtggacctccaatcctcctacctttggcggaggcaccaagctggaaatcaaaggcggaggcggaagtggaggcggaggatctggcggcggaggctctcaggttcagctgcaacagcctggcgctgagcttgtgaaacctggcgcttccgtgaagatgagctgcaaggccagcggctacaccttcaccagctataacatgcactgggtcaagcagaccccaggcagaggactggaatggatcggagccatctatcccggcaacggcgacacctcctacaaccagaagttcaagggcaaagccacactgaccgccgacaagagcagcagcacagcctacatgcagctgagcagcctgaccagcgaagatagcgccgtgtactactgcgcccggtctacctattatggcggcgactggtacttcaacgtgtggggagctggcaccaccgtgacagtttctacgcgtgggtctggaggcggaggcagcggcggaggcgggagcggccagagttttgggttgttggaccctaaattgtgctatctgttggacggaatcctgttcatttacggagtgatcctgaccgcattgttcctgcgggttaagttttccagatccgcagacgcacccgcttaccaacaagggcagaaccaactctacaatgaacttaatttggggcggagggaagagtacgacgttctggacaaaaggaggggacgagatcccgagatgggcggaaagcctcagcgaaggaagaatccgcaagaggggctttataacgaactccagaaagataaaatggcagaagcctatagtgagattgggatgaagggagaaaggaggaggggtaaaggtcacgatgggttgtaccaaggattgagcacagccactaaagatacctatgatgcgctccacatgcaggccctgccgccaagacgcgccaagagaagcggatctggcgtgaagcagaccctgaatttcgacctgctgaagctggctggcgacgtggaatccaacccaggcccttctagaggccatatgaccgagtacaagcccacggtgcgcctcgccacccgcgacgacgtccccagggccgtacgcaccctcgccgccgcgttcgccgactaccccgccacgcgccacaccgtcgatccggaccgccacatcgagcgggtcaccgagctgcaagaactcttcctcacgcgcgtcgggctcgacatcggcaaggtgtgggtcgcggacgacggcgccgcggtggcggtctggaccacgccggagagcgtcgaagcgggggcggtgttcgccgagatcggcccgcgcatggccgagttgagcggttcccggctggccgcgcagcaacagatggaaggcctcctggcgccgcaccggcccaaggagcccgcgtggttcctggccaccgtcggcgtctcgcccgaccaccagggcaagggtctgggcagcgccgtcgtgctccccggagtggaggcggccgagcgcgccggggtgcccgccttcctggagacctccgcgccccgcaacctccccttctacgagcggctcggcttcaccgtcaccgccgacgtcgaggtgcccgaaggaccgcgcacctggtgcatgacccgcaagcccggtgcctga

SEQ ID NO: 8638 - DNA, 2262 bp, Artificial Sequence
  Synthetic Polynucloetide
atggccttaccagtgaccgccttgctcctgccgctggccttgctgctccacgccgccaggccggaagtgcagctggttgaatctggcggaggactggttcagcctggcggatctctgagactgtcttgtgccgccagcggcttcagcttcagcgacttttggatgagctgggtccgacaggcccctggcaaaggacttgaatgggtcgccacaatcagccaggccggcagcgagaaggactacgtggactctgtgaagggcagattcaccatcagccgggacaacgccaagaagtccctgtacctccagatgaacagcctgagagccgaggacaccgccgtgtactattgtgcctctggcgtgtacagcttcgactacagaggccagggcaccctggtcacagtctcttctggtaccggcggaggcggatctggcggcggaggtagcggtggcggaggatctgaattccagatcgtgctgtctcagtctcctgccatcctgagtgcctctccaggcgagaaagtgaccatgacctgtagagccagcagcagcgtgtcctacatccactggttccagcagaagcctggcagcagccctaagccttggatctacgccaccagcaatctggcctctggcgtgccagtcagattttctggcagcggctctggcaccagctacagcctgacaatcagcagagtggaagccgaggatgccgccacctactactgtcagcagtggacctccaatcctcctacctttggcggaggcaccaagctggaaatcaaactcgaggacctgaagaacgtgttcccacctgaggtggccgtgttcgagcctagcgaggccgagatcagccacacccagaaagccaccctcgtgtgcctggctaccggcttctaccccgaccatgtggaactgtcttggtgggtcaacggcaaagaggtgcacagcggcgtgtgtaccgacccccagccactgaaagaacagcccgccctgaacgacagccggtactgcctgagcagcagactgagagtgtccgccaccttctggcagaacccccggaaccacttcagatgccaggtgcagttctacggcctgagcgagaacgacgagtggacccaggacagagccaagcccgtgacccagatcgtgtctgccgaagcctggggcagagccgattgcggctttaccagcgagagctaccagcagggcgtgctgagcgccaccatcctgtacgagatcctgctgggcaaggccaccctgtacgccgtgctggtgtctgccctggtgctgatggctatggtcaagcggaaggacagccggggaagggccaagcgatctggatctggagcaacaaacttctcactactcaaacaagcaggtgacgtggaggagaatcccgggcctactagtatggactggatttggcgcatccttttccttgtcggcgctgctaccggcgcgcattccttcgaacaggttcagctgcaacagcctggcgctgagcttgtgaaacctggcgcttccgtgaagatgagctgcaaggccagcggctacaccttcaccagctataacatgcactgggtcaagcagaccccaggcagaggactggaatggatcggagccatctatcccggcaacggcgacacctcctacaaccagaagttcaagggcaaagccacactgaccgccgacaagagcagcagcacagcctacatgcagctgagcagcctgaccagcgaagatagcgccgtgtactactgcgcccggtctacctattatggcggcgactggtacttcaacgtgtggggagctggcaccaccgtgacagtttctacgcgtatccagaaccctgatcctgccgtgtaccagctgcgggatagcaagagcagcgacaagagcgtgtgtctgttcaccgacttcgacagccagaccaacgtgtcccagagcaaggactccgacgtgtacatcaccgataagtgcgtgctggacatgcggagcatggacttcaagagcaactccgccgtggcctggtccaacaagtccgatttcgcctgcgccaacgccttcaacaacagcattatccccgaggacacattcttcccaagccccgagagcagctgcgacgtgaagctggtggaaaagagcttcgagacagacaccaacctgaacttccagaacctgagcgtgatcggcttcagaatcctgctgctgaaagtggccggctttaacctgctgatgaccctgcggctgtggtccagc

SEQ ID NO: 8639 - DNA, 2274 bp, Artificial Sequence
  Synthetic Polynucloetide
atggccttaccagtgaccgccttgctcctgccgctggccttgctgctccacgccgccaggccggaagtgcagctggttgaatctggcggaggactggttcagcctggcggatctctgagactgtcttgtgccgccagcggcttcagcttcagcgacttttggatgagctgggtccgacaggcccctggcaaaggacttgaatgggtcgccacaatcagccaggccggcagcgagaaggactacgtggactctgtgaagggcagattcaccatcagccgggacaacgccaagaagtccctgtacctccagatgaacagcctgagagccgaggacaccgccgtgtactattgtgcctctggcgtgtacagcttcgactacagaggccagggcaccctggtcacagtctcttctggtaccggcggaggcggatctggcggcggaggtagcggtggcggaggatctgaattccagatcgtgctgtctcagtctcctgccatcctgagtgcctctccaggcgagaaagtgaccatgacctgtagagccagcagcagcgtgtcctacatccactggttccagcagaagcctggcagcagccctaagccttggatctacgccaccagcaatctggcctctggcgtgccagtcagattttctggcagcggctctggcaccagctacagcctgacaatcagcagagtggaagccgaggatgccgccacctactactgtcagcagtggacctccaatcctcctacctttggcggaggcaccaagctggaaatcaaactcgagatccagaaccctgatcctgccgtgtaccagctgcgggatagcaagagcagcgacaagagcgtgtgtctgttcaccgacttcgacagccagaccaacgtgtcccagagcaaggactccgacgtgtacatcaccgataagtgcgtgctggacatgcggagcatggacttcaagagcaactccgccgtggcctggtccaacaagtccgatttcgcctgcgccaacgccttcaacaacagcattatccccgaggacacattcttcccaagccccgagagcagctgcgacgtgaagctggtggaaaagagcttcgagacagacaccaacctgaacttccagaacctgagcgtgatcggcttcagaatcctgctgctgaaagtggccggctttaacctgctgatgaccctgcggctgtggtccagccgcgccaagagaagcggatctggcgtgaagcagaccctgaatttcgacctgctgaagctggctggcgacgtggaatccaacccaggccctactagtatggactggatttggcgcatccttttccttgtcggcgctgctaccggcgcgcattccttcgaacaggttcagctgcaacagcctggcgctgagcttgtgaaacctggcgcttccgtgaagatgagctgcaaggccagcggctacaccttcaccagctataacatgcactgggtcaagcagaccccaggcagaggactggaatggatcggagccatctatcccggcaacggcgacacctcctacaaccagaagttcaagggcaaagccacactgaccgccgacaagagcagcagcacagcctacatgcagctgagcagcctgaccagcgaagatagcgccgtgtactactgcgcccggtctacctattatggcggcgactggtacttcaacgtgtggggagctggcaccaccgtgacagtttctacgcgtgaggacctgaagaacgtgttcccacctgaggtggccgtgttcgagcctagcgaggccgagatcagccacacccagaaagccaccctcgtgtgcctggctaccggcttctaccccgaccatgtggaactgtcttggtgggtcaacggcaaagaggtgcacagcggcgtgtgtaccgacccccagccactgaaagaacagcccgccctgaacgacagccggtactgcctgagcagcagactgagagtgtccgccaccttctggcagaacccccggaaccacttcagatgccaggtgcagttctacggcctgagcgagaacgacgagtggacccaggacagagccaagcccgtgacccagatcgtgtctgccgaagcctggggcagagccgattgcggctttaccagcgagagctaccagcagggcgtgctgagcgccaccatcctgtacgagatcctgctgggcaaggccaccctgtacgccgtgctggtgtctgccctggtgctgatggctatggtcaagcggaaggacagccgggga

SEQ ID NO: 8640 - DNA, 2850 bp, Artificial Sequence
  Synthetic Polynucloetide
atggccttaccagtgaccgccttgctcctgccgctggccttgctgctccacgccgccaggccggaagtgcagctggttgaatctggcggaggactggttcagcctggcggatctctgagactgtcttgtgccgccagcggcttcagcttcagcgacttttggatgagctgggtccgacaggcccctggcaaaggacttgaatgggtcgccacaatcagccaggccggcagcgagaaggactacgtggactctgtgaagggcagattcaccatcagccgggacaacgccaagaagtccctgtacctccagatgaacagcctgagagccgaggacaccgccgtgtactattgtgcctctggcgtgtacagcttcgactacagaggccagggcaccctggtcacagtctcttctggtaccggcggaggcggatctggcggcggaggtagcggtggcggaggatctgaattccagatcgtgctgtctcagtctcctgccatcctgagtgcctctccaggcgagaaagtgaccatgacctgtagagccagcagcagcgtgtcctacatccactggttccagcagaagcctggcagcagccctaagccttggatctacgccaccagcaatctggcctctggcgtgccagtcagattttctggcagcggctctggcaccagctacagcctgacaatcagcagagtggaagccgaggatgccgccacctactactgtcagcagtggacctccaatcctcctacctttggcggaggcaccaagctggaaatcaaactcgaggacctgaagaacgtgttcccacctgaggtggccgtgttcgagcctagcgaggccgagatcagccacacccagaaagccaccctcgtgtgcctggctaccggcttctaccccgaccatgtggaactgtcttggtgggtcaacggcaaagaggtgcacagcggcgtgtctaccgacccccagccactgaaagaacagcccgccctgaacgacagccggtactgcctgagcagcagactgagagtgtccgccaccttctggcagaacccccggaaccacttcagatgccaggtgcagttctacggcctgagcgagaacgacgagtggacccaggacagagccaagcccgtgacccagatcgtgtctgccgaagcctggggcagagccgattgcggatcccagagcttcggcctgctggaccccaagctgtgctacctgctggatggcatcctgttcatctacggcgtgatcctgaccgccctgttcctgagagtgaagttcagcagaagcgccgacgcccctgcctaccagcagggacagaaccaactgtacaacgagctgaacctgggcagacgggaagagtacgacgtgctggacaagcggagaggcagggaccctgagatgggcggaaagccccagcggagaaagaacccccaggaaggactgtataacgaactccagaaagacaagatggccgaagcctacagcgagatcggcatgaagggcgagcggagaagaggcaagggccacgatggcctgtaccagggcctgagcaccgccaccaaggacacctatgacgccctgcacatgcaggccctgcctccaagaagggccaagcgatctggatctggagcaacaaacttctcactactcaaacaagcaggtgacgtggaggagaatcccgggcctactagtatggactggatttggcgcatccttttccttgtcggcgctgctaccggcgcgcattccttcgaacaggttcagctgcaacagcctggcgctgagcttgtgaaacctggcgcttccgtgaagatgagctgcaaggccagcggctacaccttcaccagctataacatgcactgggtcaagcagaccccaggcagaggactggaatggatcggagccatctatcccggcaacggcgacacctcctacaaccagaagttcaagggcaaagccacactgaccgccgacaagagcagcagcacagcctacatgcagctgagcagcctgaccagcgaagatagcgccgtgtactactgcgcccggtctacctattatggcggcgactggtacttcaacgtgtggggagctggcaccaccgtgacagtttctacgcgtatccagaaccctgatcctgccgtgtaccagctgcgggatagcaagagcagcgacaagagcgtgtgtctgttcaccgacttcgacagccagaccaacgtgtcccagagcaaggactccgacgtgtacatcaccgataagaccgtgctggacatgcggagcatggacttcaagagcaactccgccgtggcctggtccaacaagtccgatttcgcctgcgccaacgccttcaacaacagcattatccccgaggacacattcttcccaagccccgagagcagctgcggtacccagagttttgggttgttggaccctaaattgtgctatctgttggacggaatcctgttcatttacggagtgatcctgaccgcattgttcctgcgggttaagttttccagatccgcagacgcacccgcttaccaacaagggcagaaccaactctacaatgaacttaatttggggcggagggaagagtacgacgttctggacaaaaggaggggacgagatcccgagatgggcggaaagcctcagcgaaggaagaatccgcaagaggggctttataacgaactccagaaagataaaatggcagaagcctatagtgagattgggatgaagggagaaaggaggaggggtaaaggtcacgatgggttgtaccaaggattgagcacagccactaaagatacctatgatgcgctccacatgcaggccctgccgccaaga

SEQ ID NO: 8641 - DNA, 2340 bp, Artificial Sequence
  Synthetic Polynucloetide
atggccttaccagtgaccgccttgctcctgccgctggccttgctgctccacgccgccaggccggaagtgcagctggttgaatctggcggaggactggttcagcctggcggatctctgagactgtcttgtgccgccagcggcttcagcttcagcgacttttggatgagctgggtccgacaggcccctggcaaaggacttgaatgggtcgccacaatcagccaggccggcagcgagaaggactacgtggactctgtgaagggcagattcaccatcagccgggacaacgccaagaagtccctgtacctccagatgaacagcctgagagccgaggacaccgccgtgtactattgtgcctctggcgtgtacagcttcgactacagaggccagggcaccctggtcacagtctcttctggtaccggcggaggcggatctggcggcggaggtagcggtggcggaggatctgaattccagatcgtgctgtctcagtctcctgccatcctgagtgcctctccaggcgagaaagtgaccatgacctgtagagccagcagcagcgtgtcctacatccactggttccagcagaagcctggcagcagccctaagccttggatctacgccaccagcaatctggcctctggcgtgccagtcagattttctggcagcggctctggcaccagctacagcctgacaatcagcagagtggaagccgaggatgccgccacctactactgtcagcagtggacctccaatcctcctacctttggcggaggcaccaagctggaaatcaaactcgagggacagcctaaggccaatcctaccgtgacactgttccctccaagcagcgaagaactccaggccaacaaggccacacttgtgtgcctgatctccgacttctaccctggggctgtgacagtggcttggaaggccgatggatctcctgtgaaagccggcgtggaaaccaccaagccatccaagcagagcaacaacaaatacgccgccagctcctacctgagcctgacacctgagcagtggaagtcccacagatcctacagctgccaagtgacccacgaaggcagcaccgtggaaaagacagtggcccctacagagtgcagccccatcaagaccgatgtgattacaatggaccccaaggacaactgctccaaggacgccaacgataccctgctgctccagctgaccaacaccagcgcctactacatgtacttgttgctgctgctgaagtccgtggtgtacttcgccatcatcacatgctgcctgctgcggagaaccgccttctgctgcaacggcgagaagtctagggccaagcgatctggatctggagcaacaaacttctcactactcaaacaagcaggtgacgtggaggagaatcccgggcctactagtatggactggatttggcgcatccttttccttgtcggcgctgctaccggcgcgcattccttcgaacaggttcagctgcaacagcctggcgctgagcttgtgaaacctggcgcttccgtgaagatgagctgcaaggccagcggctacaccttcaccagctataacatgcactgggtcaagcagaccccaggcagaggactggaatggatcggagccatctatcccggcaacggcgacacctcctacaaccagaagttcaagggcaaagccacactgaccgccgacaagagcagcagcacagcctacatgcagctgagcagcctgaccagcgaagatagcgccgtgtactactgcgcccggtctacctattatggcggcgactggtacttcaacgtgtggggagctggcaccaccgtgacagtttctacgcgtgcctctacaaagggaccctccgtgtttcctctggctcccagcagcaagtctacaagcggaggaacagccgctctgggctgcctggtcaaggattactttcccgagcctgtgaccgtgtcctggaatagcggagcactgacaagcggcgtgcacacctttccagccgtgctgcaaagcagcggcctgtactctctgagcagcgtggtcacagtgcctagctctagcctgggcacccagacctacatctgcaatgtgaaccacaagcctagcaacaccaaggtggacaagagagtggaacccaagagctgtgaagtgaaaaccgactccaccgaccacgtgaagcccaaagagacagagaacaccaagcagcccagcaagagctgccacaagcccaaggccatcgtgcacaccgagaaagtgaacatgatgagcctgaccgtgctgggcctgcggatgctgttcgccaaaaccgtggccgtgaacttcctgctgaccgccaagctgttcttcctc

SEQ ID NO: 8642 - DNA, 2283 bp, Artificial Sequence
  Synthetic Polynucloetide
atggccttaccagtgaccgccttgctcctgccgctggccttgctgctccacgccgccaggccggaagtgcagctggttgaatctggcggaggactggttcagcctggcggatctctgagactgtcttgtgccgccagcggcttcagcttcagcgacttttggatgagctgggtccgacaggcccctggcaaaggacttgaatgggtcgccacaatcagccaggccggcagcgagaaggactacgtggactctgtgaagggcagattcaccatcagccgggacaacgccaagaagtccctgtacctccagatgaacagcctgagagccgaggacaccgccgtgtactattgtgcctctggcgtgtacagcttcgactacagaggccagggcaccctggtcacagtctcttctggtaccggcggaggcggatctggcggcggaggtagcggtggcggaggatctgaattccagatcgtgctgtctcagtctcctgccatcctgagtgcctctccaggcgagaaagtgaccatgacctgtagagccagcagcagcgtgtcctacatccactggttccagcagaagcctggcagcagccctaagccttggatctacgccaccagcaatctggcctctggcgtgccagtcagattttctggcagcggctctggcaccagctacagcctgacaatcagcagagtggaagccgaggatgccgccacctactactgtcagcagtggacctccaatcctcctacctttggcggaggcaccaagctggaaatcaaactcgagggacagcctaaggccaatcctaccgtgacactgttccctccaagcagcgaagaactccaggccaacaaggccacacttgtgtgcctgatctccgacttctaccctggggctgtgacagtggcttggaaggccgatggatctcctgtgaaagccggcgtggaaaccaccaagccatccaagcagagcaacaacaaatacgccgccagctcctacctgagcctgacacctgagcagtggaagtcccacagatcctacagctgccaagtgacccacgaaggcagcaccgtggaaaagacagtggcccctacagagtgcagcggcagagccgattgcggctttaccagcgagagctaccagcagggcgtgctgagcgccaccatcctgtacgagatcctgctgggcaaggccaccctgtacgccgtgctggtgtctgccctggtgctgatggctatggtcaagcggaaggacagccggggacgcgccaagagaagcggatctggcgtgaagcagaccctgaatttcgacctgctgaagctggctggcgacgtggaatccaacccaggccctactagtatggactggatttggcgcatccttttccttgtcggcgctgctaccggcgcgcattccttcgaacaggttcagctgcaacagcctggcgctgagcttgtgaaacctggcgcttccgtgaagatgagctgcaaggccagcggctacaccttcaccagctataacatgcactgggtcaagcagaccccaggcagaggactggaatggatcggagccatctatcccggcaacggcgacacctcctacaaccagaagttcaagggcaaagccacactgaccgccgacaagagcagcagcacagcctacatgcagctgagcagcctgaccagcgaagatagcgccgtgtactactgcgcccggtctacctattatggcggcgactggtacttcaacgtgtggggagctggcaccaccgtgacagtttctacgcgtgcctctacaaagggaccctccgtgtttcctctggctcccagcagcaagtctacaagcggaggaacagccgctctgggctgcctggtcaaggattactttcccgagcctgtgaccgtgtcctggaatagcggagcactgacaagcggcgtgcacacctttccagccgtgctgcaaagcagcggcctgtactctctgagcagcgtggtcacagtgcctagctctagcctgggcacccagacctacatctgcaatgtgaaccacaagcctagcaacaccaaggtggacaagagagtggaacccaagagctgtatccccgaggacacattcttcccaagccccgagagcagctgcgacgtgaagctggtggaaaagagcttcgagacagacaccaacctgaacttccagaacctgagcgtgatcggcttcagaatcctgctgctgaaagtggccggctttaacctgctgatgaccctgcggctgtggtccagc

SEQ ID NO: 8643 - DNA, 2685 bp, Artificial Sequence
  Synthetic Polynucloetide
atggccttaccagtgaccgccttgctcctgccgctggccttgctgctccacgccgccaggccggaagtgcagctggttgaatctggcggaggactggttcagcctggcggatctctgagactgtcttgtgccgccagcggcttcagcttcagcgacttttggatgagctgggtccgacaggcccctggcaaaggacttgaatgggtcgccacaatcagccaggccggcagcgagaaggactacgtggactctgtgaagggcagattcaccatcagccgggacaacgccaagaagtccctgtacctccagatgaacagcctgagagccgaggacaccgccgtgtactattgtgcctctggcgtgtacagcttcgactacagaggccagggcaccctggtcacagtctcttctggtaccggcggaggcggatctggcggcggaggtagcggtggcggaggatctgaattccagatcgtgctgtctcagtctcctgccatcctgagtgcctctccaggcgagaaagtgaccatgacctgtagagccagcagcagcgtgtcctacatccactggttccagcagaagcctggcagcagccctaagccttggatctacgccaccagcaatctggcctctggcgtgccagtcagattttctggcagcggctctggcaccagctacagcctgacaatcagcagagtggaagccgaggatgccgccacctactactgtcagcagtggacctccaatcctcctacctttggcggaggcaccaagctggaaatcaaactcgagatccagaaccctgatcctgccgtgtaccagctgcgggatagcaagagcagcgacaagagcgtgtgtctgttcaccgacttcgacagccagaccaacgtgtcccagagcaaggactccgacgtgtacatcaccgataagtgcgtgctggacatgcggagcatggacttcaagagcaactccgccgtggcctggtccaacaagtccgatttcgcctgcgccaacgccttcaacaacagcattatccccgaggacacattcttcccaagccccgagagcagctgcgacgtgaagctggtggaaaagagcttcgagacagacaccaacctgaacttccagaacctgagcgtgatcggcttcagaatcctgctgctgaaagtggccggctttaacctgctgatgaccctgcggctgtggtccagccgcgccaagagaagcggatctggcgtgaagcagaccctgaatttcgacctgctgaagctggctggcgacgtggaatccaacccaggccctactagtatggactggatttggcgcatccttttccttgtcggcgctgctaccggcgcgcattccgggccccagctccagctgcaagagtctggacctggcctggtcaagcctagcgagacactgagcctgacctgtaccgtgtccggcgatagcatcagcagcggcgattactactggggctggatcagacagcctcctggcaaaggactggaatggatcggccacatctactacagcggcgtgacctactacaaccccagcctgaagtccagagtgaccatcagcgtggacaccagccggaaccagttctccctgaagctgtctagcgtgacagccgccgataccgccgtgtactactgcaccagagaggacagcagcaactggcggagtagaggccagggaacactggtcacagttagctctggatccggcggaggcggaagtggaggcggaggatctggcggcggaggctctttcgaacaggttcagctgcaacagcctggcgctgagcttgtgaaacctggcgcttccgtgaagatgagctgcaaggccagcggctacaccttcaccagctataacatgcactgggtcaagcagaccccaggcagaggactggaatggatcggagccatctatcccggcaacggcgacacctcctacaaccagaagttcaagggcaaagccacactgaccgccgacaagagcagcagcacagcctacatgcagctgagcagcctgaccagcgaagatagcgccgtgtactactgcgcccggtctacctattatggcggcgactggtacttcaacgtgtggggagctggcaccaccgtgacagtttctacgcgtgaggacctgaagaacgtgttcccacctgaggtggccgtgttcgagcctagcgaggccgagatcagccacacccagaaagccaccctcgtgtgcctggctaccggcttctaccccgaccatgtggaactgtcttggtgggtcaacggcaaagaggtgcacagcggcgtgtgtaccgacccccagccactgaaagaacagcccgccctgaacgacagccggtactgcctgagcagcagactgagagtgtccgccaccttctggcagaacccccggaaccacttcagatgccaggtgcagttctacggcctgagcgagaacgacgagtggacccaggacagagccaagcccgtgacccagatcgtgtctgccgaagcctggggcagagccgattgcggctttaccagcgagagctaccagcagggcgtgctgagcgccaccatcctgtacgagatcctgctgggcaaggccaccctgtacgccgtgctggtgtctgccctggtgctgatggctatggtcaagcggaaggacagccgggga

SEQ ID NO: 8644 - DNA, 3261 bp, Artificial Sequence
  Synthetic Polynucloetide
atggccttaccagtgaccgccttgctcctgccgctggccttgctgctccacgccgccaggccggaagtgcagctggttgaatctggcggaggactggttcagcctggcggatctctgagactgtcttgtgccgccagcggcttcagcttcagcgacttttggatgagctgggtccgacaggcccctggcaaaggacttgaatgggtcgccacaatcagccaggccggcagcgagaaggactacgtggactctgtgaagggcagattcaccatcagccgggacaacgccaagaagtccctgtacctccagatgaacagcctgagagccgaggacaccgccgtgtactattgtgcctctggcgtgtacagcttcgactacagaggccagggcaccctggtcacagtctcttctggtaccggcggaggcggatctggcggcggaggtagcggtggcggaggatctgaattccagatcgtgctgtctcagtctcctgccatcctgagtgcctctccaggcgagaaagtgaccatgacctgtagagccagcagcagcgtgtcctacatccactggttccagcagaagcctggcagcagccctaagccttggatctacgccaccagcaatctggcctctggcgtgccagtcagattttctggcagcggctctggcaccagctacagcctgacaatcagcagagtggaagccgaggatgccgccacctactactgtcagcagtggacctccaatcctcctacctttggcggaggcaccaagctggaaatcaaactcgaggacctgaagaacgtgttcccacctgaggtggccgtgttcgagcctagcgaggccgagatcagccacacccagaaagccaccctcgtgtgcctggctaccggcttctaccccgaccatgtggaactgtcttggtgggtcaacggcaaagaggtgcacagcggcgtgtctaccgacccccagccactgaaagaacagcccgccctgaacgacagccggtactgcctgagcagcagactgagagtgtccgccaccttctggcagaacccccggaaccacttcagatgccaggtgcagttctacggcctgagcgagaacgacgagtggacccaggacagagccaagcccgtgacccagatcgtgtctgccgaagcctggggcagagccgattgcggatcccagagcttcggcctgctggaccccaagctgtgctacctgctggatggcatcctgttcatctacggcgtgatcctgaccgccctgttcctgagagtgaagttcagcagaagcgccgacgcccctgcctaccagcagggacagaaccaactgtacaacgagctgaacctgggcagacgggaagagtacgacgtgctggacaagcggagaggcagggaccctgagatgggcggaaagccccagcggagaaagaacccccaggaaggactgtataacgaactccagaaagacaagatggccgaagcctacagcgagatcggcatgaagggcgagcggagaagaggcaagggccacgatggcctgtaccagggcctgagcaccgccaccaaggacacctatgacgccctgcacatgcaggccctgcctccaagaagggccaagcgatctggatctggagcaacaaacttctcactactcaaacaagcaggtgacgtggaggagaatcccgggcctactagtatggactggatttggcgcatccttttccttgtcggcgctgctaccggcgcgcattccgggccccagctccagctgcaagagtctggacctggcctggtcaagcctagcgagacactgagcctgacctgtaccgtgtccggcgatagcatcagcagcggcgattactactggggctggatcagacagcctcctggcaaaggactggaatggatcggccacatctactacagcggcgtgacctactacaaccccagcctgaagtccagagtgaccatcagcgtggacaccagccggaaccagttctccctgaagctgtctagcgtgacagccgccgataccgccgtgtactactgcaccagagaggacagcagcaactggcggagtagaggccagggaacactggtcacagttagctctggatccggcggaggcggaagtggaggcggaggatctggcggcggaggctctttcgaacaggttcagctgcaacagcctggcgctgagcttgtgaaacctggcgcttccgtgaagatgagctgcaaggccagcggctacaccttcaccagctataacatgcactgggtcaagcagaccccaggcagaggactggaatggatcggagccatctatcccggcaacggcgacacctcctacaaccagaagttcaagggcaaagccacactgaccgccgacaagagcagcagcacagcctacatgcagctgagcagcctgaccagcgaagatagcgccgtgtactactgcgcccggtctacctattatggcggcgactggtacttcaacgtgtggggagctggcaccaccgtgacagtttctacgcgtatccagaaccctgatcctgccgtgtaccagctgcgggatagcaagagcagcgacaagagcgtgtgtctgttcaccgacttcgacagccagaccaacgtgtcccagagcaaggactccgacgtgtacatcaccgataagaccgtgctggacatgcggagcatggacttcaagagcaactccgccgtggcctggtccaacaagtccgatttcgcctgcgccaacgccttcaacaacagcattatccccgaggacacattcttcccaagccccgagagcagctgcggtacccagagttttgggttgttggaccctaaattgtgctatctgttggacggaatcctgttcatttacggagtgatcctgaccgcattgttcctgcgggttaagttttccagatccgcagacgcacccgcttaccaacaagggcagaaccaactctacaatgaacttaatttggggcggagggaagagtacgacgttctggacaaaaggaggggacgagatcccgagatgggcggaaagcctcagcgaaggaagaatccgcaagaggggctttataacgaactccagaaagataaaatggcagaagcctatagtgagattgggatgaagggagaaaggaggaggggtaaaggtcacgatgggttgtaccaaggattgagcacagccactaaagatacctatgatgcgctccacatgcaggccctgccgccaaga

SEQ ID NO: 8645 - DNA, 2751 bp, Artificial Sequence
  Synthetic Polynucloetide
atggccttaccagtgaccgccttgctcctgccgctggccttgctgctccacgccgccaggccggaagtgcagctggttgaatctggcggaggactggttcagcctggcggatctctgagactgtcttgtgccgccagcggcttcagcttcagcgacttttggatgagctgggtccgacaggcccctggcaaaggacttgaatgggtcgccacaatcagccaggccggcagcgagaaggactacgtggactctgtgaagggcagattcaccatcagccgggacaacgccaagaagtccctgtacctccagatgaacagcctgagagccgaggacaccgccgtgtactattgtgcctctggcgtgtacagcttcgactacagaggccagggcaccctggtcacagtctcttctggtaccggcggaggcggatctggcggcggaggtagcggtggcggaggatctgaattccagatcgtgctgtctcagtctcctgccatcctgagtgcctctccaggcgagaaagtgaccatgacctgtagagccagcagcagcgtgtcctacatccactggttccagcagaagcctggcagcagccctaagccttggatctacgccaccagcaatctggcctctggcgtgccagtcagattttctggcagcggctctggcaccagctacagcctgacaatcagcagagtggaagccgaggatgccgccacctactactgtcagcagtggacctccaatcctcctacctttggcggaggcaccaagctggaaatcaaactcgagggacagcctaaggccaatcctaccgtgacactgttccctccaagcagcgaagaactccaggccaacaaggccacacttgtgtgcctgatctccgacttctaccctggggctgtgacagtggcttggaaggccgatggatctcctgtgaaagccggcgtggaaaccaccaagccatccaagcagagcaacaacaaatacgccgccagctcctacctgagcctgacacctgagcagtggaagtcccacagatcctacagctgccaagtgacccacgaaggcagcaccgtggaaaagacagtggcccctacagagtgcagccccatcaagaccgatgtgattacaatggaccccaaggacaactgctccaaggacgccaacgataccctgctgctccagctgaccaacaccagcgcctactacatgtacttgttgctgctgctgaagtccgtggtgtacttcgccatcatcacatgctgcctgctgcggagaaccgccttctgctgcaacggcgagaagtctagggccaagcgatctggatctggagcaacaaacttctcactactcaaacaagcaggtgacgtggaggagaatcccgggcctactagtatggactggatttggcgcatccttttccttgtcggcgctgctaccggcgcgcattccgggccccagctccagctgcaagagtctggacctggcctggtcaagcctagcgagacactgagcctgacctgtaccgtgtccggcgatagcatcagcagcggcgattactactggggctggatcagacagcctcctggcaaaggactggaatggatcggccacatctactacagcggcgtgacctactacaaccccagcctgaagtccagagtgaccatcagcgtggacaccagccggaaccagttctccctgaagctgtctagcgtgacagccgccgataccgccgtgtactactgcaccagagaggacagcagcaactggcggagtagaggccagggaacactggtcacagttagctctggatccggcggaggcggaagtggaggcggaggatctggcggcggaggctctttcgaacaggttcagctgcaacagcctggcgctgagcttgtgaaacctggcgcttccgtgaagatgagctgcaaggccagcggctacaccttcaccagctataacatgcactgggtcaagcagaccccaggcagaggactggaatggatcggagccatctatcccggcaacggcgacacctcctacaaccagaagttcaagggcaaagccacactgaccgccgacaagagcagcagcacagcctacatgcagctgagcagcctgaccagcgaagatagcgccgtgtactactgcgcccggtctacctattatggcggcgactggtacttcaacgtgtggggagctggcaccaccgtgacagtttctacgcgtgcctctacaaagggaccctccgtgtttcctctggctcccagcagcaagtctacaagcggaggaacagccgctctgggctgcctggtcaaggattactttcccgagcctgtgaccgtgtcctggaatagcggagcactgacaagcggcgtgcacacctttccagccgtgctgcaaagcagcggcctgtactctctgagcagcgtggtcacagtgcctagctctagcctgggcacccagacctacatctgcaatgtgaaccacaagcctagcaacaccaaggtggacaagagagtggaacccaagagctgtgaagtgaaaaccgactccaccgaccacgtgaagcccaaagagacagagaacaccaagcagcccagcaagagctgccacaagcccaaggccatcgtgcacaccgagaaagtgaacatgatgagcctgaccgtgctgggcctgcggatgctgttcgccaaaaccgtggccgtgaacttcctgctgaccgccaagctgttcttcctc

SEQ ID NO: 8646 - DNA, 2694 bp, Artificial Sequence
  Synthetic Polynucloetide
atggccttaccagtgaccgccttgctcctgccgctggccttgctgctccacgccgccaggccggaagtgcagctggttgaatctggcggaggactggttcagcctggcggatctctgagactgtcttgtgccgccagcggcttcagcttcagcgacttttggatgagctgggtccgacaggcccctggcaaaggacttgaatgggtcgccacaatcagccaggccggcagcgagaaggactacgtggactctgtgaagggcagattcaccatcagccgggacaacgccaagaagtccctgtacctccagatgaacagcctgagagccgaggacaccgccgtgtactattgtgcctctggcgtgtacagcttcgactacagaggccagggcaccctggtcacagtctcttctggtaccggcggaggcggatctggcggcggaggtagcggtggcggaggatctgaattccagatcgtgctgtctcagtctcctgccatcctgagtgcctctccaggcgagaaagtgaccatgacctgtagagccagcagcagcgtgtcctacatccactggttccagcagaagcctggcagcagccctaagccttggatctacgccaccagcaatctggcctctggcgtgccagtcagattttctggcagcggctctggcaccagctacagcctgacaatcagcagagtggaagccgaggatgccgccacctactactgtcagcagtggacctccaatcctcctacctttggcggaggcaccaagctggaaatcaaactcgagggacagcctaaggccaatcctaccgtgacactgttccctccaagcagcgaagaactccaggccaacaaggccacacttgtgtgcctgatctccgacttctaccctggggctgtgacagtggcttggaaggccgatggatctcctgtgaaagccggcgtggaaaccaccaagccatccaagcagagcaacaacaaatacgccgccagctcctacctgagcctgacacctgagcagtggaagtcccacagatcctacagctgccaagtgacccacgaaggcagcaccgtggaaaagacagtggcccctacagagtgcagcggcagagccgattgcggctttaccagcgagagctaccagcagggcgtgctgagcgccaccatcctgtacgagatcctgctgggcaaggccaccctgtacgccgtgctggtgtctgccctggtgctgatggctatggtcaagcggaaggacagccggggacgcgccaagagaagcggatctggcgtgaagcagaccctgaatttcgacctgctgaagctggctggcgacgtggaatccaacccaggccctactagtatggactggatttggcgcatccttttccttgtcggcgctgctaccggcgcgcattccgggccccagctccagctgcaagagtctggacctggcctggtcaagcctagcgagacactgagcctgacctgtaccgtgtccggcgatagcatcagcagcggcgattactactggggctggatcagacagcctcctggcaaaggactggaatggatcggccacatctactacagcggcgtgacctactacaaccccagcctgaagtccagagtgaccatcagcgtggacaccagccggaaccagttctccctgaagctgtctagcgtgacagccgccgataccgccgtgtactactgcaccagagaggacagcagcaactggcggagtagaggccagggaacactggtcacagttagctctggatccggcggaggcggaagtggaggcggaggatctggcggcggaggctctttcgaacaggttcagctgcaacagcctggcgctgagcttgtgaaacctggcgcttccgtgaagatgagctgcaaggccagcggctacaccttcaccagctataacatgcactgggtcaagcagaccccaggcagaggactggaatggatcggagccatctatcccggcaacggcgacacctcctacaaccagaagttcaagggcaaagccacactgaccgccgacaagagcagcagcacagcctacatgcagctgagcagcctgaccagcgaagatagcgccgtgtactactgcgcccggtctacctattatggcggcgactggtacttcaacgtgtggggagctggcaccaccgtgacagtttctacgcgtgcctctacaaagggaccctccgtgtttcctctggctcccagcagcaagtctacaagcggaggaacagccgctctgggctgcctggtcaaggattactttcccgagcctgtgaccgtgtcctggaatagcggagcactgacaagcggcgtgcacacctttccagccgtgctgcaaagcagcggcctgtactctctgagcagcgtggtcacagtgcctagctctagcctgggcacccagacctacatctgcaatgtgaaccacaagcctagcaacaccaaggtggacaagagagtggaacccaagagctgtatccccgaggacacattcttcccaagccccgagagcagctgcgacgtgaagctggtggaaaagagcttcgagacagacaccaacctgaacttccagaacctgagcgtgatcggcttcagaatcctgctgctgaaagtggccggctttaacctgctgatgaccctgcggctgtggtccagc

SEQ ID NO: 8647 - DNA, 2265 bp, Artificial Sequence
  Synthetic Polynucloetide
atggccttaccagtgaccgccttgctcctgccgctggccttgctgctccacgccgccaggccggaagtgcaggttttggagtctggcggaggactggttcagcctggcggatctctgagactgtcttgtgccgccagcggcttcaccttcagcaactttgccatgagctgggtccgacaggcccctggcaaaggacttgaatgggtgtccacaatcagcggcagcgccggcacaacagattacgccgattctgtgaagggcagattcaccatcagccgggacaacagcaagaaaaccctgtacctccagatgaacagcctgcgcgtggaagataccgccgtgtactactgtgccgatggcagaggccccttcttcgattatcgcggccagggcacactggtcaccgtttcttctggtaccggcggaggcggatctggcggcggaggtagcggtggcggaggatctgaattccagatcgtgctgtctcagtctcctgccatcctgagtgcctctccaggcgagaaagtgaccatgacctgtagagccagcagcagcgtgtcctacatccactggttccagcagaagcctggcagcagccctaagccttggatctacgccaccagcaatctggcctctggcgtgccagtcagattttctggcagcggctctggcaccagctacagcctgacaatcagcagagtggaagccgaggatgccgccacctactactgtcagcagtggacctccaatcctcctacctttggcggaggcaccaagctggaaatcaaactcgaggacctgaagaacgtgttcccacctgaggtggccgtgttcgagcctagcgaggccgagatcagccacacccagaaagccaccctcgtgtgcctggctaccggcttctaccccgaccatgtggaactgtcttggtgggtcaacggcaaagaggtgcacagcggcgtgtgtaccgacccccagccactgaaagaacagcccgccctgaacgacagccggtactgcctgagcagcagactgagagtgtccgccaccttctggcagaacccccggaaccacttcagatgccaggtgcagttctacggcctgagcgagaacgacgagtggacccaggacagagccaagcccgtgacccagatcgtgtctgccgaagcctggggcagagccgattgcggctttaccagcgagagctaccagcagggcgtgctgagcgccaccatcctgtacgagatcctgctgggcaaggccaccctgtacgccgtgctggtgtctgccctggtgctgatggctatggtcaagcggaaggacagccggggaagggccaagcgatctggatctggagcaacaaacttctcactactcaaacaagcaggtgacgtggaggagaatcccgggcctactagtatggactggatttggcgcatccttttccttgtcggcgctgctaccggcgcgcattccttcgaacaggttcagctgcaacagcctggcgctgagcttgtgaaacctggcgcttccgtgaagatgagctgcaaggccagcggctacaccttcaccagctataacatgcactgggtcaagcagaccccaggcagaggactggaatggatcggagccatctatcccggcaacggcgacacctcctacaaccagaagttcaagggcaaagccacactgaccgccgacaagagcagcagcacagcctacatgcagctgagcagcctgaccagcgaagatagcgccgtgtactactgcgcccggtctacctattatggcggcgactggtacttcaacgtgtggggagctggcaccaccgtgacagtttctacgcgtatccagaaccctgatcctgccgtgtaccagctgcgggatagcaagagcagcgacaagagcgtgtgtctgttcaccgacttcgacagccagaccaacgtgtcccagagcaaggactccgacgtgtacatcaccgataagtgcgtgctggacatgcggagcatggacttcaagagcaactccgccgtggcctggtccaacaagtccgatttcgcctgcgccaacgccttcaacaacagcattatccccgaggacacattcttcccaagccccgagagcagctgcgacgtgaagctggtggaaaagagcttcgagacagacaccaacctgaacttccagaacctgagcgtgatcggcttcagaatcctgctgctgaaagtggccggctttaacctgctgatgaccctgcggctgtggtccagc

SEQ ID NO: 8648 - DNA, 2268 bp, Artificial Sequence
  Synthetic Polynucloetide
atggccttaccagtgaccgccttgctcctgccgctggccttgctgctccacgccgccaggccgcagatcgtgctgtctcagtctcctgccatcctgagtgcctctccaggcgagaaagtgaccatgacctgtagagccagcagcagcgtgtcctacatccactggttccagcagaagcctggcagcagccctaagccttggatctacgccaccagcaatctggcctctggcgtgccagtcagattttctggcagcggctctggcaccagctacagcctgacaatcagcagagtggaagccgaggatgccgccacctactactgtcagcagtggacctccaatcctcctacctttggcggaggcaccaagctggaaatcaaactcgaggacctgaagaacgtgttcccacctgaggtggccgtgttcgagcctagcgaggccgagatcagccacacccagaaagccaccctcgtgtgcctggctaccggcttctaccccgaccatgtggaactgtcttggtgggtcaacggcaaagaggtgcacagcggcgtgtgtaccgacccccagccactgaaagaacagcccgccctgaacgacagccggtactgcctgagcagcagactgagagtgtccgccaccttctggcagaacccccggaaccacttcagatgccaggtgcagttctacggcctgagcgagaacgacgagtggacccaggacagagccaagcccgtgacccagatcgtgtctgccgaagcctggggcagagccgattgcggctttaccagcgagagctaccagcagggcgtgctgagcgccaccatcctgtacgagatcctgctgggcaaggccaccctgtacgccgtgctggtgtctgccctggtgctgatggctatggtcaagcggaaggacagccggggaagggccaagcgatctggatctggagcaacaaacttctcactactcaaacaagcaggtgacgtggaggagaatcccgggcctactagtatggactggatttggcgcatccttttccttgtcggcgctgctaccggcgcccattccgggcccgaagtgcagctggttgaatctggcggaggactggttcaggctggcggatctctgagactgtcttgtgccgccagcggcagaacctttagcatgggctggtttagacaggcccctggcaaagagagagagttcgtcgccgccatcacatactctggcggcagcccttactacgccgactctgtgaagggcagattcaccatcagccgggacaacgccaagaacaccgtgtacctccagatgaacagcctgaagcctgaggacaccgccgtgtactactgcgccgccaatccaacatacggcagcgactggaacgccgagaattggggccagggaacccaagtgacagtgtctagcggatccggcggcggaggatctggcggaggcggatctgggggcggaggctctttcgaacaggttcagctgcaacagcctggcgctgagcttgtgaaacctggcgcttccgtgaagatgagctgcaaggccagcggctacaccttcaccagctataacatgcactgggtcaagcagaccccaggcagaggactggaatggatcggagccatctatcccggcaacggcgacacctcctacaaccagaagttcaagggcaaagccacactgaccgccgacaagagcagcagcacagcctacatgcagctgagcagcctgaccagcgaagatagcgccgtgtactactgcgcccggtctacctattatggcggcgactggtacttcaacgtgtggggagctggcaccaccgtgacagtttctacgcgtatccagaaccctgatcctgccgtgtaccagctgcgggatagcaagagcagcgacaagagcgtgtgtctgttcaccgacttcgacagccagaccaacgtgtcccagagcaaggactccgacgtgtacatcaccgataagtgcgtgctggacatgcggagcatggacttcaagagcaactccgccgtggcctggtccaacaagtccgatttcgcctgcgccaacgccttcaacaacagcattatccccgaggacacattcttcccaagccccgagagcagctgcgacgtgaagctggtggaaaagagcttcgagacagacaccaacctgaacttccagaacctgagcgtgatcggcttcagaatcctgctgctgaaagtggccggctttaacctgctgatgaccctgcggctgtggtccagc

SEQ ID NO: 8649 - DNA, 2649 bp, Artificial Sequence
  Synthetic Polynucloetide
atggccttaccagtgaccgccttgctcctgccgctggccttgctgctccacgccgccaggccgcagatcgtgctgtctcagtctcctgccatcctgagtgcctctccaggcgagaaagtgaccatgacctgtagagccagcagcagcgtgtcctacatccactggttccagcagaagcctggcagcagccctaagccttggatctacgccaccagcaatctggcctctggcgtgccagtcagattttctggcagcggctctggcaccagctacagcctgacaatcagcagagtggaagccgaggatgccgccacctactactgtcagcagtggacctccaatcctcctacctttggcggaggcaccaagctggaaatcaaactcgaggacctgaagaacgtgttcccacctgaggtggccgtgttcgagcctagcgaggccgagatcagccacacccagaaagccaccctcgtgtgcctggctaccggcttctaccccgaccatgtggaactgtcttggtgggtcaacggcaaagaggtgcacagcggcgtgtgtaccgacccccagccactgaaagaacagcccgccctgaacgacagccggtactgcctgagcagcagactgagagtgtccgccaccttctggcagaacccccggaaccacttcagatgccaggtgcagttctacggcctgagcgagaacgacgagtggacccaggacagagccaagcccgtgacccagatcgtgtctgccgaagcctggggcagagccgattgcggctttaccagcgagagctaccagcagggcgtgctgagcgccaccatcctgtacgagatcctgctgggcaaggccaccctgtacgccgtgctggtgtctgccctggtgctgatggctatggtcaagcggaaggacagccggggaagggccaagcgatctggatctggagcaacaaacttctcactactcaaacaagcaggtgacgtggaggagaatcccgggcctactagtatggactggatttggcgcatccttttccttgtcggcgctgctaccggcgcccattcccaactgcaactgcaagagtctggccctggcctggtcaagccttctgaaaccctgagcctgacctgtaccgtgtccggcggctctatcagcagcggcgattactactggggctggatcagacagcctccaggcaagggactcgaatggatcggcagcatcagctacagcggctccacctactacaacccaagcctgaagtccagagtgaccatcagcgtggacaccagcagaaaccagttctccctgaagctgagcagcgtgacagccgccgatacagccgtgtattattgcaccagagaggacagcagcaactggcggagtagaggacagggcacactggtcacagtgtcctcttctggaggcggtggaagcggtggaggaggatctgaagtgcagctggttgaatctggcggaggactggttcaggctggcggatctctgagactgtcttgtgccgccagcggcagaacctttagcatgggctggtttagacaggcccctggcaaagagagagagttcgtcgccgccatcacatactctggcggcagcccttactacgccgactctgtgaagggcagattcaccatcagccgggacaacgccaagaacaccgtgtacctccagatgaacagcctgaagcctgaggacaccgccgtgtactactgcgccgccaatccaacatacggcagcgactggaacgccgagaattggggccagggaacccaagtgacagtgtctagcggatccggcggcggaggatctggcggaggcggatctgggggcggaggctctttcgaacaggttcagctgcaacagcctggcgctgagcttgtgaaacctggcgcttccgtgaagatgagctgcaaggccagcggctacaccttcaccagctataacatgcactgggtcaagcagaccccaggcagaggactggaatggatcggagccatctatcccggcaacggcgacacctcctacaaccagaagttcaagggcaaagccacactgaccgccgacaagagcagcagcacagcctacatgcagctgagcagcctgaccagcgaagatagcgccgtgtactactgcgcccggtctacctattatggcggcgactggtacttcaacgtgtggggagctggcaccaccgtgacagtttctacgcgtatccagaaccctgatcctgccgtgtaccagctgcgggatagcaagagcagcgacaagagcgtgtgtctgttcaccgacttcgacagccagaccaacgtgtcccagagcaaggactccgacgtgtacatcaccgataagtgcgtgctggacatgcggagcatggacttcaagagcaactccgccgtggcctggtccaacaagtccgatttcgcctgcgccaacgccttcaacaacagcattatccccgaggacacattcttcccaagccccgagagcagctgcgacgtgaagctggtggaaaagagcttcgagacagacaccaacctgaacttccagaacctgagcgtgatcggcttcagaatcctgctgctgaaagtggccggctttaacctgctgatgaccctgcggctgtggtccagc

SEQ ID NO: 8650 - DNA, 2676 bp, Artificial Sequence
  Synthetic Polynucloetide
atggccttaccagtgaccgccttgctcctgccgctggccttgctgctccacgccgccaggccggaagtgcaggttttggagtctggcggaggactggttcagcctggcggatctctgagactgtcttgtgccgccagcggcttcaccttcagcaactttgccatgagctgggtccgacaggcccctggcaaaggacttgaatgggtgtccacaatcagcggcagcgccggcacaacagattacgccgattctgtgaagggcagattcaccatcagccgggacaacagcaagaaaaccctgtacctccagatgaacagcctgcgcgtggaagataccgccgtgtactactgtgccgatggcagaggccccttcttcgattatcgcggccagggcacactggtcaccgtttcttctggtaccggcggaggcggatctggcggcggaggtagcggtggcggaggatctgaattccagatcgtgctgtctcagtctcctgccatcctgagtgcctctccaggcgagaaagtgaccatgacctgtagagccagcagcagcgtgtcctacatccactggttccagcagaagcctggcagcagccctaagccttggatctacgccaccagcaatctggcctctggcgtgccagtcagattttctggcagcggctctggcaccagctacagcctgacaatcagcagagtggaagccgaggatgccgccacctactactgtcagcagtggacctccaatcctcctacctttggcggaggcaccaagctggaaatcaaactcgaggacctgaagaacgtgttcccacctgaggtggccgtgttcgagcctagcgaggccgagatcagccacacccagaaagccaccctcgtgtgcctggctaccggcttctaccccgaccatgtggaactgtcttggtgggtcaacggcaaagaggtgcacagcggcgtgtgtaccgacccccagccactgaaagaacagcccgccctgaacgacagccggtactgcctgagcagcagactgagagtgtccgccaccttctggcagaacccccggaaccacttcagatgccaggtgcagttctacggcctgagcgagaacgacgagtggacccaggacagagccaagcccgtgacccagatcgtgtctgccgaagcctggggcagagccgattgcggctttaccagcgagagctaccagcagggcgtgctgagcgccaccatcctgtacgagatcctgctgggcaaggccaccctgtacgccgtgctggtgtctgccctggtgctgatggctatggtcaagcggaaggacagccggggaagggccaagcgatctggatctggagcaacaaacttctcactactcaaacaagcaggtgacgtggaggagaatcccgggcctactagtatggactggatttggcgcatccttttccttgtcggcgctgctaccggcgcccattccgggcccgaagtgcagctggttgaatctggcggaggactggttcaggctggcggatctctgagactgtcttgtgccgccagcggcagaacctttagcatgggctggtttagacaggcccctggcaaagagagagagttcgtcgccgccatcacatacagcggcggcagcccttactacgcctcttctgtcagaggccggttcaccatcagccgggacaacgccaagaacaccgtgtacctccagatgaacagcctgaagccagaggacaccgccgtgtactactgtgccgccaatccaacctacggcagcgactggaatgccgagaattggggccagggcacccaagtgacagtgtctagtggatccggcggcggaggatctggcggaggcggatctgggggcggaggctctttcgaacaggttcagctgcaacagcctggcgctgagcttgtgaaacctggcgcttccgtgaagatgagctgcaaggccagcggctacaccttcaccagctataacatgcactgggtcaagcagaccccaggcagaggactggaatggatcggagccatctatcccggcaacggcgacacctcctacaaccagaagttcaagggcaaagccacactgaccgccgacaagagcagcagcacagcctacatgcagctgagcagcctgaccagcgaagatagcgccgtgtactactgcgcccggtctacctattatggcggcgactggtacttcaacgtgtggggagctggcaccaccgtgacagtttctacgcgtatccagaaccctgatcctgccgtgtaccagctgcgggatagcaagagcagcgacaagagcgtgtgtctgttcaccgacttcgacagccagaccaacgtgtcccagagcaaggactccgacgtgtacatcaccgataagtgcgtgctggacatgcggagcatggacttcaagagcaactccgccgtggcctggtccaacaagtccgatttcgcctgcgccaacgccttcaacaacagcattatccccgaggacacattcttcccaagccccgagagcagctgcgacgtgaagctggtggaaaagagcttcgagacagacaccaacctgaacttccagaacctgagcgtgatcggcttcagaatcctgctgctgaaagtggccggctttaacctgctgatgaccctgcggctgtggtccagc

SEQ ID NO: 8651 - DNA, 2172 bp, Artificial Sequence
  Synthetic Polynucloetide
atggccttaccagtgaccgccttgctcctgccgctggccttgctgctccacgccgccaggccggatattcagctgacccagagccacaagtttctgagcaccagcgtgggcgacagagtgtccatcacctgtaaagccagccaggacgtgtacaacgccgtggcctggtatcagcagaagcctggacagagccccaagctgctgatctacagcgccagcagcagatacacaggcgtgcccagcagattcaccggctctggatctggccccgacttcacctttaccatcagctctgtgcaggccgaggacctggccgtgtacttttgtcagcagcacttcagaacccctttcaccttcggcagcggcaccaagctggaaatcaagggcggaggcggaagtggaggcggaggatctggcggcggaggctctcaggttcagctccagcagtctggacccgagctgaagaaacctggcgagacagtgaagatcagctgcaaggccagcggctaccccttcaccaactacggcatgaactgggtcaagcaggcccctggacagggcctgaaatggatgggctggatcaataccagcaccggcgagagcaccttcgccgacgatttcaagggcagattcgacttcagcctggaaaccagcgccaacaccgcctacctccagatcaacaacctgaagtccgaggatatggctacctacttctgcgccagatgggaagtgtaccacggctacgtgccatattggggccagggcacaaccgtgacagtctcttctacgcgtgagcagaaactgatctcggaagaggatctggcgaagcccaccacgacgccagcgccgcgaccaccaacaccggcgcccaccatcgcgtcgcagcccctgtccctgcgcccagaggcgtgccggccagcggcggggggcgcagtgcacacgagggggctggacttcgcctgtgacatctacatctgggcgcccttggccgggacttgtggggtccttctcctgtcactggttatcaccctttactgcaaacggggcagaaagaaactcctgtatatattcaaacaaccatttatgagaccagtacaaactactcaagaggaagatggctgtagctgccgatttccagaagaagaagaaggaggatgtgaactgagagtgaagttcagcaggagcgcagacgcccccgcgtaccagcagggccagaaccagctctataacgagctgaatctaggacgaagagaggagtacgatgttttggacaagagacgtggccgggaccctgagatggggggaaagccgagaaggaagaaccctcaggaaggcctgtacaatgaactgcagaaagataagatggcggaggcctacagtgagattgggatgaaaggcgagcgccggaggggcaaggggcacgatggcctttaccagggtctcagtacagccaccaaggacacctacgacgcccttcacatgcaggccctgccccctcgctctagtggctccggcgagggcagaggaagtctactaacctgcggagatgtggaagaaaatcctggcccacatatgaccgagtacaagcccacggtgcgcctcgccacccgcgacgacgtccccagggccgtacgcaccctcgccgccgcgttcgccgactaccccgccacgcgccacaccgtcgatccggaccgccacatcgagcgggtcaccgagctgcaagaactcttcctcacgcgcgtcgggctcgacatcggcaaggtgtgggtcgcggacgacggcgccgcggtggcggtctggaccacgccggagagcgtcgaagcgggggcggtgttcgccgagatcggcccgcgcatggccgagttgagcggttcccggctggccgcgcagcaacagatggaaggcctcctggcgccgcaccggcccaaggagcccgcgtggttcctggccaccgtcggcgtctcgcccgaccaccagggcaagggtctgggcagcgccgtcgtgctccccggagtggaggcggccgagcgcgccggggtgcccgccttcctggagacctccgcgccccgcaacctccccttctacgagcggctcggcttcaccgtcaccgccgacgtcgaggtgcccgaaggaccgcgcacctggtgcatgacccgcaagcccggtgcctga

SEQ ID NO: 8652 - DNA, 2154 bp, Artificial Sequence
  Synthetic Polynucloetide
atggccttaccagtgaccgccttgctcctgccgctggccttgctgctccacgccgccaggccggatattcagctgacccagagccacaagtttctgagcaccagcgtgggcgacagagtgtccatcacctgtaaagccagccaggacgtgtacaacgccgtggcctggtatcagcagaagcctggacagagccccaagctgctgatctacagcgccagcagcagatacacaggcgtgcccagcagattcaccggctctggatctggccccgacttcacctttaccatcagctctgtgcaggccgaggacctggccgtgtacttttgtcagcagcacttcagaacccctttcaccttcggcagcggcaccaagctggaaatcaagggcggaggcggaagtggaggcggaggatctggcggcggaggctctcaggttcagctccagcagtctggacccgagctgaagaaacctggcgagacagtgaagatcagctgcaaggccagcggctaccccttcaccaactacggcatgaactgggtcaagcaggcccctggacagggcctgaaatggatgggctggatcaataccagcaccggcgagagcaccttcgccgacgatttcaagggcagattcgacttcagcctggaaaccagcgccaacaccgcctacctccagatcaacaacctgaagtccgaggatatggctacctacttctgcgccagatgggaagtgtaccacggctacgtgccatattggggccagggcacaaccgtgacagtctcttctacgcgtgagcagaaactgatctcggaagaggatctgaaaattgaagttatgtatcctcctccttacctagacaatgagaagagcaatggaaccattatccatgtgaaagggaaacacctttgtccaagtcccctatttcccggaccttctaagcccttttgggtgctggtggtggttgggggagtcctggcttgctatagcttgctagtaacagtggcctttattattttctgggtgaggagtaagaggagcaggctcctgcacagtgactacatgaacatgactccacgccgccccggacccacccgcaagcattaccagccctatgccccaccacgcgacttcgcagcctatcgctccagagtgaagttcagcaggagcgcagacgcccccgcgtaccagcagggccagaaccagctctataacgagctcaatctaggacgaagagaggagtacgatgttttggacaagagacgtggccgggaccctgagatggggggaaagccgagaaggaagaaccctcaggaaggcctgtacaatgaactgcagaaagataagatggcggaggcctacagtgagattgggatgaaaggcgagcgccggaggggcaaggggcacgatggcctttaccagggtctcagtacagccaccaaggacacctacgacgcccttcacatgcaggccctgccccctcgctctagtggctccggcgagggcagaggaagtctactaacctgcggagatgtggaagaaaatcctggcccacatatgaccgagtacaagcccacggtgcgcctcgccacccgcgacgacgtccccagggccgtacgcaccctcgccgccgcgttcgccgactaccccgccacgcgccacaccgtcgatccggaccgccacatcgagcgggtcaccgagctgcaagaactcttcctcacgcgcgtcgggctcgacatcggcaaggtgtgggtcgcggacgacggcgccgcggtggcggtctggaccacgccggagagcgtcgaagcgggggcggtgttcgccgagatcggcccgcgcatggccgagttgagcggttcccggctggccgcgcagcaacagatggaaggcctcctggcgccgcaccggcccaaggagcccgcgtggttcctggccaccgtcggcgtctcgcccgaccaccagggcaagggtctgggcagcgccgtcgtgctccccggagtggaggcggccgagcgcgccggggtgcccgccttcctggagacctccgcgccccgcaacctccccttctacgagcggctcggcttcaccgtcaccgccgacgtcgaggtgcccgaaggaccgcgcacctggtgcatgacccgcaagcccggtgcctga

SEQ ID NO: 8653 - DNA, 1482 bp, Artificial Sequence
  Synthetic Polynucloetide
atggccttaccagtgaccgccttgctcctgccgctggccttgctgctccacgccgccaggccggatattcagctgacccagagccacaagtttctgagcaccagcgtgggcgacagagtgtccatcacctgtaaagccagccaggacgtgtacaacgccgtggcctggtatcagcagaagcctggacagagccccaagctgctgatctacagcgccagcagcagatacacaggcgtgcccagcagattcaccggctctggatctggccccgacttcacctttaccatcagctctgtgcaggccgaggacctggccgtgtacttttgtcagcagcacttcagaacccctttcaccttcggcagcggcaccaagctggaaatcaagggcggaggcggaagtggaggcggaggatctggcggcggaggctctcaggttcagctccagcagtctggacccgagctgaagaaacctggcgagacagtgaagatcagctgcaaggccagcggctaccccttcaccaactacggcatgaactgggtcaagcaggcccctggacagggcctgaaatggatgggctggatcaataccagcaccggcgagagcaccttcgccgacgatttcaagggcagattcgacttcagcctggaaaccagcgccaacaccgcctacctccagatcaacaacctgaagtccgaggatatggctacctacttctgcgccagatgggaagtgtaccacggctacgtgccatattggggccagggcacaaccgtgacagtctcttctacgcgtgagcagaaactgatctcggaagaggatctgaaaattgaagttatgtatcctcctccttacctagacaatgagaagagcaatggaaccattatccatgtgaaagggaaacacctttgtccaagtcccctatttcccggaccttctaagcccttttgggtgctggtggtggttgggggagtcctggcttgctatagcttgctagtaacagtggcctttattattttctgggtgaggagtaagaggagcaggctcctgcacagtgactacatgaacatgactccacgccgccccggacccacccgcaagcattaccagccctatgccccaccacgcgacttcgcagcctatcgctccagagtgaagttcagcaggagcgcagacgcccccgcgtaccagcagggccagaaccagctctataacgagctcaatctaggacgaagagaggagtacgatgttttggacaagagacgtggccgggaccctgagatggggggaaagccgagaaggaagaaccctcaggaaggcctgtacaatgaactgcagaaagataagatggcggaggcctacagtgagattgggatgaaaggcgagcgccggaggggcaaggggcacgatggcctttaccagggtctcagtacagccaccaaggacacctacgacgcccttcacatgcaggccctgccccctcgc

SEQ ID NO: 8654 - DNA, 1503 bp, Artificial Sequence
  Synthetic Polynucloetide
atggccttaccagtgaccgccttgctcctgccgctggccttgctgctccacgccgccaggccggatattcagctgacccagagccacaagtttctgagcaccagcgtgggcgacagagtgtccatcacctgtaaagccagccaggacgtgtacaacgccgtggcctggtatcagcagaagcctggacagagccccaagctgctgatctacagcgccagcagcagatacacaggcgtgcccagcagattcaccggctctggatctggccccgacttcacctttaccatcagctctgtgcaggccgaggacctggccgtgtacttttgtcagcagcacttcagaacccctttcaccttcggcagcggcaccaagctggaaatcaagggcggaggcggaagtggaggcggaggatctggcggcggaggctctcaggttcagctccagcagtctggacccgagctgaagaaacctggcgagacagtgaagatcagctgcaaggccagcggctaccccttcaccaactacggcatgaactgggtcaagcaggcccctggacagggcctgaaatggatgggctggatcaataccagcaccggcgagagcaccttcgccgacgatttcaagggcagattcgacttcagcctggaaaccagcgccaacaccgcctacctccagatcaacaacctgaagtccgaggatatggctacctacttctgcgccagatgggaagtgtaccacggctacgtgccatattggggccagggcacaaccgtgacagtctcttctacgcgtgagcagaaactgatctcggaagaggatctggcgaagcccaccacgacgccagcgccgcgaccaccaacaccggcgcccaccatcgcgtcgcagcccctgtccctgcgcccagaggcgtgccggccagcggcggggggcgcagtgcacacgagggggctggacttcgcctgtgacatctacatctgggcgcccttggccgggacttgtggggtccttctcctgtcactggttatcaccctttactgcaaacggggcagaaagaaactcctgtatatattcaaacaaccatttatgagaccagtacaaactactcaagaggaagatggctgtagctgccgatttccagaagaagaagaaggaggatgtgaactgagagtgaagttcagcaggagcgcagacgcccccgcgtaccagcagggccagaaccagctctataacgagctgaatctaggacgaagagaggagtacgatgttttggacaagagacgtggccgggaccctgagatggggggaaagccgagaaggaagaaccctcaggaaggcctgtacaatgaactgcagaaagataagatggcggaggcctacagtgagattgggatgaaaggcgagcgccggaggggcaaggggcacgatggcctttaccagggtctcagtacagccaccaaggacacctacgacgcccttcacatgcaggccctgccccctcgctga

SEQ ID NO: 8655 - DNA, 1503 bp, Artificial Sequence
  Synthetic Polynucloetide
atggccttaccagtgaccgccttgctcctgccgctggccttgctgctccacgccgccaggccgcaggttcagctccagcagtctggacccgagctgaagaaacctggcgagacagtgaagatcagctgcaaggccagcggctaccccttcaccaactacggcatgaactgggtcaagcaggcccctggacagggcctgaaatggatgggctggatcaataccagcaccggcgagagcaccttcgccgacgatttcaagggcagattcgacttcagcctggaaaccagcgccaacaccgcctacctccagatcaacaacctgaagtccgaggatatggctacctacttctgcgccagatgggaagtgtaccacggctacgtgccatattggggccagggcacaaccgtgacagtctcttctggcggaggcggaagtggaggcggaggatctggcggcggaggctctgatattcagctgacccagagccacaagtttctgagcaccagcgtgggcgacagagtgtccatcacctgtaaagccagccaggacgtgtacaacgccgtggcctggtatcagcagaagcctggacagagccccaagctgctgatctacagcgccagcagcagatacacaggcgtgcccagcagattcaccggctctggatctggccccgacttcacctttaccatcagctctgtgcaggccgaggacctggccgtgtacttttgtcagcagcacttcagaacccctttcaccttcggcagcggcaccaagctggaaatcaagacgcgtgagcagaaactgatctcggaagaggatctggcgaagcccaccacgacgccagcgccgcgaccaccaacaccggcgcccaccatcgcgtcgcagcccctgtccctgcgcccagaggcgtgccggccagcggcggggggcgcagtgcacacgagggggctggacttcgcctgtgacatctacatctgggcgcccttggccgggacttgtggggtccttctcctgtcactggttatcaccctttactgcaaacggggcagaaagaaactcctgtatatattcaaacaaccatttatgagaccagtacaaactactcaagaggaagatggctgtagctgccgatttccagaagaagaagaaggaggatgtgaactgagagtgaagttcagcaggagcgcagacgcccccgcgtaccagcagggccagaaccagctctataacgagctgaatctaggacgaagagaggagtacgatgttttggacaagagacgtggccgggaccctgagatggggggaaagccgagaaggaagaaccctcaggaaggcctgtacaatgaactgcagaaagataagatggcggaggcctacagtgagattgggatgaaaggcgagcgccggaggggcaaggggcacgatggcctttaccagggtctcagtacagccaccaaggacacctacgacgcccttcacatgcaggccctgccccctcgctga

SEQ ID NO: 8656 - DNA, 2742 bp, Artificial Sequence
  Synthetic Polynucloetide
atggccttaccagtgaccgccttgctcctgccgctggccttgctgctccacgccgccaggccggatattcagctgacccagagccacaagtttctgagcaccagcgtgggcgacagagtgtccatcacctgtaaagccagccaggacgtgtacaacgccgtggcctggtatcagcagaagcctggacagagccccaagctgctgatctacagcgccagcagcagatacacaggcgtgcccagcagattcaccggctctggatctggccccgacttcacctttaccatcagctctgtgcaggccgaggacctggccgtgtacttttgtcagcagcacttcagaacccctttcaccttcggcagcggcaccaagctggaaatcaagggcggaggcggaagtggaggcggaggatctggcggcggaggctctcaggttcagctccagcagtctggacccgagctgaagaaacctggcgagacagtgaagatcagctgcaaggccagcggctaccccttcaccaactacggcatgaactgggtcaagcaggcccctggacagggcctgaaatggatgggctggatcaataccagcaccggcgagagcaccttcgccgacgatttcaagggcagattcgacttcagcctggaaaccagcgccaacaccgcctacctccagatcaacaacctgaagtccgaggatatggctacctacttctgcgccagatgggaagtgtaccacggctacgtgccatattggggccagggcacaaccgtgacagtctcttctacgcgtgagcagaaactgatctcggaagaggatctggcgaagcccaccacgacgccagcgccgcgaccaccaacaccggcgcccaccatcgcgtcgcagcccctgtccctgcgcccagaggcgtgccggccagcggcggggggcgcagtgcacacgagggggctggacttcgcctgtgacatctacatctgggcgcccttggccgggacttgtggggtccttctcctgtcactggttatcaccctttactgcgggcgcgccagagtgaagttcagcaggagcgcagacgcccccgcgtaccagcagggccagaaccagctctataacgagctgaatctaggacgaagagaggagtacgatgttttggacaagagacgtggccgggaccctgagatggggggaaagccgagaaggaagaaccctcaggaaggcctgtacaatgaactgcagaaagataagatggcggaggcctacagtgagattgggatgaaaggcgagcgccggaggggcaaggggcacgatggcctttaccagggtctcagtacagccaccaaggacacctacgacgcccttcacatgcaggccctgccccctcgctctagaggatctggagcaacaaacttctcactactcaaacaagcaggtgacgtggaggagaatcccgggcctgggatccacatggccacttacgaggttctctgtgaggtggcgcggaaactgggcacggatgacagggaagtggtattgttcctcctaaacgtgttcatacctcaacccacactggcccaattaattggagctcttagagctttaaaggaggagggcaggttaacgtttcccctgttagcggaatgtctgtttcgtgcaggtcgcagagacctcttgcgcgacctgcttcacttagacccgcgttttttagagcgccacctagcgggcacaatgagttatttcagcccttatcagctcactgttctccacgtagacggggagctgtgtgcgagggatattaggtctttgatatttttaagcaaggacactatagggtctcgcagcacaccacagacattcttacactgggtgtactgtatggaaaacttagacctactgggtcccactgacgtggatgccctaatgtcaatgcttagatctttgtcaagagtagacctacagcgccaagtgcaaaccctaatgggccttcacctttccggcccatcacactcccaacactatcgccatacaccactcgagaccgatttctacgactacaaggacgacgatgacaagactagtggctccggcgagggcagaggaagtctactaacctgcggagatgtggaagaaaatcctggcccacatatgaccgagtacaagcccacggtgcgcctcgccacccgcgacgacgtccccagggccgtacgcaccctcgccgccgcgttcgccgactaccccgccacgcgccacaccgtcgatccggaccgccacatcgagcgggtcaccgagctgcaagaactcttcctcacgcgcgtcgggctcgacatcggcaaggtgtgggtcgcggacgacggcgccgcggtggcggtctggaccacgccggagagcgtcgaagcgggggcggtgttcgccgagatcggcccgcgcatggccgagttgagcggttcccggctggccgcgcagcaacagatggaaggcctcctggcgccgcaccggcccaaggagcccgcgtggttcctggccaccgtcggcgtctcgcccgaccaccagggcaagggtctgggcagcgccgtcgtgctccccggagtggaggcggccgagcgcgccggggtgcccgccttcctggagacctccgcgccccgcaacctccccttctacgagcggctcggcttcaccgtcaccgccgacgtcgaggtgcccgaaggaccgcgcacctggtgcatgacccgcaagcccggtgcctga

SEQ ID NO: 8657 - DNA, 2562 bp, Artificial Sequence
  Synthetic Polynucloetide
atggccttaccagtgaccgccttgctcctgccgctggccttgctgctccacgccgccaggccggatattcagctgacccagagccacaagtttctgagcaccagcgtgggcgacagagtgtccatcacctgtaaagccagccaggacgtgtacaacgccgtggcctggtatcagcagaagcctggacagagccccaagctgctgatctacagcgccagcagcagatacacaggcgtgcccagcagattcaccggctctggatctggccccgacttcacctttaccatcagctctgtgcaggccgaggacctggccgtgtacttttgtcagcagcacttcagaacccctttcaccttcggcagcggcaccaagctggaaatcaagctcgagatccagaaccctgatcctgccgtgtaccagctgcgggatagcaagagcagcgacaagagcgtgtgtctgttcaccgacttcgacagccagaccaacgtgtcccagagcaaggactccgacgtgtacatcaccgataagtgcgtgctggacatgcggagcatggacttcaagagcaactccgccgtggcctggtccaacaagtccgatttcgcctgcgccaacgccttcaacaacagcattatccccgaggacacattcttcccaagcagcgacgtgccctgcgacgtgaagctggtggaaaagagcttcgagacagacaccaacctgaacttccagaacctgagcgtgatcggcttcagaatcctgctgctgaaagtggccggctttaacctgctgatgaccctgcggctgtggtccagccgcgccaagagaagcggatctggcgtgaagcagaccctgaatttcgacctgctgaagctggctggcgacgtggaatccaacccaggccctactagtatggactggatttggcgcatccttttccttgtcggcgctgctaccggcgcgcattccttcgaacaggttcagctccagcagtctggacccgagctgaagaaacctggcgagacagtgaagatcagctgcaaggccagcggctaccccttcaccaactacggcatgaactgggtcaagcaggcccctggacagggcctgaaatggatgggctggatcaataccagcaccggcgagagcaccttcgccgacgatttcaagggcagattcgacttcagcctggaaaccagcgccaacaccgcctacctccagatcaacaacctgaagtccgaggatatggctacctacttctgcgccagatgggaagtgtaccacggctacgtgccatattggggccagggcacaaccgtgacagtctcttctacgcgtgaggacctgaagaacgtgttcccacctgaggtggccgtgttcgagcctagcaaggccgagatcgcccacacccagaaagccaccctcgtgtgcctggctaccggcttctaccccgaccatgtggaactgtcttggtgggtcaacggcaaagaggtgcacagcggcgtgtgtaccgacccccagccactgaaagaacagcccgccctgaacgacagccggtactgcctgagcagcagactgagagtgtccgccaccttctggcagaacccccggaaccacttcagatgccaggtgcagttctacggcctgagcgagaacgacgagtggacccaggacagagccaagcccgtgacccagatcgtgtctgccgaagcctggggcagagccgattgcggcatcaccagcgccagctaccaccagggcgtgctgagcgccaccatcctgtacgagatcctgctgggcaaggccaccctgtacgccgtgctggtgtctgccctggtgctgatggctatggtcaagcggaaggacagccggggaagggccaagcgatctggatctggagcaacaaacttctcactactcaaacaagcaggtgacgtggaggagaatcccgggccttctagaggccatatgaccgagtacaagcccacggtgcgcctcgccacccgcgacgacgtccccagggccgtacgcaccctcgccgccgcgttcgccgactaccccgccacgcgccacaccgtcgatccggaccgccacatcgagcgggtcaccgagctgcaagaactcttcctcacgcgcgtcgggctcgacatcggcaaggtgtgggtcgcggacgacggcgccgcggtggcggtctggaccacgccggagagcgtcgaagcgggggcggtgttcgccgagatcggcccgcgcatggccgagttgagcggttcccggctggccgcgcagcaacagatggaaggcctcctggcgccgcaccggcccaaggagcccgcgtggttcctggccaccgtcggcgtctcgcccgaccaccagggcaagggtctgggcagcgccgtcgtgctccccggagtggaggcggccgagcgcgccggggtgcccgccttcctggagacctccgcgccccgcaacctccccttctacgagcggctcggcttcaccgtcaccgccgacgtcgaggtgcccgaaggaccgcgcacctggtgcatgacccgcaagcccggtgcctga

SEQ ID NO: 8658 - DNA, 2559 bp, Artificial Sequence
  Synthetic Polynucloetide
atggccttaccagtgaccgccttgctcctgccgctggccttgctgctccacgccgccaggccggatattcagctgacccagagccacaagtttctgagcaccagcgtgggcgacagagtgtccatcacctgtaaagccagccaggacgtgtacaacgccgtggcctggtatcagcagaagcctggacagagccccaagctgctgatctacagcgccagcagcagatacacaggcgtgcccagcagattcaccggctctggatctggccccgacttcacctttaccatcagctctgtgcaggccgaggacctggccgtgtacttttgtcagcagcacttcagaacccctttcaccttcggcagcggcaccaagctggaaatcaagctcgaggacctgaagaacgtgttcccacctgaggtggccgtgttcgagcctagcaaggccgagatcgcccacacccagaaagccaccctcgtgtgcctggctaccggcttctaccccgaccatgtggaactgtcttggtgggtcaacggcaaagaggtgcacagcggcgtgtgtaccgacccccagccactgaaagaacagcccgccctgaacgacagccggtactgcctgagcagcagactgagagtgtccgccaccttctggcagaacccccggaaccacttcagatgccaggtgcagttctacggcctgagcgagaacgacgagtggacccaggacagagccaagcccgtgacccagatcgtgtctgccgaagcctggggcagagccgattgcggcatcaccagcgccagctaccaccagggcgtgctgagcgccaccatcctgtacgagatcctgctgggcaaggccaccctgtacgccgtgctggtgtctgccctggtgctgatggctatggtcaagcggaaggacagccggggaagggccaagcgatctggatctggagcaacaaacttctcactactcaaacaagcaggtgacgtggaggagaatcccgggcctactagtatggactggatttggcgcatccttttccttgtcggcgctgctaccggcgcgcattccttcgaacaggttcagctccagcagtctggacccgagctgaagaaacctggcgagacagtgaagatcagctgcaaggccagcggctaccccttcaccaactacggcatgaactgggtcaagcaggcccctggacagggcctgaaatggatgggctggatcaataccagcaccggcgagagcaccttcgccgacgatttcaagggcagattcgacttcagcctggaaaccagcgccaacaccgcctacctccagatcaacaacctgaagtccgaggatatggctacctacttctgcgccagatgggaagtgtaccacggctacgtgccatattggggccagggcacaaccgtgacagtctcttctacgcgtatccagaaccctgatcctgccgtgtaccagctgcgggatagcaagagcagcgacaagagcgtgtgtctgttcaccgacttcgacagccagaccaacgtgtcccagagcaaggactccgacgtgtacatcaccgataagtgcgtgctggacatgcggagcatggacttcaagagcaactccgccgtggcctggtccaacaagtccgatttcgcctgcgccaacgccttcaacaacagcattatccccgaggacacattcttcccaagcagcgacgtgccctgcgacgtgaagctggtggaaaagagcttcgagacagacaccaacctgaacttccagaacctgagcgtgatcggcttcagaatcctgctgctgaaagtggccggctttaacctgctgatgaccctgcggctgtggtccagccgcgccaagagaagcggatctggcgtgaagcagaccctgaatttcgacctgctgaagctggctggcgacgtggaatccaacccaggcccttctagaggccatatgaccgagtacaagcccacggtgcgcctcgccacccgcgacgacgtccccagggccgtacgcaccctcgccgccgcgttcgccgactaccccgccacgcgccacaccgtcgatccggaccgccacatcgagcgggtcaccgagctgcaagaactcttcctcacgcgcgtcgggctcgacatcggcaaggtgtgggtcgcggacgacggcgccgcggtggcggtctggaccacgccggagagcgtcgaagcgggggcggtgttcgccgagatcggcccgcgcatggccgagttgagcggttcccggctggccgcgcagcaacagatggaaggcctcctggcgccgcaccggcccaaggagcccgcgtggttcctggccaccgtcggcgtctcgcccgaccaccagggcaagggtctgggcagcgccgtcgtgctccccggagtggaggcggccgagcgcgccggggtgcccgccttcctggagacctccgcgccccgcaacctccccttctacgagcggctcggcttcaccgtcaccgccgacgtcgaggtgcccgaaggaccgcgcacctggtgcatgacccgcaagcccggtgcctga

SEQ ID NO: 8659 - DNA, 1857 bp, Artificial Sequence
  Synthetic Polynucloetide
atggccttaccagtgaccgccttgctcctgccgctggccttgctgctccacgccgccaggccggatattcagctgacccagagccacaagtttctgagcaccagcgtgggcgacagagtgtccatcacctgtaaagccagccaggacgtgtacaacgccgtggcctggtatcagcagaagcctggacagagccccaagctgctgatctacagcgccagcagcagatacacaggcgtgcccagcagattcaccggctctggatctggccccgacttcacctttaccatcagctctgtgcaggccgaggacctggccgtgtacttttgtcagcagcacttcagaacccctttcaccttcggcagcggcaccaagctggaaatcaagctcgaggacctgaagaacgtgttcccacctgaggtggccgtgttcgagcctagcgaggccgagatcagccacacccagaaagccaccctcgtgtgcctggctaccggcttctaccccgaccatgtggaactgtcttggtgggtcaacggcaaagaggtgcacagcggcgtgtgtaccgacccccagccactgaaagaacagcccgccctgaacgacagccggtactgcctgagcagcagactgagagtgtccgccaccttctggcagaacccccggaaccacttcagatgccaggtgcagttctacggcctgagcgagaacgacgagtggacccaggacagagccaagcccgtgacccagatcgtgtctgccgaagcctggggcagagccgattgcggctttaccagcgagagctaccagcagggcgtgctgagcgccaccatcctgtacgagatcctgctgggcaaggccaccctgtacgccgtgctggtgtctgccctggtgctgatggctatggtcaagcggaaggacagccggggaagggccaagcgatctggatctggagcaacaaacttctcactactcaaacaagcaggtgacgtggaggagaatcccgggcctactagtatggactggatttggcgcatccttttccttgtcggcgctgctaccggcgcgcattccttcgaacaggttcagctccagcagtctggacccgagctgaagaaacctggcgagacagtgaagatcagctgcaaggccagcggctaccccttcaccaactacggcatgaactgggtcaagcaggcccctggacagggcctgaaatggatgggctggatcaataccagcaccggcgagagcaccttcgccgacgatttcaagggcagattcgacttcagcctggaaaccagcgccaacaccgcctacctccagatcaacaacctgaagtccgaggatatggctacctacttctgcgccagatgggaagtgtaccacggctacgtgccatattggggccagggcacaaccgtgacagtctcttctacgcgtatccagaaccctgatcctgccgtgtaccagctgcgggatagcaagagcagcgacaagagcgtgtgtctgttcaccgacttcgacagccagaccaacgtgtcccagagcaaggactccgacgtgtacatcaccgataagtgcgtgctggacatgcggagcatggacttcaagagcaactccgccgtggcctggtccaacaagtccgatttcgcctgcgccaacgccttcaacaacagcattatccccgaggacacattcttcccaagccccgagagcagctgcgacgtgaagctggtggaaaagagcttcgagacagacaccaacctgaacttccagaacctgagcgtgatcggcttcagaatcctgctgctgaaagtggccggctttaacctgctgatgaccctgcggctgtggtccagc

SEQ ID NO: 8660 - DNA, 2532 bp, Artificial Sequence
  Synthetic Polynucloetide
atggccttaccagtgaccgccttgctcctgccgctggccttgctgctccacgccgccaggccggatattcagctgacccagagccacaagtttctgagcaccagcgtgggcgacagagtgtccatcacctgtaaagccagccaggacgtgtacaacgccgtggcctggtatcagcagaagcctggacagagccccaagctgctgatctacagcgccagcagcagatacacaggcgtgcccagcagattcaccggctctggatctggccccgacttcacctttaccatcagctctgtgcaggccgaggacctggccgtgtacttttgtcagcagcacttcagaacccctttcaccttcggcagcggcaccaagctggaaatcaagctcgaggacctgaagaacgtgttcccacctgaggtggccgtgttcgagcctagcgaggccgagatcagccacacccagaaagccaccctcgtgtgcctggctaccggcttctaccccgaccatgtggaactgtcttggtgggtcaacggcaaagaggtgcacagcggcgtgtgtaccgacccccagccactgaaagaacagcccgccctgaacgacagccggtactgcctgagcagcagactgagagtgtccgccaccttctggcagaacccccggaaccacttcagatgccaggtgcagttctacggcctgagcgagaacgacgagtggacccaggacagagccaagcccgtgacccagatcgtgtctgccgaagcctggggcagagccgattgcggctttaccagcgagagctaccagcagggcgtgctgagcgccaccatcctgtacgagatcctgctgggcaaggccaccctgtacgccgtgctggtgtctgccctggtgctgatggctatggtcaagcggaaggacagccggggaagggccaagcgatctggatctggagcaacaaacttctcactactcaaacaagcaggtgacgtggaggagaatcccgggcctactagtatggactggatttggcgcatccttttccttgtcggcgctgctaccggcgcgcattccttcgaacaggttcagctccagcagtctggacccgagctgaagaaacctggcgagacagtgaagatcagctgcaaggccagcggctaccccttcaccaactacggcatgaactgggtcaagcaggcccctggacagggcctgaaatggatgggctggatcaataccagcaccggcgagagcaccttcgccgacgatttcaagggcagattcgacttcagcctggaaaccagcgccaacaccgcctacctccagatcaacaacctgaagtccgaggatatggctacctacttctgcgccagatgggaagtgtaccacggctacgtgccatattggggccagggcacaaccgtgacagtctcttctacgcgtatccagaaccctgatcctgccgtgtaccagctgcgggatagcaagagcagcgacaagagcgtgtgtctgttcaccgacttcgacagccagaccaacgtgtcccagagcaaggactccgacgtgtacatcaccgataagtgcgtgctggacatgcggagcatggacttcaagagcaactccgccgtggcctggtccaacaagtccgatttcgcctgcgccaacgccttcaacaacagcattatccccgaggacacattcttcccaagccccgagagcagctgcgacgtgaagctggtggaaaagagcttcgagacagacaccaacctgaacttccagaacctgagcgtgatcggcttcagaatcctgctgctgaaagtggccggctttaacctgctgatgaccctgcggctgtggtccagccgcgccaagagaagcggatctggcgtgaagcagaccctgaatttcgacctgctgaagctggctggcgacgtggaatccaacccaggcccttctagaggcgggatccacaccatggctacctacgaggtgctgtgcgaggtggcaagaaagctgggcaccgacgacagagaagtggtgctgttcctgctgaacgtgttcatccctcagcctacactggcccagctgatcggtgcactgagagccctgaaagaggaaggccggctgacctttcctctgctggccgaatgcctgttcagagccggaagaagggatctgctgcgggacctgctgcatctggaccccagatttctggaaagacacctggccggcaccatgagctacttcagcccttaccagctgaccgtgctgcacgttgacggcgaactgtgcgccagagatattcggagcctgatcttcctgagcaaggacaccatcggcagccggtctacccctcagacatttctgcactgggtgtactgcatggaaaacctggacctgctcggccccacagatgtggatgccctgatgtccatgctgagaagcctgagcagagtggacctccagagacaggtgcagacactgatgggactgcacctgagcggacctagccacagccagcactacagacacacccct

SEQ ID NO: 8661 - DNA, 1869 bp, Artificial Sequence
  Synthetic Polynucloetide
atggccttaccagtgaccgccttgctcctgccgctggccttgctgctccacgccgccaggccggatattcagctgacccagagccacaagtttctgagcaccagcgtgggcgacagagtgtccatcacctgtaaagccagccaggacgtgtacaacgccgtggcctggtatcagcagaagcctggacagagccccaagctgctgatctacagcgccagcagcagatacacaggcgtgcccagcagattcaccggctctggatctggccccgacttcacctttaccatcagctctgtgcaggccgaggacctggccgtgtacttttgtcagcagcacttcagaacccctttcaccttcggcagcggcaccaagctggaaatcaagctcgagatccagaaccctgatcctgccgtgtaccagctgcgggatagcaagagcagcgacaagagcgtgtgtctgttcaccgacttcgacagccagaccaacgtgtcccagagcaaggactccgacgtgtacatcaccgataagtgcgtgctggacatgcggagcatggacttcaagagcaactccgccgtggcctggtccaacaagtccgatttcgcctgcgccaacgccttcaacaacagcattatccccgaggacacattcttcccaagccccgagagcagctgcgacgtgaagctggtggaaaagagcttcgagacagacaccaacctgaacttccagaacctgagcgtgatcggcttcagaatcctgctgctgaaagtggccggctttaacctgctgatgaccctgcggctgtggtccagccgcgccaagagaagcggatctggcgtgaagcagaccctgaatttcgacctgctgaagctggctggcgacgtggaatccaacccaggccctactagtatggactggatttggcgcatccttttccttgtcggcgctgctaccggcgcgcattccttcgaacaggttcagctccagcagtctggacccgagctgaagaaacctggcgagacagtgaagatcagctgcaaggccagcggctaccccttcaccaactacggcatgaactgggtcaagcaggcccctggacagggcctgaaatggatgggctggatcaataccagcaccggcgagagcaccttcgccgacgatttcaagggcagattcgacttcagcctggaaaccagcgccaacaccgcctacctccagatcaacaacctgaagtccgaggatatggctacctacttctgcgccagatgggaagtgtaccacggctacgtgccatattggggccagggcacaaccgtgacagtctcttctacgcgtgaggacctgaagaacgtgttcccacctgaggtggccgtgttcgagcctagcgaggccgagatcagccacacccagaaagccaccctcgtgtgcctggctaccggcttctaccccgaccatgtggaactgtcttggtgggtcaacggcaaagaggtgcacagcggcgtgtgtaccgacccccagccactgaaagaacagcccgccctgaacgacagccggtactgcctgagcagcagactgagagtgtccgccaccttctggcagaacccccggaaccacttcagatgccaggtgcagttctacggcctgagcgagaacgacgagtggacccaggacagagccaagcccgtgacccagatcgtgtctgccgaagcctggggcagagccgattgcggctttaccagcgagagctaccagcagggcgtgctgagcgccaccatcctgtacgagatcctgctgggcaaggccaccctgtacgccgtgctggtgtctgccctggtgctgatggctatggtcaagcggaaggacagccgggga

SEQ ID NO: 8662 - DNA, 2535 bp, Artificial Sequence
  Synthetic Polynucloetide
atggccttaccagtgaccgccttgctcctgccgctggccttgctgctccacgccgccaggccggatattcagctgacccagagccacaagtttctgagcaccagcgtgggcgacagagtgtccatcacctgtaaagccagccaggacgtgtacaacgccgtggcctggtatcagcagaagcctggacagagccccaagctgctgatctacagcgccagcagcagatacacaggcgtgcccagcagattcaccggctctggatctggccccgacttcacctttaccatcagctctgtgcaggccgaggacctggccgtgtacttttgtcagcagcacttcagaacccctttcaccttcggcagcggcaccaagctggaaatcaagctcgagatccagaaccctgatcctgccgtgtaccagctgcgggatagcaagagcagcgacaagagcgtgtgtctgttcaccgacttcgacagccagaccaacgtgtcccagagcaaggactccgacgtgtacatcaccgataagtgcgtgctggacatgcggagcatggacttcaagagcaactccgccgtggcctggtccaacaagtccgatttcgcctgcgccaacgccttcaacaacagcattatccccgaggacacattcttcccaagccccgagagcagctgcgacgtgaagctggtggaaaagagcttcgagacagacaccaacctgaacttccagaacctgagcgtgatcggcttcagaatcctgctgctgaaagtggccggctttaacctgctgatgaccctgcggctgtggtccagccgcgccaagagaagcggatctggcgtgaagcagaccctgaatttcgacctgctgaagctggctggcgacgtggaatccaacccaggccctactagtatggactggatttggcgcatccttttccttgtcggcgctgctaccggcgcgcattccttcgaacaggttcagctccagcagtctggacccgagctgaagaaacctggcgagacagtgaagatcagctgcaaggccagcggctaccccttcaccaactacggcatgaactgggtcaagcaggcccctggacagggcctgaaatggatgggctggatcaataccagcaccggcgagagcaccttcgccgacgatttcaagggcagattcgacttcagcctggaaaccagcgccaacaccgcctacctccagatcaacaacctgaagtccgaggatatggctacctacttctgcgccagatgggaagtgtaccacggctacgtgccatattggggccagggcacaaccgtgacagtctcttctacgcgtgaggacctgaagaacgtgttcccacctgaggtggccgtgttcgagcctagcgaggccgagatcagccacacccagaaagccaccctcgtgtgcctggctaccggcttctaccccgaccatgtggaactgtcttggtgggtcaacggcaaagaggtgcacagcggcgtgtgtaccgacccccagccactgaaagaacagcccgccctgaacgacagccggtactgcctgagcagcagactgagagtgtccgccaccttctggcagaacccccggaaccacttcagatgccaggtgcagttctacggcctgagcgagaacgacgagtggacccaggacagagccaagcccgtgacccagatcgtgtctgccgaagcctggggcagagccgattgcggctttaccagcgagagctaccagcagggcgtgctgagcgccaccatcctgtacgagatcctgctgggcaaggccaccctgtacgccgtgctggtgtctgccctggtgctgatggctatggtcaagcggaaggacagccggggaagggccaagcgatctggatctggagcaacaaacttctcactactcaaacaagcaggtgacgtggaggagaatcccgggccttctagaggcgggatccacaccatggctacctacgaggtgctgtgcgaggtggcaagaaagctgggcaccgacgacagagaagtggtgctgttcctgctgaacgtgttcatccctcagcctacactggcccagctgatcggtgcactgagagccctgaaagaggaaggccggctgacctttcctctgctggccgaatgcctgttcagagccggaagaagggatctgctgcgggacctgctgcatctggaccccagatttctggaaagacacctggccggcaccatgagctacttcagcccttaccagctgaccgtgctgcacgttgacggcgaactgtgcgccagagatattcggagcctgatcttcctgagcaaggacaccatcggcagccggtctacccctcagacatttctgcactgggtgtactgcatggaaaacctggacctgctcggccccacagatgtggatgccctgatgtccatgctgagaagcctgagcagagtggacctccagagacaggtgcagacactgatgggactgcacctgagcggacctagccacagccagcactacagacacacccct

SEQ ID NO: 8663 - DNA, 2694 bp, Artificial Sequence
  Synthetic Polynucloetide
atggccttaccagtgaccgccttgctcctgccgctggccttgctgctccacgccgccaggccgctcgaggggaaaccaattcccaaccctcttctgggactggattcaaccggcagcggcgaggacctgaagaacgtgttcccacctgaggtggccgtgttcgagcctagcaaggccgagatcgcccacacccagaaagccaccctcgtgtgcctggctaccggcttctaccccgaccatgtggaactgtcttggtgggtcaacggcaaagaggtgcacagcggcgtgtgtaccgacccccagccactgaaagaacagcccgccctgaacgacagccggtactgcctgagcagcagactgagagtgtccgccaccttctggcagaacccccggaaccacttcagatgccaggtgcagttctacggcctgagcgagaacgacgagtggacccaggacagagccaagcccgtgacccagatcgtgtctgccgaagcctggggcagagccgattgcggcatcaccagcgccagctaccaccagggcgtgctgagcgccaccatcctgtacgagatcctgctgggcaaggccaccctgtacgccgtgctggtgtctgccctggtgctgatggctatggtcaagcggaaggacagccggggaagggccaagcgatctggatctggagcaacaaacttctcactactcaaacaagcaggtgacgtggaggagaatcccgggcctactagcatggccttaccagtgaccgccttgctcctgccgctggccttgctgctccacgccgccaggccggatattcagctgacccagagccacaagtttctgagcaccagcgtgggcgacagagtgtccatcacctgtaaagccagccaggacgtgtacaacgccgtggcctggtatcagcagaagcctggacagagccccaagctgctgatctacagcgccagcagcagatacacaggcgtgcccagcagattcaccggctctggatctggccccgacttcacctttaccatcagctctgtgcaggccgaggacctggccgtgtacttttgtcagcagcacttcagaacccctttcaccttcggcagcggcaccaagctggaaatcaagggcggaggcggaagtggaggcggaggatctggcggcggaggctctcaggttcagctccagcagtctggacccgagctgaagaaacctggcgagacagtgaagatcagctgcaaggccagcggctaccccttcaccaactacggcatgaactgggtcaagcaggcccctggacagggcctgaaatggatgggctggatcaataccagcaccggcgagagcaccttcgccgacgatttcaagggcagattcgacttcagcctggaaaccagcgccaacaccgcctacctccagatcaacaacctgaagtccgaggatatggctacctacttctgcgccagatgggaagtgtaccacggctacgtgccatattggggccagggcacaaccgtgacagtctcttctacgcgtgagcagaaactgatctcggaagaggatgggagcggcatccagaaccctgatcctgccgtgtaccagctgcgggatagcaagagcagcgacaagagcgtgtgtctgttcaccgacttcgacagccagaccaacgtgtcccagagcaaggactccgacgtgtacatcaccgataagtgcgtgctggacatgcggagcatggacttcaagagcaactccgccgtggcctggtccaacaagtccgatttcgcctgcgccaacgccttcaacaacagcattatccccgaggacacattcttcccaagcagcgacgtgccctgcgacgtgaagctggtggaaaagagcttcgagacagacaccaacctgaacttccagaacctgagcgtgatcggcttcagaatcctgctgctgaaagtggccggctttaacctgctgatgaccctgcggctgtggtccagccgcgccaagagaagcggatctggcgtgaagcagaccctgaatttcgacctgctgaagctggctggcgacgtggaatccaacccaggcccttctagaggccatatgaccgagtacaagcccacggtgcgcctcgccacccgcgacgacgtccccagggccgtacgcaccctcgccgccgcgttcgccgactaccccgccacgcgccacaccgtcgatccggaccgccacatcgagcgggtcaccgagctgcaagaactcttcctcacgcgcgtcgggctcgacatcggcaaggtgtgggtcgcggacgacggcgccgcggtggcggtctggaccacgccggagagcgtcgaagcgggggcggtgttcgccgagatcggcccgcgcatggccgagttgagcggttcccggctggccgcgcagcaacagatggaaggcctcctggcgccgcaccggcccaaggagcccgcgtggttcctggccaccgtcggcgtctcgcccgaccaccagggcaagggtctgggcagcgccgtcgtgctccccggagtggaggcggccgagcgcgccggggtgcccgccttcctggagacctccgcgccccgcaacctccccttctacgagcggctcggcttcaccgtcaccgccgacgtcgaggtgcccgaaggaccgcgcacctggtgcatgacccgcaagcccggtgcctga

SEQ ID NO: 8664 - DNA, 2697 bp, Artificial Sequence
  Synthetic Polynucloetide
atggccttaccagtgaccgccttgctcctgccgctggccttgctgctccacgccgccaggccgctcgagcagaaactgatctcggaagaggatctgggctccggcgatcgccctgatcctgccgtgtaccagctgcgggatagcaagagcagcgacaagagcgtgtgtctgttcaccgacttcgacagccagaccaacgtgtcccagagcaaggactccgacgtgtacatcaccgataagtgcgtgctggacatgcggagcatggacttcaagagcaactccgccgtggcctggtccaacaagtccgatttcgcctgcgccaacgccttcaacaacagcattatccccgaggacacattcttcccaagccccgagagcagctgcgacgtgaagctggtggaaaagagcttcgagacagacaccaacctgaacttccagaacctgagcgtgatcggcttcagaatcctgctgctgaaagtggccggctttaacctgctgatgaccctgcggctgtggtccagctctagtcgcgccaagagaagcggatctggcgtgaagcagaccctgaatttcgacctgctgaagctggctggcgacgtggaatccaacccaggccccactagcatggccttaccagtgaccgccttgctcctgccgctggccttgctgctccacgccgccaggccggatattcagctgacccagagccacaagtttctgagcaccagcgtgggcgacagagtgtccatcacctgtaaagccagccaggacgtgtacaacgccgtggcctggtatcagcagaagcctggacagagccccaagctgctgatctacagcgccagcagcagatacacaggcgtgcccagcagattcaccggctctggatctggccccgacttcacctttaccatcagctctgtgcaggccgaggacctggccgtgtacttttgtcagcagcacttcagaacccctttcaccttcggcagcggcaccaagctggaaatcaagggcggaggcggaagtggaggcggaggatctggcggcggaggctctcaggttcagctccagcagtctggacccgagctgaagaaacctggcgagacagtgaagatcagctgcaaggccagcggctaccccttcaccaactacggcatgaactgggtcaagcaggcccctggacagggcctgaaatggatgggctggatcaataccagcaccggcgagagcaccttcgccgacgatttcaagggcagattcgacttcagcctggaaaccagcgccaacaccgcctacctccagatcaacaacctgaagtccgaggatatggctacctacttctgcgccagatgggaagtgtaccacggctacgtgccatattggggccagggcacaaccgtgacagtctcttctacgcgtgggaaaccaattcccaaccctcttctgggactggattcaaccggcagcggcgaggacctgaagaacgtgttcccacctgaggtggccgtgttcgagcctagcgaggccgagatcagccacacccagaaagccaccctcgtgtgcctggctaccggcttctaccccgaccatgtggaactgtcttggtgggtcaacggcaaagaggtgcacagcggcgtgtgtaccgacccccagccactgaaagaacagcccgccctgaacgacagccggtactgcctgagcagcagactgagagtgtccgccaccttctggcagaacccccggaaccacttcagatgccaggtgcagttctacggcctgagcgagaacgacgagtggacccaggacagagccaagcccgtgacccagatcgtgtctgccgaagcctggggcagagccgattgcggctttaccagcgagagctaccagcagggcgtgctgagcgccaccatcctgtacgagatcctgctgggcaaggccaccctgtacgccgtgctggtgtctgccctggtgctgatggctatggtcaagcggaaggacagccggggaagggccaagcgatctggatctggagcaacaaacttctcactactcaaacaagcaggtgacgtggaggagaatcccgggccttctagaggccatatgaccgagtacaagcccacggtgcgcctcgccacccgcgacgacgtccccagggccgtacgcaccctcgccgccgcgttcgccgactaccccgccacgcgccacaccgtcgatccggaccgccacatcgagcgggtcaccgagctgcaagaactcttcctcacgcgcgtcgggctcgacatcggcaaggtgtgggtcgcggacgacggcgccgcggtggcggtctggaccacgccggagagcgtcgaagcgggggcggtgttcgccgagatcggcccgcgcatggccgagttgagcggttcccggctggccgcgcagcaacagatggaaggcctcctggcgccgcaccggcccaaggagcccgcgtggttcctggccaccgtcggcgtctcgcccgaccaccagggcaagggtctgggcagcgccgtcgtgctccccggagtggaggcggccgagcgcgccggggtgcccgccttcctggagacctccgcgccccgcaacctccccttctacgagcggctcggcttcaccgtcaccgccgacgtcgaggtgcccgaaggaccgcgcacctggtgcatgacccgcaagcccggtgcctga

SEQ ID NO: 8665 - DNA, 2559 bp, Artificial Sequence
  Synthetic Polynucloetide
atggccttaccagtgaccgccttgctcctgccgctggccttgctgctccacgccgccaggccggatattcagctgacccagagccacaagtttctgagcaccagcgtgggcgacagagtgtccatcacctgtaaagccagccaggacgtgtacaacgccgtggcctggtatcagcagaagcctggacagagccccaagctgctgatctacagcgccagcagcagatacacaggcgtgcccagcagattcaccggctctggatctggccccgacttcacctttaccatcagctctgtgcaggccgaggacctggccgtgtacttttgtcagcagcacttcagaacccctttcaccttcggcagcggcaccaagctggaaatcaagctcgaggacctgaagaacgtgttcccacctgaggtggccgtgttcgagcctagcgaggccgagatcagccacacccagaaagccaccctcgtgtgcctggctaccggcttctaccccgaccatgtggaactgtcttggtgggtcaacggcaaagaggtgcacagcggcgtgtctaccgacccccagccactgaaagaacagcccgccctgaacgacagccggtactgcctgagcagcagactgagagtgtccgccaccttctggcagaacccccggaaccacttcagatgccaggtgcagttctacggcctgagcgagaacgacgagtggacccaggacagagccaagcccgtgacccagatcgtgtctgccgaagcctggggcagagccgattgcggctttaccagcgagagctaccagcagggcgtgctgagcgccaccatcctgtacgagatcctgctgggcaaggccaccctgtacgccgtgctggtgtctgccctggtgctgatggctatggtcaagcggaaggacagccggggaagggccaagcgatctggatctggagcaacaaacttctcactactcaaacaagcaggtgacgtggaggagaatcccgggcctactagtatggactggatttggcgcatccttttccttgtcggcgctgctaccggcgcgcattccttcgaacaggttcagctccagcagtctggacccgagctgaagaaacctggcgagacagtgaagatcagctgcaaggccagcggctaccccttcaccaactacggcatgaactgggtcaagcaggcccctggacagggcctgaaatggatgggctggatcaataccagcaccggcgagagcaccttcgccgacgatttcaagggcagattcgacttcagcctggaaaccagcgccaacaccgcctacctccagatcaacaacctgaagtccgaggatatggctacctacttctgcgccagatgggaagtgtaccacggctacgtgccatattggggccagggcacaaccgtgacagtctcttctacgcgtatccagaaccctgatcctgccgtgtaccagctgcgggatagcaagagcagcgacaagagcgtgtgtctgttcaccgacttcgacagccagaccaacgtgtcccagagcaaggactccgacgtgtacatcaccgataagaccgtgctggacatgcggagcatggacttcaagagcaactccgccgtggcctggtccaacaagtccgatttcgcctgcgccaacgccttcaacaacagcattatccccgaggacacattcttcccaagccccgagagcagctgcgacgtgaagctggtggaaaagagcttcgagacagacaccaacctgaacttccagaacctgagcgtgatcggcttcagaatcctgctgctgaaagtggccggctttaacctgctgatgaccctgcggctgtggtccagccgcgccaagagaagcggatctggcgtgaagcagaccctgaatttcgacctgctgaagctggctggcgacgtggaatccaacccaggcccttctagaggccatatgaccgagtacaagcccacggtgcgcctcgccacccgcgacgacgtccccagggccgtacgcaccctcgccgccgcgttcgccgactaccccgccacgcgccacaccgtcgatccggaccgccacatcgagcgggtcaccgagctgcaagaactcttcctcacgcgcgtcgggctcgacatcggcaaggtgtgggtcgcggacgacggcgccgcggtggcggtctggaccacgccggagagcgtcgaagcgggggcggtgttcgccgagatcggcccgcgcatggccgagttgagcggttcccggctggccgcgcagcaacagatggaaggcctcctggcgccgcaccggcccaaggagcccgcgtggttcctggccaccgtcggcgtctcgcccgaccaccagggcaagggtctgggcagcgccgtcgtgctccccggagtggaggcggccgagcgcgccggggtgcccgccttcctggagacctccgcgccccgcaacctccccttctacgagcggctcggcttcaccgtcaccgccgacgtcgaggtgcccgaaggaccgcgcacctggtgcatgacccgcaagcccggtgcctga

SEQ ID NO: 8666 - DNA, 2805 bp, Artificial Sequence
  Synthetic Polynucloetide
atggccttaccagtgaccgccttgctcctgccgctggccttgctgctccacgccgccaggccggatattcagctgacccagagccacaagtttctgagcaccagcgtgggcgacagagtgtccatcacctgtaaagccagccaggacgtgtacaacgccgtggcctggtatcagcagaagcctggacagagccccaagctgctgatctacagcgccagcagcagatacacaggcgtgcccagcagattcaccggctctggatctggccccgacttcacctttaccatcagctctgtgcaggccgaggacctggccgtgtacttttgtcagcagcacttcagaacccctttcaccttcggcagcggcaccaagctggaaatcaagctcgaggacctgaagaacgtgttcccacctgaggtggccgtgttcgagcctagcgaggccgagatcagccacacccagaaagccaccctcgtgtgcctggctaccggcttctaccccgaccatgtggaactgtcttggtgggtcaacggcaaagaggtgcacagcggcgtgtctaccgacccccagccactgaaagaacagcccgccctgaacgacagccggtactgcctgagcagcagactgagagtgtccgccaccttctggcagaacccccggaaccacttcagatgccaggtgcagttctacggcctgagcgagaacgacgagtggacccaggacagagccaagcccgtgacccagatcgtgtctgccgaagcctggggcagagccgattgcggctttaccagcgagagctaccagcagggcgtgctgagcgccaccatcctgtacgagatcctgctgggcaaggccaccctgtacgccgtgctggtgtctgccctggtgctgatggctatggtcaagcggaaggacagccggggaagggccaagcgatctggatctggagcaacaaacttctcactactcaaacaagcaggtgacgtggaggagaatcccgggcctactagtatggactggatttggcgcatccttttccttgtcggcgctgctaccggcgcgcattccttcgaacaggttcagctccagcagtctggacccgagctgaagaaacctggcgagacagtgaagatcagctgcaaggccagcggctaccccttcaccaactacggcatgaactgggtcaagcaggcccctggacagggcctgaaatggatgggctggatcaataccagcaccggcgagagcaccttcgccgacgatttcaagggcagattcgacttcagcctggaaaccagcgccaacaccgcctacctccagatcaacaacctgaagtccgaggatatggctacctacttctgcgccagatgggaagtgtaccacggctacgtgccatattggggccagggcacaaccgtgacagtctcttctacgcgtgagcagaaactgatctcggaagaggatgggagcggcaccccattcccttctctggcccctcccatcatgctgctggtggacggcaagcagcagatggtggtcgtgtgcctggtgctggatgtggccccacctggactggacagccccatctggtttagcgccggcaatggctctgccctggacgcctttacctacggcccaagccctgccaccgatggcacctggacaaatctggcccacctgagcctgcccagcgaggaactggcttcttgggagcctctcgtgtgccacacaggacctggcgctgagggacacagcagatccacccagcctatgcacctgtctggcgaggccagcaccgccagaacctgtcctcaggaacctctgagaggcacccctggcggagcactgtggctgggagtgctgagactgctgctgttcaagctgctgctgtttgacctgctgctgacctgctcctgtctgtgcgatcctgccggccctctgccttctcctgccaccaccacaagactgagagccctgggcagccacagactgcaccctgccacagagacaggcggcagagaggccacaagcagccctagaccccagcccagagacagaagatggggcgataccccccctggcagaaagcctggatctccagtccgcgccaagagaagcggatctggcgtgaagcagaccctgaatttcgacctgctgaagctggctggcgacgtggaatccaacccaggcccttctagaggccatatgaccgagtacaagcccacggtgcgcctcgccacccgcgacgacgtccccagggccgtacgcaccctcgccgccgcgttcgccgactaccccgccacgcgccacaccgtcgatccggaccgccacatcgagcgggtcaccgagctgcaagaactcttcctcacgcgcgtcgggctcgacatcggcaaggtgtgggtcgcggacgacggcgccgcggtggcggtctggaccacgccggagagcgtcgaagcgggggcggtgttcgccgagatcggcccgcgcatggccgagttgagcggttcccggctggccgcgcagcaacagatggaaggcctcctggcgccgcaccggcccaaggagcccgcgtggttcctggccaccgtcggcgtctcgcccgaccaccagggcaagggtctgggcagcgccgtcgtgctccccggagtggaggcggccgagcgcgccggggtgcccgccttcctggagacctccgcgccccgcaacctccccttctacgagcggctcggcttcaccgtcaccgccgacgtcgaggtgcccgaaggaccgcgcacctggtgcatgacccgcaagcccggtgcctga

SEQ ID NO: 8667 - DNA, 2859 bp, Artificial Sequence
  Synthetic Polynucloetide
atggccttaccagtgaccgccttgctcctgccgctggccttgctgctccacgccgccaggccgctcgaggacctgaagaacgtgttcccacctgaggtggccgtgttcgagcctagcgaggccgagatcagccacacccagaaagccaccctcgtgtgcctggctaccggcttctaccccgaccatgtggaactgtcttggtgggtcaacggcaaagaggtgcacagcggcgtgtctaccgacccccagccactgaaagaacagcccgccctgaacgacagccggtactgcctgagcagcagactgagagtgtccgccaccttctggcagaacccccggaaccacttcagatgccaggtgcagttctacggcctgagcgagaacgacgagtggacccaggacagagccaagcccgtgacccagatcgtgtctgccgaagcctggggcagagccgattgcggctttaccagcgagagctaccagcagggcgtgctgagcgccaccatcctgtacgagatcctgctgggcaaggccaccctgtacgccgtgctggtgtctgccctggtgctgatggctatggtcaagcggaaggacagccggggaagggccaagcgatctggatctggagcaacaaacttctcactactcaaacaagcaggtgacgtggaggagaatcccgggcctactagcatggccttaccagtgaccgccttgctcctgccgctggccttgctgctccacgccgccaggccggatattcagctgacccagagccacaagtttctgagcaccagcgtgggcgacagagtgtccatcacctgtaaagccagccaggacgtgtacaacgccgtggcctggtatcagcagaagcctggacagagccccaagctgctgatctacagcgccagcagcagatacacaggcgtgcccagcagattcaccggctctggatctggccccgacttcacctttaccatcagctctgtgcaggccgaggacctggccgtgtacttttgtcagcagcacttcagaacccctttcaccttcggcagcggcaccaagctggaaatcaagggcggaggcggaagtggaggcggaggatctggcggcggaggctctcaggttcagctccagcagtctggacccgagctgaagaaacctggcgagacagtgaagatcagctgcaaggccagcggctaccccttcaccaactacggcatgaactgggtcaagcaggcccctggacagggcctgaaatggatgggctggatcaataccagcaccggcgagagcaccttcgccgacgatttcaagggcagattcgacttcagcctggaaaccagcgccaacaccgcctacctccagatcaacaacctgaagtccgaggatatggctacctacttctgcgccagatgggaagtgtaccacggctacgtgccatattggggccagggcacaaccgtgacagtctcttctacgcgtgagcagaaactgatctcggaagaggatctggggagcggcaccccattcccttctctggcccctcccatcatgctgctggtggacggcaagcagcagatggtggtcgtgtgcctggtgctggatgtggccccacctggactggacagccccatctggtttagcgccggcaatggctctgccctggacgcctttacctacggcccaagccctgccaccgatggcacctggacaaatctggcccacctgagcctgcccagcgaggaactggcttcttgggagcctctcgtgtgccacacaggacctggcgctgagggacacagcagatccacccagcctatgcacctgtctggcgaggccagcaccgccagaacctgtcctcaggaacctctgagaggcacccctggcggagcactgtggctgggagtgctgagactgctgctgttcaagctgctgctgtttgacctgctgctgacctgctcctgtctgtgcgatcctgccggccctctgccttctcctgccaccaccacaagactgagagccctgggcagccacagactgcaccctgccacagagacaggcggcagagaggccacaagcagccctagaccccagcccagagacagaagatggggcgataccccccctggcagaaagcctggatctccagtccgcgccaagagaagcggatctggcgtgaagcagaccctgaatttcgacctgctgaagctggctggcgacgtggaatccaacccaggcccttctagatctagaggccatatgaccgagtacaagcccacggtgcgcctcgccacccgcgacgacgtccccagggccgtacgcaccctcgccgccgcgttcgccgactaccccgccacgcgccacaccgtcgatccggaccgccacatcgagcgggtcaccgagctgcaagaactcttcctcacgcgcgtcgggctcgacatcggcaaggtgtgggtcgcggacgacggcgccgcggtggcggtctggaccacgccggagagcgtcgaagcgggggcggtgttcgccgagatcggcccgcgcatggccgagttgagcggttcccggctggccgcgcagcaacagatggaaggcctcctggcgccgcaccggcccaaggagcccgcgtggttcctggccaccgtcggcgtctcgcccgaccaccagggcaagggtctgggcagcgccgtcgtgctccccggagtggaggcggccgagcgcgccggggtgcccgccttcctggagacctccgcgccccgcaacctccccttctacgagcggctcggcttcaccgtcaccgccgacgtcgaggtgcccgaaggaccgcgcacctggtgcatgacccgcaagcccggtgcctga

SEQ ID NO: 8668 - DNA, 2670 bp, Artificial Sequence
  Synthetic Polynucloetide
atggccttaccagtgaccgccttgctcctgccgctggccttgctgctccacgccgccaggccggatattcagctgacccagagccacaagtttctgagcaccagcgtgggcgacagagtgtccatcacctgtaaagccagccaggacgtgtacaacgccgtggcctggtatcagcagaagcctggacagagccccaagctgctgatctacagcgccagcagcagatacacaggcgtgcccagcagattcaccggctctggatctggccccgacttcacctttaccatcagctctgtgcaggccgaggacctggccgtgtacttttgtcagcagcacttcagaacccctttcaccttcggcagcggcaccaagctggaaatcaagctcgaggggaaaccaattcccaaccctcttctgggactggattcaaccggcagcggcgacaagcagctggacgccgacgtgtcccccaagcctaccatcttcctgccctctatcgccgagacaaagctccagaaggccggcacctacctgtgcctgctggaaaagttcttcccagatgtgattaagatccactggcaggaaaagaagtccaacaccatcctgggcagccaggaaggcaacaccatgaagaccaacgacacctacatgaagttcagctggctgaccgtgcccgagaagtccctggacaaagaacacagatgcatcgtgcggcacgaaaacaacaagaacggcgtggaccaggaaatcatcttcccacccatcaagaccgatgtgattacaatggaccccaaggacaactgctccaaggacgccaacgataccctgctgctccagctgaccaacaccagcgcctactacatgtacttgttgctgctgctgaagtccgtggtgtacttcgccatcatcacatgctgcctgctgcggagaaccgccttctgctgcaacggcgagaagtctagggccaagcgatctggatctggagcaacaaacttctcactactcaaacaagcaggtgacgtggaggagaatcccgggcctactagtatggactggatttggcgcatccttttccttgtcggcgctgctaccggcgcgcattccttcgaacaggttcagctccagcagtctggacccgagctgaagaaacctggcgagacagtgaagatcagctgcaaggccagcggctaccccttcaccaactacggcatgaactgggtcaagcaggcccctggacagggcctgaaatggatgggctggatcaataccagcaccggcgagagcaccttcgccgacgatttcaagggcagattcgacttcagcctggaaaccagcgccaacaccgcctacctccagatcaacaacctgaagtccgaggatatggctacctacttctgcgccagatgggaagtgtaccacggctacgtgccatattggggccagggcacaaccgtgacagtctcttctacgcgtgagcagaaactgatctcggaagaggatgggagcggcagccagcctcacaccaagcccagcgtgttcgtgatgaagaacggcaccaacgtggcctgcctcgtgaaagagttctaccccaaggacatcaggatcaacctggtgtccagcaagaagatcaccgagttcgaccccgccatcgtgatctcccccagcggcaagtacaacgccgtgaagctggggaagtacgaggacagcaacagcgtgacctgctccgtgcagcacgacaacaagaccgtgcacagcaccgactttgaagtgaaaaccgactccaccgaccacgtgaagcccaaagagacagagaacaccaagcagcccagcaagagctgccacaagcccaaggccatcgtgcacaccgagaaagtgaacatgatgagcctgaccgtgctgggcctgcggatgctgttcgccaaaaccgtggccgtgaacttcctgctgaccgccaagctgttcttcctccgcgccaagagaagcggatctggcgtgaagcagaccctgaatttcgacctgctgaagctggctggcgacgtggaatccaacccaggcccttctagaggccatatgaccgagtacaagcccacggtgcgcctcgccacccgcgacgacgtccccagggccgtacgcaccctcgccgccgcgttcgccgactaccccgccacgcgccacaccgtcgatccggaccgccacatcgagcgggtcaccgagctgcaagaactcttcctcacgcgcgtcgggctcgacatcggcaaggtgtgggtcgcggacgacggcgccgcggtggcggtctggaccacgccggagagcgtcgaagcgggggcggtgttcgccgagatcggcccgcgcatggccgagttgagcggttcccggctggccgcgcagcaacagatggaaggcctcctggcgccgcaccggcccaaggagcccgcgtggttcctggccaccgtcggcgtctcgcccgaccaccagggcaagggtctgggcagcgccgtcgtgctccccggagtggaggcggccgagcgcgccggggtgcccgccttcctggagacctccgcgccccgcaacctccccttctacgagcggctcggcttcaccgtcaccgccgacgtcgaggtgcccgaaggaccgcgcacctggtgcatgacccgcaagcccggtgcctga

SEQ ID NO: 8669 - DNA, 1881 bp, Artificial Sequence
  Synthetic Polynucloetide
atggccttaccagtgaccgccttgctcctgccgctggccttgctgctccacgccgccaggccggatattcagctgacccagagccacaagtttctgagcaccagcgtgggcgacagagtgtccatcacctgtaaagccagccaggacgtgtacaacgccgtggcctggtatcagcagaagcctggacagagccccaagctgctgatctacagcgccagcagcagatacacaggcgtgcccagcagattcaccggctctggatctggccccgacttcacctttaccatcagctctgtgcaggccgaggacctggccgtgtacttttgtcagcagcacttcagaacccctttcaccttcggcagcggcaccaagctggaaatcaagctcgagagccagcctcacaccaagcccagcgtgttcgtgatgaagaacggcaccaacgtggcctgcctcgtgaaagagttctaccccaaggacatcaggatcaacctggtgtccagcaagaagatcaccgagttcgaccccgccatcgtgatctcccccagcggcaagtacaacgccgtgaagctggggaagtacgaggacagcaacagcgtgacctgctccgtgcagcacgacaacaagaccgtgcacagcaccgactttgaagtgaaaaccgactccaccgaccacgtgaagcccaaagagacagagaacaccaagcagcccagcaagagctgccacaagcccaaggccatcgtgcacaccgagaaagtgaacatgatgagcctgaccgtgctgggcctgcggatgctgttcgccaaaaccgtggccgtgaacttcctgctgaccgccaagctgttcttcctcagggccaagcgatctggatctggagcaacaaacttctcactactcaaacaagcaggtgacgtggaggagaatcccgggcctactagtatggactggatttggcgcatccttttccttgtcggcgctgctaccggcgcgcattccttcgaacaggttcagctccagcagtctggacccgagctgaagaaacctggcgagacagtgaagatcagctgcaaggccagcggctaccccttcaccaactacggcatgaactgggtcaagcaggcccctggacagggcctgaaatggatgggctggatcaataccagcaccggcgagagcaccttcgccgacgatttcaagggcagattcgacttcagcctggaaaccagcgccaacaccgcctacctccagatcaacaacctgaagtccgaggatatggctacctacttctgcgccagatgggaagtgtaccacggctacgtgccatattggggccagggcacaaccgtgacagtctcttctacgcgtgacaagcagctggacgccgacgtgtcccccaagcctaccatcttcctgccctctatcgccgagacaaagctccagaaggccggcacctacctgtgcctgctggaaaagttcttcccagatgtgattaagatccactggcaggaaaagaagtccaacaccatcctgggcagccaggaaggcaacaccatgaagaccaacgacacctacatgaagttcagctggctgaccgtgcccgagaagtccctggacaaagaacacagatgcatcgtgcggcacgaaaacaacaagaacggcgtggaccaggaaatcatcttcccacccatcaagaccgatgtgattacaatggaccccaaggacaactgctccaaggacgccaacgataccctgctgctccagctgaccaacaccagcgcctactacatgtacttgttgctgctgctgaagtccgtggtgtacttcgccatcatcacatgctgcctgctgcggagaaccgccttctgctgcaacggcgagaagtct

SEQ ID NO: 8670 - DNA, 2715 bp, Artificial Sequence
  Synthetic Polynucloetide
atggccttaccagtgaccgccttgctcctgccgctggccttgctgctccacgccgccaggccgctcgaggggaaaccaattcccaaccctcttctgggactggattcaaccggcagcggcgacaagcagctggacgccgacgtgtcccccaagcctaccatcttcctgccctctatcgccgagacaaagctccagaaggccggcacctacctgtgcctgctggaaaagttcttcccagatgtgattaagatccactggcaggaaaagaagtccaacaccatcctgggcagccaggaaggcaacaccatgaagaccaacgacacctacatgaagttcagctggctgaccgtgcccgagaagtccctggacaaagaacacagatgcatcgtgcggcacgaaaacaacaagaacggcgtggaccaggaaatcatcttcccacccatcaagaccgatgtgattacaatggaccccaaggacaactgctccaaggacgccaacgataccctgctgctccagctgaccaacaccagcgcctactacatgtacttgttgctgctgctgaagtccgtggtgtacttcgccatcatcacatgctgcctgctgcggagaaccgccttctgctgcaacggcgagaagtctagggccaagcgatctggatctggagcaacaaacttctcactactcaaacaagcaggtgacgtggaggagaatcccgggcctactagcatggccttaccagtgaccgccttgctcctgccgctggccttgctgctccacgccgccaggccggatattcagctgacccagagccacaagtttctgagcaccagcgtgggcgacagagtgtccatcacctgtaaagccagccaggacgtgtacaacgccgtggcctggtatcagcagaagcctggacagagccccaagctgctgatctacagcgccagcagcagatacacaggcgtgcccagcagattcaccggctctggatctggccccgacttcacctttaccatcagctctgtgcaggccgaggacctggccgtgtacttttgtcagcagcacttcagaacccctttcaccttcggcagcggcaccaagctggaaatcaagggcggaggcggaagtggaggcggaggatctggcggcggaggctctcaggttcagctccagcagtctggacccgagctgaagaaacctggcgagacagtgaagatcagctgcaaggccagcggctaccccttcaccaactacggcatgaactgggtcaagcaggcccctggacagggcctgaaatggatgggctggatcaataccagcaccggcgagagcaccttcgccgacgatttcaagggcagattcgacttcagcctggaaaccagcgccaacaccgcctacctccagatcaacaacctgaagtccgaggatatggctacctacttctgcgccagatgggaagtgtaccacggctacgtgccatattggggccagggcacaaccgtgacagtctcttctacgcgtgagcagaaactgatctcggaagaggatgggagcggcagccagcctcacaccaagcccagcgtgttcgtgatgaagaacggcaccaacgtggcctgcctcgtgaaagagttctaccccaaggacatcaggatcaacctggtgtccagcaagaagatcaccgagttcgaccccgccatcgtgatctcccccagcggcaagtacaacgccgtgaagctggggaagtacgaggacagcaacagcgtgacctgctccgtgcagcacgacaacaagaccgtgcacagcaccgactttgaagtgaaaaccgactccaccgaccacgtgaagcccaaagagacagagaacaccaagcagcccagcaagagctgccacaagcccaaggccatcgtgcacaccgagaaagtgaacatgatgagcctgaccgtgctgggcctgcggatgctgttcgccaaaaccgtggccgtgaacttcctgctgaccgccaagctgttcttcctccgcgccaagagaagcggatctggcgtgaagcagaccctgaatttcgacctgctgaagctggctggcgacgtggaatccaacccaggcccttctagaggccatatgaccgagtacaagcccacggtgcgcctcgccacccgcgacgacgtccccagggccgtacgcaccctcgccgccgcgttcgccgactaccccgccacgcgccacaccgtcgatccggaccgccacatcgagcgggtcaccgagctgcaagaactcttcctcacgcgcgtcgggctcgacatcggcaaggtgtgggtcgcggacgacggcgccgcggtggcggtctggaccacgccggagagcgtcgaagcgggggcggtgttcgccgagatcggcccgcgcatggccgagttgagcggttcccggctggccgcgcagcaacagatggaaggcctcctggcgccgcaccggcccaaggagcccgcgtggttcctggccaccgtcggcgtctcgcccgaccaccagggcaagggtctgggcagcgccgtcgtgctccccggagtggaggcggccgagcgcgccggggtgcccgccttcctggagacctccgcgccccgcaacctccccttctacgagcggctcggcttcaccgtcaccgccgacgtcgaggtgcccgaaggaccgcgcacctggtgcatgacccgcaagcccggtgcctga

SEQ ID NO: 8671 - DNA, 3090 bp, Artificial Sequence
  Synthetic Polynucloetide
atggccttaccagtgaccgccttgctcctgccgctggccttgctgctccacgccgccaggccggatattcagctgacccagagccacaagtttctgagcaccagcgtgggcgacagagtgtccatcacctgtaaagccagccaggacgtgtacaacgccgtggcctggtatcagcagaagcctggacagagccccaagctgctgatctacagcgccagcagcagatacacaggcgtgcccagcagattcaccggctctggatctggccccgacttcacctttaccatcagctctgtgcaggccgaggacctggccgtgtacttttgtcagcagcacttcagaacccctttcaccttcggcagcggcaccaagctggaaatcaagggacagcctaaggccaatcctaccgtgacactgttccctccaagcagcgaagaactccaggccaacaaggccacacttgtgtgcctgatctccgacttctaccctggggctgtgacagtggcttggaaggccgatggatctcctgtgaaagccggcgtggaaaccaccaagccatccaagcagagcaacaacaaatacgccgccagctcctacctgagcctgacacctgagcagtggaagtcccacagatcctacagctgccaagtgacccacgaaggcagcaccgtggaaaagacagtggcccctacagagtgcagcggatcccagagcttcggcctgctggaccccaagctgtgctacctgctggatggcatcctgttcatctacggcgtgatcctgaccgccctgttcctgagagtgaagttcagcagaagcgccgacgcccctgcctaccagcagggacagaaccaactgtacaacgagctgaacctgggcagacgggaagagtacgacgtgctggacaagcggagaggcagggaccctgagatgggcggaaagccccagcggagaaagaacccccaggaaggactgtataacgaactccagaaagacaagatggccgaagcctacagcgagatcggcatgaagggcgagcggagaagaggcaagggccacgatggcctgtaccagggcctgagcaccgccaccaaggacacctatgacgccctgcacatgcaggccctgcctccaagaagggccaagcgatctggatctggagcaacaaacttctcactactcaaacaagcaggtgacgtggaggagaatcccgggcctactagtatggactggatttggcgcatccttttccttgtcggcgctgctaccggcgcgcattccttcgaacaggttcagctccagcagtctggacccgagctgaagaaacctggcgagacagtgaagatcagctgcaaggccagcggctaccccttcaccaactacggcatgaactgggtcaagcaggcccctggacagggcctgaaatggatgggctggatcaataccagcaccggcgagagcaccttcgccgacgatttcaagggcagattcgacttcagcctggaaaccagcgccaacaccgcctacctccagatcaacaacctgaagtccgaggatatggctacctacttctgcgccagatgggaagtgtaccacggctacgtgccatattggggccagggcacaaccgtgacagtctcttctgcctctacaaagggaccctccgtgtttcctctggctcccagcagcaagtctacaagcggaggaacagccgctctgggctgcctggtcaaggattactttcccgagcctgtgaccgtgtcctggaatagcggagcactgacaagcggcgtgcacacctttccagccgtgctgcaaagcagcggcctgtactctctgagcagcgtggtcacagtgcctagctctagcctgggcacccagacctacatctgcaatgtgaaccacaagcctagcaacaccaaggtggacaagagagtggaacccaagagctgtggtacccagagttttgggttgttggaccctaaattgtgctatctgttggacggaatcctgttcatttacggagtgatcctgaccgcattgttcctgcgggttaagttttccagatccgcagacgcacccgcttaccaacaagggcagaaccaactctacaatgaacttaatttggggcggagggaagagtacgacgttctggacaaaaggaggggacgagatcccgagatgggcggaaagcctcagcgaaggaagaatccgcaagaggggctttataacgaactccagaaagataaaatggcagaagcctatagtgagattgggatgaagggagaaaggaggaggggtaaaggtcacgatgggttgtaccaaggattgagcacagccactaaagatacctatgatgcgctccacatgcaggccctgccgccaagacgcgccaagagaagcggatctggcgtgaagcagaccctgaatttcgacctgctgaagctggctggcgacgtggaatccaacccaggcccttctagaggccatatgaccgagtacaagcccacggtgcgcctcgccacccgcgacgacgtccccagggccgtacgcaccctcgccgccgcgttcgccgactaccccgccacgcgccacaccgtcgatccggaccgccacatcgagcgggtcaccgagctgcaagaactcttcctcacgcgcgtcgggctcgacatcggcaaggtgtgggtcgcggacgacggcgccgcggtggcggtctggaccacgccggagagcgtcgaagcgggggcggtgttcgccgagatcggcccgcgcatggccgagttgagcggttcccggctggccgcgcagcaacagatggaaggcctcctggcgccgcaccggcccaaggagcccgcgtggttcctggccaccgtcggcgtctcgcccgaccaccagggcaagggtctgggcagcgccgtcgtgctccccggagtggaggcggccgagcgcgccggggtgcccgccttcctggagacctccgcgccccgcaacctccccttctacgagcggctcggcttcaccgtcaccgccgacgtcgaggtgcccgaaggaccgcgcacctggtgcatgacccgcaagcccggtgcctga

SEQ ID NO: 8672 - DNA, 2445 bp, Artificial Sequence
  Synthetic Polynucloetide
atggccttaccagtgaccgccttgctcctgccgctggccttgctgctccacgccgccaggccggatattcagctgacccagagccacaagtttctgagcaccagcgtgggcgacagagtgtccatcacctgtaaagccagccaggacgtgtacaacgccgtggcctggtatcagcagaagcctggacagagccccaagctgctgatctacagcgccagcagcagatacacaggcgtgcccagcagattcaccggctctggatctggccccgacttcacctttaccatcagctctgtgcaggccgaggacctggccgtgtacttttgtcagcagcacttcagaacccctttcaccttcggcagcggcaccaagctggaaatcaagctcgaggacctgaagaacgtgttcccacctgaggtggccgtgttcgagcctagcgaggccgagatcagccacacccagaaagccaccctcgtgtgcctggctaccggcttctaccccgaccatgtggaactgtcttggtgggtcaacggcaaagaggtgcacagcggcgtgtctaccgacccccagccactgaaagaacagcccgccctgaacgacagccggtactgcctgagcagcagactgagagtgtccgccaccttctggcagaacccccggaaccacttcagatgccaggtgcagttctacggcctgagcgagaacgacgagtggacccaggacagagccaagcccgtgacccagatcgtgtctgccgaagcctggggcagagccgattgcggatcccagagcttcggcctgctggaccccaagctgtgctacctgctggatggcatcctgttcatctacggcgtgatcctgaccgccctgttcctgagagtgaagttcagcagaagcgccgacgcccctgcctaccagcagggacagaaccaactgtacaacgagctgaacctgggcagacgggaagagtacgacgtgctggacaagcggagaggcagggaccctgagatgggcggaaagccccagcggagaaagaacccccaggaaggactgtataacgaactccagaaagacaagatggccgaagcctacagcgagatcggcatgaagggcgagcggagaagaggcaagggccacgatggcctgtaccagggcctgagcaccgccaccaaggacacctatgacgccctgcacatgcaggccctgcctccaagaagggccaagcgatctggatctggagcaacaaacttctcactactcaaacaagcaggtgacgtggaggagaatcccgggcctactagtatggactggatttggcgcatccttttccttgtcggcgctgctaccggcgcgcattccttcgaacaggttcagctccagcagtctggacccgagctgaagaaacctggcgagacagtgaagatcagctgcaaggccagcggctaccccttcaccaactacggcatgaactgggtcaagcaggcccctggacagggcctgaaatggatgggctggatcaataccagcaccggcgagagcaccttcgccgacgatttcaagggcagattcgacttcagcctggaaaccagcgccaacaccgcctacctccagatcaacaacctgaagtccgaggatatggctacctacttctgcgccagatgggaagtgtaccacggctacgtgccatattggggccagggcacaaccgtgacagtctcttctacgcgtatccagaaccctgatcctgccgtgtaccagctgcgggatagcaagagcagcgacaagagcgtgtgtctgttcaccgacttcgacagccagaccaacgtgtcccagagcaaggactccgacgtgtacatcaccgataagaccgtgctggacatgcggagcatggacttcaagagcaactccgccgtggcctggtccaacaagtccgatttcgcctgcgccaacgccttcaacaacagcattatccccgaggacacattcttcccaagccccgagagcagctgcggtacccagagttttgggttgttggaccctaaattgtgctatctgttggacggaatcctgttcatttacggagtgatcctgaccgcattgttcctgcgggttaagttttccagatccgcagacgcacccgcttaccaacaagggcagaaccaactctacaatgaacttaatttggggcggagggaagagtacgacgttctggacaaaaggaggggacgagatcccgagatgggcggaaagcctcagcgaaggaagaatccgcaagaggggctttataacgaactccagaaagataaaatggcagaagcctatagtgagattgggatgaagggagaaaggaggaggggtaaaggtcacgatgggttgtaccaaggattgagcacagccactaaagatacctatgatgcgctccacatgcaggccctgccgccaaga

SEQ ID NO: 8673 - DNA, 2445 bp, Artificial Sequence
  Synthetic Polynucloetide
atggccttaccagtgaccgccttgctcctgccgctggccttgctgctccacgccgccaggccggatattcagctgacccagagccacaagtttctgagcaccagcgtgggcgacagagtgtccatcacctgtaaagccagccaggacgtgtacaacgccgtggcctggtatcagcagaagcctggacagagccccaagctgctgatctacagcgccagcagcagatacacaggcgtgcccagcagattcaccggctctggatctggccccgacttcacctttaccatcagctctgtgcaggccgaggacctggccgtgtacttttgtcagcagcacttcagaacccctttcaccttcggcagcggcaccaagctggaaatcaagctcgaggacctgaagaacgtgttcccacctgaggtggccgtgttcgagcctagcaaggccgagatcgcccacacccagaaagccaccctcgtgtgcctggctaccggcttctaccccgaccatgtggaactgtcttggtgggtcaacggcaaagaggtgcacagcggcgtgtgtaccgacccccagccactgaaagaacagcccgccctgaacgacagccggtactgcctgagcagcagactgagagtgtccgccaccttctggcagaacccccggaaccacttcagatgccaggtgcagttctacggcctgagcgagaacgacgagtggacccaggacagagccaagcccgtgacccagatcgtgtctgccgaagcctggggcagagccgattgcggatcccagagcttcggcctgctggaccccaagctgtgctacctgctggatggcatcctgttcatctacggcgtgatcctgaccgccctgttcctgagagtgaagttcagcagaagcgccgacgcccctgcctaccagcagggacagaaccaactgtacaacgagctgaacctgggcagacgggaagagtacgacgtgctggacaagcggagaggcagggaccctgagatgggcggaaagccccagcggagaaagaacccccaggaaggactgtataacgaactccagaaagacaagatggccgaagcctacagcgagatcggcatgaagggcgagcggagaagaggcaagggccacgatggcctgtaccagggcctgagcaccgccaccaaggacacctatgacgccctgcacatgcaggccctgcctccaagaagggccaagcgatctggatctggagcaacaaacttctcactactcaaacaagcaggtgacgtggaggagaatcccgggcctactagtatggactggatttggcgcatccttttccttgtcggcgctgctaccggcgcgcattccttcgaacaggttcagctccagcagtctggacccgagctgaagaaacctggcgagacagtgaagatcagctgcaaggccagcggctaccccttcaccaactacggcatgaactgggtcaagcaggcccctggacagggcctgaaatggatgggctggatcaataccagcaccggcgagagcaccttcgccgacgatttcaagggcagattcgacttcagcctggaaaccagcgccaacaccgcctacctccagatcaacaacctgaagtccgaggatatggctacctacttctgcgccagatgggaagtgtaccacggctacgtgccatattggggccagggcacaaccgtgacagtctcttctacgcgtatccagaaccctgatcctgccgtgtaccagctgcgggatagcaagagcagcgacaagagcgtgtgtctgttcaccgacttcgacagccagaccaacgtgtcccagagcaaggactccgacgtgtacatcaccgataagtgcgtgctggacatgcggagcatggacttcaagagcaactccgccgtggcctggtccaacaagtccgatttcgcctgcgccaacgccttcaacaacagcattatccccgaggacacattcttcccaagcagcgacgtgccctgcggtacccagagttttgggttgttggaccctaaattgtgctatctgttggacggaatcctgttcatttacggagtgatcctgaccgcattgttcctgcgggttaagttttccagatccgcagacgcacccgcttaccaacaagggcagaaccaactctacaatgaacttaatttggggcggagggaagagtacgacgttctggacaaaaggaggggacgagatcccgagatgggcggaaagcctcagcgaaggaagaatccgcaagaggggctttataacgaactccagaaagataaaatggcagaagcctatagtgagattgggatgaagggagaaaggaggaggggtaaaggtcacgatgggttgtaccaaggattgagcacagccactaaagatacctatgatgcgctccacatgcaggccctgccgccaaga

SEQ ID NO: 8674 - DNA, 2658 bp, Artificial Sequence
  Synthetic Polynucloetide
atggccttaccagtgaccgccttgctcctgccgctggccttgctgctccacgccgccaggccggatattcagctgacccagagccacaagtttctgagcaccagcgtgggcgacagagtgtccatcacctgtaaagccagccaggacgtgtacaacgccgtggcctggtatcagcagaagcctggacagagccccaagctgctgatctacagcgccagcagcagatacacaggcgtgcccagcagattcaccggctctggatctggccccgacttcacctttaccatcagctctgtgcaggccgaggacctggccgtgtacttttgtcagcagcacttcagaacccctttcaccttcggcagcggcaccaagctggaaatcaagctcgaggggaaaccaattcccaaccctcttctgggactggattcaaccggcagcggcgaggacctgaagaacgtgttcccacctgaggtggccgtgttcgagcctagcgaggccgagatcagccacacccagaaagccaccctcgtgtgcctggctaccggcttctaccccgaccatgtggaactgtcttggtgggtcaacggcaaagaggtgcacagcggcgtgtctaccgacccccagccactgaaagaacagcccgccctgaacgacagccggtactgcctgagcagcagactgagagtgtccgccaccttctggcagaacccccggaaccacttcagatgccaggtgcagttctacggcctgagcgagaacgacgagtggacccaggacagagccaagcccgtgacccagatcgtgtctgccgaagcctggggcagagccgattgcggatcccagagcttcggcctgctggaccccaagctgtgctacctgctggatggcatcctgttcatctacggcgtgatcctgaccgccctgttcctgagagtgaagttcagcagaagcgccgacgcccctgcctaccagcagggacagaaccaactgtacaacgagctgaacctgggcagacgggaagagtacgacgtgctggacaagcggagaggcagggaccctgagatgggcggaaagccccagcggagaaagaacccccaggaaggactgtataacgaactccagaaagacaagatggccgaagcctacagcgagatcggcatgaagggcgagcggagaagaggcaagggccacgatggcctgtaccagggcctgagcaccgccaccaaggacacctatgacgccctgcacatgcaggccctgcctccaagaagggccaagcgatctggatctggagcaacaaacttctcactactcaaacaagcaggtgacgtggaggagaatcccgggcctactagtatggactggatttggcgcatccttttccttgtcggcgctgctaccggcgcgcattccttcgaacaggttcagctccagcagtctggacccgagctgaagaaacctggcgagacagtgaagatcagctgcaaggccagcggctaccccttcaccaactacggcatgaactgggtcaagcaggcccctggacagggcctgaaatggatgggctggatcaataccagcaccggcgagagcaccttcgccgacgatttcaagggcagattcgacttcagcctggaaaccagcgccaacaccgcctacctccagatcaacaacctgaagtccgaggatatggctacctacttctgcgccagatgggaagtgtaccacggctacgtgccatattggggccagggcacaaccgtgacagtctcttctacgcgtgagcagaaactgatctcggaagaggatgggagcggcatccagaaccctgatcctgccgtgtaccagctgcgggatagcaagagcagcgacaagagcgtgtgtctgttcaccgacttcgacagccagaccaacgtgtcccagagcaaggactccgacgtgtacatcaccgataagaccgtgctggacatgcggagcatggacttcaagagcaactccgccgtggcctggtccaacaagtccgatttcgcctgcgccaacgccttcaacaacagcattatccccgaggacacattcttcccaagccccgagagcagctgcggtacccagagttttgggttgttggaccctaaattgtgctatctgttggacggaatcctgttcatttacggagtgatcctgaccgcattgttcctgaggagcaagcggtcacggctgctccacagcgattacatgaatatgacaccacgaagaccgggtcctactcgcaaacactaccaaccctacgcacctccccgcgactttgcagcgtaccgatctcgggttaagttttccagatccgcagacgcacccgcttaccaacaagggcagaaccaactctacaatgaacttaatttggggcggagggaagagtacgacgttctggacaaaaggaggggacgagatcccgagatgggcggaaagcctcagcgaaggaagaatccgcaagaggggctttataacgaactccagaaagataaaatggcagaagcctatagtgagattgggatgaagggagaaaggaggaggggtaaaggtcacgatgggttgtaccaaggattgagcacagccactaaagatacctatgatgcgctccacatgcaggccctgccgccaaga

SEQ ID NO: 8675 - DNA, 2781 bp, Artificial Sequence
  Synthetic Polynucloetide
atggccttaccagtgaccgccttgctcctgccgctggccttgctgctccacgccgccaggccggatattcagctgacccagagccacaagtttctgagcaccagcgtgggcgacagagtgtccatcacctgtaaagccagccaggacgtgtacaacgccgtggcctggtatcagcagaagcctggacagagccccaagctgctgatctacagcgccagcagcagatacacaggcgtgcccagcagattcaccggctctggatctggccccgacttcacctttaccatcagctctgtgcaggccgaggacctggccgtgtacttttgtcagcagcacttcagaacccctttcaccttcggcagcggcaccaagctggaaatcaagctcgaggggaaaccaattcccaaccctcttctgggactggattcaaccggcagcggcgaggacctgaagaacgtgttcccacctgaggtggccgtgttcgagcctagcgaggccgagatcagccacacccagaaagccaccctcgtgtgcctggctaccggcttctaccccgaccatgtggaactgtcttggtgggtcaacggcaaagaggtgcacagcggcgtgtctaccgacccccagccactgaaagaacagcccgccctgaacgacagccggtactgcctgagcagcagactgagagtgtccgccaccttctggcagaacccccggaaccacttcagatgccaggtgcagttctacggcctgagcgagaacgacgagtggacccaggacagagccaagcccgtgacccagatcgtgtctgccgaagcctggggcagagccgattgcggatcccagagcttcggcctgctggaccccaagctgtgctacctgctggatggcatcctgttcatctacggcgtgatcctgaccgccctgttcctgaggagtaagaggagcaggctcctgcacagtgactacatgaacatgactccacgccgccccggacccacccgcaagcattaccagccctatgccccaccacgcgacttcgcagcctatcgctccagagtgaagttcagcagaagcgccgacgcccctgcctaccagcagggacagaaccaactgtacaacgagctgaacctgggcagacgggaagagtacgacgtgctggacaagcggagaggcagggaccctgagatgggcggaaagccccagcggagaaagaacccccaggaaggactgtataacgaactccagaaagacaagatggccgaagcctacagcgagatcggcatgaagggcgagcggagaagaggcaagggccacgatggcctgtaccagggcctgagcaccgccaccaaggacacctatgacgccctgcacatgcaggccctgcctccaagaagggccaagcgatctggatctggagcaacaaacttctcactactcaaacaagcaggtgacgtggaggagaatcccgggcctactagtatggactggatttggcgcatccttttccttgtcggcgctgctaccggcgcgcattccttcgaacaggttcagctccagcagtctggacccgagctgaagaaacctggcgagacagtgaagatcagctgcaaggccagcggctaccccttcaccaactacggcatgaactgggtcaagcaggcccctggacagggcctgaaatggatgggctggatcaataccagcaccggcgagagcaccttcgccgacgatttcaagggcagattcgacttcagcctggaaaccagcgccaacaccgcctacctccagatcaacaacctgaagtccgaggatatggctacctacttctgcgccagatgggaagtgtaccacggctacgtgccatattggggccagggcacaaccgtgacagtctcttctacgcgtgagcagaaactgatctcggaagaggatgggagcggcatccagaaccctgatcctgccgtgtaccagctgcgggatagcaagagcagcgacaagagcgtgtgtctgttcaccgacttcgacagccagaccaacgtgtcccagagcaaggactccgacgtgtacatcaccgataagaccgtgctggacatgcggagcatggacttcaagagcaactccgccgtggcctggtccaacaagtccgatttcgcctgcgccaacgccttcaacaacagcattatccccgaggacacattcttcccaagccccgagagcagctgcggtacccagagttttgggttgttggaccctaaattgtgctatctgttggacggaatcctgttcatttacggagtgatcctgaccgcattgttcctgaggagcaagcggtcacggctgctccacagcgattacatgaatatgacaccacgaagaccgggtcctactcgcaaacactaccaaccctacgcacctccccgcgactttgcagcgtaccgatctcgggttaagttttccagatccgcagacgcacccgcttaccaacaagggcagaaccaactctacaatgaacttaatttggggcggagggaagagtacgacgttctggacaaaaggaggggacgagatcccgagatgggcggaaagcctcagcgaaggaagaatccgcaagaggggctttataacgaactccagaaagataaaatggcagaagcctatagtgagattgggatgaagggagaaaggaggaggggtaaaggtcacgatgggttgtaccaaggattgagcacagccactaaagatacctatgatgcgctccacatgcaggccctgccgccaaga

SEQ ID NO: 8676 - DNA, 2664 bp, Artificial Sequence
  Synthetic Polynucloetide
atggccttaccagtgaccgccttgctcctgccgctggccttgctgctccacgccgccaggccggatattcagctgacccagagccacaagtttctgagcaccagcgtgggcgacagagtgtccatcacctgtaaagccagccaggacgtgtacaacgccgtggcctggtatcagcagaagcctggacagagccccaagctgctgatctacagcgccagcagcagatacacaggcgtgcccagcagattcaccggctctggatctggccccgacttcacctttaccatcagctctgtgcaggccgaggacctggccgtgtacttttgtcagcagcacttcagaacccctttcaccttcggcagcggcaccaagctggaaatcaagctcgaggggaaaccaattcccaaccctcttctgggactggattcaaccggcagcggcgaggacctgaagaacgtgttcccacctgaggtggccgtgttcgagcctagcgaggccgagatcagccacacccagaaagccaccctcgtgtgcctggctaccggcttctaccccgaccatgtggaactgtcttggtgggtcaacggcaaagaggtgcacagcggcgtgtctaccgacccccagccactgaaagaacagcccgccctgaacgacagccggtactgcctgagcagcagactgagagtgtccgccaccttctggcagaacccccggaaccacttcagatgccaggtgcagttctacggcctgagcgagaacgacgagtggacccaggacagagccaagcccgtgacccagatcgtgtctgccgaagcctggggcagagccgattgcggatcccagagcttcggcctgctggaccccaagctgtgctacctgctggatggcatcctgttcatctacggcgtgatcctgaccgccctgttcctgagagtgaagttcagcagaagcgccgacgcccctgcctaccagcagggacagaaccaactgtacaacgagctgaacctgggcagacgggaagagtacgacgtgctggacaagcggagaggcagggaccctgagatgggcggaaagccccagcggagaaagaacccccaggaaggactgtataacgaactccagaaagacaagatggccgaagcctacagcgagatcggcatgaagggcgagcggagaagaggcaagggccacgatggcctgtaccagggcctgagcaccgccaccaaggacacctatgacgccctgcacatgcaggccctgcctccaagaagggccaagcgatctggatctggagcaacaaacttctcactactcaaacaagcaggtgacgtggaggagaatcccgggcctactagtatggactggatttggcgcatccttttccttgtcggcgctgctaccggcgcgcattccttcgaacaggttcagctccagcagtctggacccgagctgaagaaacctggcgagacagtgaagatcagctgcaaggccagcggctaccccttcaccaactacggcatgaactgggtcaagcaggcccctggacagggcctgaaatggatgggctggatcaataccagcaccggcgagagcaccttcgccgacgatttcaagggcagattcgacttcagcctggaaaccagcgccaacaccgcctacctccagatcaacaacctgaagtccgaggatatggctacctacttctgcgccagatgggaagtgtaccacggctacgtgccatattggggccagggcacaaccgtgacagtctcttctacgcgtgagcagaaactgatctcggaagaggatctggggagcggcatccagaaccctgatcctgccgtgtaccagctgcgggatagcaagagcagcgacaagagcgtgtgtctgttcaccgacttcgacagccagaccaacgtgtcccagagcaaggactccgacgtgtacatcaccgataagaccgtgctggacatgcggagcatggacttcaagagcaactccgccgtggcctggtccaacaagtccgatttcgcctgcgccaacgccttcaacaacagcattatccccgaggacacattcttcccaagccccgagagcagctgcggtacccagagttttgggttgttggaccctaaattgtgctatctgttggacggaatcctgttcatttacggagtgatcctgaccgcattgttcctgaagagaggccggaagaagctgctgtacatcttcaagcagcctttcatgcggcccgtgcagaccacccaggaagaggacggctgctcctgccggttccccgaggaagaagaaggcggctgcgagctgcgggttaagttttccagatccgcagacgcacccgcttaccaacaagggcagaaccaactctacaatgaacttaatttggggcggagggaagagtacgacgttctggacaaaaggaggggacgagatcccgagatgggcggaaagcctcagcgaaggaagaatccgcaagaggggctttataacgaactccagaaagataaaatggcagaagcctatagtgagattgggatgaagggagaaaggaggaggggtaaaggtcacgatgggttgtaccaaggattgagcacagccactaaagatacctatgatgcgctccacatgcaggccctgccgccaaga

SEQ ID NO: 8677 - DNA, 2790 bp, Artificial Sequence
  Synthetic Polynucloetide
atggccttaccagtgaccgccttgctcctgccgctggccttgctgctccacgccgccaggccggatattcagctgacccagagccacaagtttctgagcaccagcgtgggcgacagagtgtccatcacctgtaaagccagccaggacgtgtacaacgccgtggcctggtatcagcagaagcctggacagagccccaagctgctgatctacagcgccagcagcagatacacaggcgtgcccagcagattcaccggctctggatctggccccgacttcacctttaccatcagctctgtgcaggccgaggacctggccgtgtacttttgtcagcagcacttcagaacccctttcaccttcggcagcggcaccaagctggaaatcaagctcgaggggaaaccaattcccaaccctcttctgggactggattcaaccggcagcggcgaggacctgaagaacgtgttcccacctgaggtggccgtgttcgagcctagcgaggccgagatcagccacacccagaaagccaccctcgtgtgcctggctaccggcttctaccccgaccatgtggaactgtcttggtgggtcaacggcaaagaggtgcacagcggcgtgtctaccgacccccagccactgaaagaacagcccgccctgaacgacagccggtactgcctgagcagcagactgagagtgtccgccaccttctggcagaacccccggaaccacttcagatgccaggtgcagttctacggcctgagcgagaacgacgagtggacccaggacagagccaagcccgtgacccagatcgtgtctgccgaagcctggggcagagccgattgcggatcccagagcttcggcctgctggaccccaagctgtgctacctgctggatggcatcctgttcatctacggcgtgatcctgaccgccctgttcctgaaacggggcagaaagaaactcctgtatatattcaaacaaccatttatgagaccagtacaaactactcaagaggaagatggctgtagctgccgatttccagaagaagaagaaggaggatgtgaactgagagtgaagttcagcagaagcgccgacgcccctgcctaccagcagggacagaaccaactgtacaacgagctgaacctgggcagacgggaagagtacgacgtgctggacaagcggagaggcagggaccctgagatgggcggaaagccccagcggagaaagaacccccaggaaggactgtataacgaactccagaaagacaagatggccgaagcctacagcgagatcggcatgaagggcgagcggagaagaggcaagggccacgatggcctgtaccagggcctgagcaccgccaccaaggacacctatgacgccctgcacatgcaggccctgcctccaagaagggccaagcgatctggatctggagcaacaaacttctcactactcaaacaagcaggtgacgtggaggagaatcccgggcctactagtatggactggatttggcgcatccttttccttgtcggcgctgctaccggcgcgcattccttcgaacaggttcagctccagcagtctggacccgagctgaagaaacctggcgagacagtgaagatcagctgcaaggccagcggctaccccttcaccaactacggcatgaactgggtcaagcaggcccctggacagggcctgaaatggatgggctggatcaataccagcaccggcgagagcaccttcgccgacgatttcaagggcagattcgacttcagcctggaaaccagcgccaacaccgcctacctccagatcaacaacctgaagtccgaggatatggctacctacttctgcgccagatgggaagtgtaccacggctacgtgccatattggggccagggcacaaccgtgacagtctcttctacgcgtgagcagaaactgatctcggaagaggatctggggagcggcatccagaaccctgatcctgccgtgtaccagctgcgggatagcaagagcagcgacaagagcgtgtgtctgttcaccgacttcgacagccagaccaacgtgtcccagagcaaggactccgacgtgtacatcaccgataagaccgtgctggacatgcggagcatggacttcaagagcaactccgccgtggcctggtccaacaagtccgatttcgcctgcgccaacgccttcaacaacagcattatccccgaggacacattcttcccaagccccgagagcagctgcggtacccagagttttgggttgttggaccctaaattgtgctatctgttggacggaatcctgttcatttacggagtgatcctgaccgcattgttcctgaagagaggccggaagaagctgctgtacatcttcaagcagcctttcatgcggcccgtgcagaccacccaggaagaggacggctgctcctgccggttccccgaggaagaagaaggcggctgcgagctgcgggttaagttttccagatccgcagacgcacccgcttaccaacaagggcagaaccaactctacaatgaacttaatttggggcggagggaagagtacgacgttctggacaaaaggaggggacgagatcccgagatgggcggaaagcctcagcgaaggaagaatccgcaagaggggctttataacgaactccagaaagataaaatggcagaagcctatagtgagattgggatgaagggagaaaggaggaggggtaaaggtcacgatgggttgtaccaaggattgagcacagccactaaagatacctatgatgcgctccacatgcaggccctgccgccaaga

SEQ ID NO: 8678 - DNA, 2463 bp, Artificial Sequence
  Synthetic Polynucloetide
atggccttaccagtgaccgccttgctcctgccgctggccttgctgctccacgccgccaggccggatattcagctgacccagagccacaagtttctgagcaccagcgtgggcgacagagtgtccatcacctgtaaagccagccaggacgtgtacaacgccgtggcctggtatcagcagaagcctggacagagccccaagctgctgatctacagcgccagcagcagatacacaggcgtgcccagcagattcaccggctctggatctggccccgacttcacctttaccatcagctctgtgcaggccgaggacctggccgtgtacttttgtcagcagcacttcagaacccctttcaccttcggcagcggcaccaagctggaaatcaagctcgagcagagcttcggcctgctggaccccaagctgtgctacctgctggatggcatcctgttcatctacggcgtgatcctgaccgccctgttcctgagagtgaagttcagcagaagcgccgacgcccctgcctaccagcagggacagaaccaactgtacaacgagctgaacctgggcagacgggaagagtacgacgtgctggacaagcggagaggcagggaccctgagatgggcggaaagccccagcggagaaagaacccccaggaaggactgtataacgaactccagaaagacaagatggccgaagcctacagcgagatcggcatgaagggcgagcggagaagaggcaagggccacgatggcctgtaccagggcctgagcaccgccaccaaggacacctatgacgccctgcacatgcaggccctgcctccaagaagggccaagcgatctggatctggagcaacaaacttctcactactcaaacaagcaggtgacgtggaggagaatcccgggcctactagtatggactggatttggcgcatccttttccttgtcggcgctgctaccggcgcgcattccttcgaacaggttcagctccagcagtctggacccgagctgaagaaacctggcgagacagtgaagatcagctgcaaggccagcggctaccccttcaccaactacggcatgaactgggtcaagcaggcccctggacagggcctgaaatggatgggctggatcaataccagcaccggcgagagcaccttcgccgacgatttcaagggcagattcgacttcagcctggaaaccagcgccaacaccgcctacctccagatcaacaacctgaagtccgaggatatggctacctacttctgcgccagatgggaagtgtaccacggctacgtgccatattggggccagggcacaaccgtgacagtctcttctacgcgtcagagttttgggttgttggaccctaaattgtgctatctgttggacggaatcctgttcatttacggagtgatcctgaccgcattgttcctgcgggttaagttttccagatccgcagacgcacccgcttaccaacaagggcagaaccaactctacaatgaacttaatttggggcggagggaagagtacgacgttctggacaaaaggaggggacgagatcccgagatgggcggaaagcctcagcgaaggaagaatccgcaagaggggctttataacgaactccagaaagataaaatggcagaagcctatagtgagattgggatgaagggagaaaggaggaggggtaaaggtcacgatgggttgtaccaaggattgagcacagccactaaagatacctatgatgcgctccacatgcaggccctgccgccaagacgcgccaagagaagcggatctggcgtgaagcagaccctgaatttcgacctgctgaagctggctggcgacgtggaatccaacccaggcccttctagaggccatatgaccgagtacaagcccacggtgcgcctcgccacccgcgacgacgtccccagggccgtacgcaccctcgccgccgcgttcgccgactaccccgccacgcgccacaccgtcgatccggaccgccacatcgagcgggtcaccgagctgcaagaactcttcctcacgcgcgtcgggctcgacatcggcaaggtgtgggtcgcggacgacggcgccgcggtggcggtctggaccacgccggagagcgtcgaagcgggggcggtgttcgccgagatcggcccgcgcatggccgagttgagcggttcccggctggccgcgcagcaacagatggaaggcctcctggcgccgcaccggcccaaggagcccgcgtggttcctggccaccgtcggcgtctcgcccgaccaccagggcaagggtctgggcagcgccgtcgtgctccccggagtggaggcggccgagcgcgccggggtgcccgccttcctggagacctccgcgccccgcaacctccccttctacgagcggctcggcttcaccgtcaccgccgacgtcgaggtgcccgaaggaccgcgcacctggtgcatgacccgcaagcccggtgcctga

SEQ ID NO: 8679 - DNA, 1935 bp, Artificial Sequence
  Synthetic Polynucloetide
atggccttaccagtgaccgccttgctcctgccgctggccttgctgctccacgccgccaggccggatattcagctgacccagagccacaagtttctgagcaccagcgtgggcgacagagtgtccatcacctgtaaagccagccaggacgtgtacaacgccgtggcctggtatcagcagaagcctggacagagccccaagctgctgatctacagcgccagcagcagatacacaggcgtgcccagcagattcaccggctctggatctggccccgacttcacctttaccatcagctctgtgcaggccgaggacctggccgtgtacttttgtcagcagcacttcagaacccctttcaccttcggcagcggcaccaagctggaaatcaagctcgagggacagcctaaggccaatcctaccgtgacactgttccctccaagcagcgaagaactccaggccaacaaggccacacttgtgtgcctgatctccgacttctaccctggggctgtgacagtggcttggaaggccgatggatctcctgtgaaagccggcgtggaaaccaccaagccatccaagcagagcaacaacaaatacgccgccagctcctacctgagcctgacacctgagcagtggaagtcccacagatcctacagctgccaagtgacccacgaaggcagcaccgtggaaaagacagtggcccctacagagtgcagccccatcaagaccgatgtgattacaatggaccccaaggacaactgctccaaggacgccaacgataccctgctgctccagctgaccaacaccagcgcctactacatgtacttgttgctgctgctgaagtccgtggtgtacttcgccatcatcacatgctgcctgctgcggagaaccgccttctgctgcaacggcgagaagtctagggccaagcgatctggatctggagcaacaaacttctcactactcaaacaagcaggtgacgtggaggagaatcccgggcctactagtatggactggatttggcgcatccttttccttgtcggcgctgctaccggcgcgcattccttcgaacaggttcagctccagcagtctggacccgagctgaagaaacctggcgagacagtgaagatcagctgcaaggccagcggctaccccttcaccaactacggcatgaactgggtcaagcaggcccctggacagggcctgaaatggatgggctggatcaataccagcaccggcgagagcaccttcgccgacgatttcaagggcagattcgacttcagcctggaaaccagcgccaacaccgcctacctccagatcaacaacctgaagtccgaggatatggctacctacttctgcgccagatgggaagtgtaccacggctacgtgccatattggggccagggcacaaccgtgacagtctcttctacgcgtgcctctacaaagggaccctccgtgtttcctctggctcccagcagcaagtctacaagcggaggaacagccgctctgggctgcctggtcaaggattactttcccgagcctgtgaccgtgtcctggaatagcggagcactgacaagcggcgtgcacacctttccagccgtgctgcaaagcagcggcctgtactctctgagcagcgtggtcacagtgcctagctctagcctgggcacccagacctacatctgcaatgtgaaccacaagcctagcaacaccaaggtggacaagagagtggaacccaagagctgtgaagtgaaaaccgactccaccgaccacgtgaagcccaaagagacagagaacaccaagcagcccagcaagagctgccacaagcccaaggccatcgtgcacaccgagaaagtgaacatgatgagcctgaccgtgctgggcctgcggatgctgttcgccaaaaccgtggccgtgaacttcctgctgaccgccaagctgttcttcctc

SEQ ID NO: 8680 - DNA, 1869 bp, Artificial Sequence
  Synthetic Polynucloetide
atggccttaccagtgaccgccttgctcctgccgctggccttgctgctccacgccgccaggccggatattcagctgacccagagccacaagtttctgagcaccagcgtgggcgacagagtgtccatcacctgtaaagccagccaggacgtgtacaacgccgtggcctggtatcagcagaagcctggacagagccccaagctgctgatctacagcgccagcagcagatacacaggcgtgcccagcagattcaccggctctggatctggccccgacttcacctttaccatcagctctgtgcaggccgaggacctggccgtgtacttttgtcagcagcacttcagaacccctttcaccttcggcagcggcaccaagctggaaatcaagctcgagggacagcctaaggccaatcctaccgtgacactgttccctccaagcagcgaagaactccaggccaacaaggccacacttgtgtgcctgatctccgacttctaccctggggctgtgacagtggcttggaaggccgatggatctcctgtgaaagccggcgtggaaaccaccaagccatccaagcagagcaacaacaaatacgccgccagctcctacctgagcctgacacctgagcagtggaagtcccacagatcctacagctgccaagtgacccacgaaggcagcaccgtggaaaagacagtggcccctacagagtgcagcggcagagccgattgcggcatcaccagcgccagctaccaccagggcgtgctgagcgccaccatcctgtacgagatcctgctgggcaaggccaccctgtacgccgtgctggtgtctgccctggtgctgatggctatggtcaagcggaaggacagccggggaagggccaagcgatctggatctggagcaacaaacttctcactactcaaacaagcaggtgacgtggaggagaatcccgggcctactagtatggactggatttggcgcatccttttccttgtcggcgctgctaccggcgcgcattccttcgaacaggttcagctccagcagtctggacccgagctgaagaaacctggcgagacagtgaagatcagctgcaaggccagcggctaccccttcaccaactacggcatgaactgggtcaagcaggcccctggacagggcctgaaatggatgggctggatcaataccagcaccggcgagagcaccttcgccgacgatttcaagggcagattcgacttcagcctggaaaccagcgccaacaccgcctacctccagatcaacaacctgaagtccgaggatatggctacctacttctgcgccagatgggaagtgtaccacggctacgtgccatattggggccagggcacaaccgtgacagtctcttctacgcgtgcctctacaaagggaccctccgtgtttcctctggctcccagcagcaagtctacaagcggaggaacagccgctctgggctgcctggtcaaggattactttcccgagcctgtgaccgtgtcctggaatagcggagcactgacaagcggcgtgcacacctttccagccgtgctgcaaagcagcggcctgtactctctgagcagcgtggtcacagtgcctagctctagcctgggcacccagacctacatctgcaatgtgaaccacaagcctagcaacaccaaggtggacaagagagtggaacccaagagctgtatccccgaggacacattcttcccaagcagcgacgtgccctgcgacgtgaagctggtggaaaagagcttcgagacagacaccaacctgaacttccagaacctgagcgtgatcggcttcagaatcctgctgctgaaagtggccggctttaacctgctgatgaccctgcggctgtggtccagc

SEQ ID NO: 8681 - DNA, 1869 bp, Artificial Sequence
  Synthetic Polynucloetide
atggccttaccagtgaccgccttgctcctgccgctggccttgctgctccacgccgccaggccggatattcagctgacccagagccacaagtttctgagcaccagcgtgggcgacagagtgtccatcacctgtaaagccagccaggacgtgtacaacgccgtggcctggtatcagcagaagcctggacagagccccaagctgctgatctacagcgccagcagcagatacacaggcgtgcccagcagattcaccggctctggatctggccccgacttcacctttaccatcagctctgtgcaggccgaggacctggccgtgtacttttgtcagcagcacttcagaacccctttcaccttcggcagcggcaccaagctggaaatcaagctcgagggacagcctaaggccaatcctaccgtgacactgttccctccaagcagcgaagaactccaggccaacaaggccacacttgtgtgcctgatctccgacttctaccctggggctgtgacagtggcttggaaggccgatggatctcctgtgaaagccggcgtggaaaccaccaagccatccaagcagagcaacaacaaatacgccgccagctcctacctgagcctgacacctgagcagtggaagtcccacagatcctacagctgccaagtgacccacgaaggcagcaccgtggaaaagacagtggcccctacagagtgcagcggcagagccgattgcggctttaccagcgagagctaccagcagggcgtgctgagcgccaccatcctgtacgagatcctgctgggcaaggccaccctgtacgccgtgctggtgtctgccctggtgctgatggctatggtcaagcggaaggacagccggggaagggccaagcgatctggatctggagcaacaaacttctcactactcaaacaagcaggtgacgtggaggagaatcccgggcctactagtatggactggatttggcgcatccttttccttgtcggcgctgctaccggcgcgcattccttcgaacaggttcagctccagcagtctggacccgagctgaagaaacctggcgagacagtgaagatcagctgcaaggccagcggctaccccttcaccaactacggcatgaactgggtcaagcaggcccctggacagggcctgaaatggatgggctggatcaataccagcaccggcgagagcaccttcgccgacgatttcaagggcagattcgacttcagcctggaaaccagcgccaacaccgcctacctccagatcaacaacctgaagtccgaggatatggctacctacttctgcgccagatgggaagtgtaccacggctacgtgccatattggggccagggcacaaccgtgacagtctcttctacgcgtgcctctacaaagggaccctccgtgtttcctctggctcccagcagcaagtctacaagcggaggaacagccgctctgggctgcctggtcaaggattactttcccgagcctgtgaccgtgtcctggaatagcggagcactgacaagcggcgtgcacacctttccagccgtgctgcaaagcagcggcctgtactctctgagcagcgtggtcacagtgcctagctctagcctgggcacccagacctacatctgcaatgtgaaccacaagcctagcaacaccaaggtggacaagagagtggaacccaagagctgtatccccgaggacacattcttcccaagccccgagagcagctgcgacgtgaagctggtggaaaagagcttcgagacagacaccaacctgaacttccagaacctgagcgtgatcggcttcagaatcctgctgctgaaagtggccggctttaacctgctgatgaccctgcggctgtggtccagc

SEQ ID NO: 8682 - DNA, 1347 bp, Artificial Sequence
  Synthetic Polynucloetide
atggccttaccagtgaccgccttgctcctgccgctggccttgctgctccacgccgccaggccggatattcagctgacccagagccacaagtttctgagcaccagcgtgggcgacagagtgtccatcacctgtaaagccagccaggacgtgtacaacgccgtggcctggtatcagcagaagcctggacagagccccaagctgctgatctacagcgccagcagcagatacacaggcgtgcccagcagattcaccggctctggatctggccccgacttcacctttaccatcagctctgtgcaggccgaggacctggccgtgtacttttgtcagcagcacttcagaacccctttcaccttcggcagcggcaccaagctggaaatcaagggcggaggcggaagtggaggcggaggatctggcggcggaggctctcaggttcagctccagcagtctggacccgagctgaagaaacctggcgagacagtgaagatcagctgcaaggccagcggctaccccttcaccaactacggcatgaactgggtcaagcaggcccctggacagggcctgaaatggatgggctggatcaataccagcaccggcgagagcaccttcgccgacgatttcaagggcagattcgacttcagcctggaaaccagcgccaacaccgcctacctccagatcaacaacctgaagtccgaggatatggctacctacttctgcgccagatgggaagtgtaccacggctacgtgccatattggggccagggcacaaccgtgacagtctcttctacgcgtgacggtaacgaggagatgggaggaatcactcaaaccccttacaaagtctcaatttcaggaacaactgttatccttacatgtccccagtatcctggcagcgagatcctttggcagcataacgacaagaatatagggggagatgaagacgataagaatatcggatctgacgaggatcacttgagcctgaaagagttctccgagcttgaacaaagcggatattatgtgtgctatccgcgcgggtcaaagccggaagacgctaacttttacctttatctccgagccagagtgtgcgaaaattgcatggaaatggacgttatgtccgttgctacaatagttatcgtagatatatgcatcacgggtggactgcttctgctggtttattattggtccaagaatagaaaggccaaagctaaacccgtgaccagaggcgctggcgcaggcggaaggcaaaggggacaaaacaaagaacggccaccaccagtgccaaatccagattatgagcctattcggaaaggacagagggacctgtactctggcctgaatcagagaagaatc

SEQ ID NO: 8683 - DNA, 1242 bp, Artificial Sequence
  Synthetic Polynucloetide
atggccttaccagtgaccgccttgctcctgccgctggccttgctgctccacgccgccaggccggatattcagctgacccagagccacaagtttctgagcaccagcgtgggcgacagagtgtccatcacctgtaaagccagccaggacgtgtacaacgccgtggcctggtatcagcagaagcctggacagagccccaagctgctgatctacagcgccagcagcagatacacaggcgtgcccagcagattcaccggctctggatctggccccgacttcacctttaccatcagctctgtgcaggccgaggacctggccgtgtacttttgtcagcagcacttcagaacccctttcaccttcggcagcggcaccaagctggaaatcaagggcggaggcggaagtggaggcggaggatctggcggcggaggctctcaggttcagctccagcagtctggacccgagctgaagaaacctggcgagacagtgaagatcagctgcaaggccagcggctaccccttcaccaactacggcatgaactgggtcaagcaggcccctggacagggcctgaaatggatgggctggatcaataccagcaccggcgagagcaccttcgccgacgatttcaagggcagattcgacttcagcctggaaaccagcgccaacaccgcctacctccagatcaacaacctgaagtccgaggatatggctacctacttctgcgccagatgggaagtgtaccacggctacgtgccatattggggccagggcacaaccgtgacagtctcttctacgcgtttcaagatccccatcgaggaactggaagatcgggtgttcgtgaactgcaacacctctatcacctgggtggaaggcaccgtgggaacactgctgagcgacatcaccagactggacctcggcaagcggattctggaccctcggggcatctacagatgcaacggcaccgacatctacaaggacaaagaaagcaccgtgcaggtccactacagaatgtgccagtcctgcgtggaactggaccctgctacagtggccggcatcatcgtgaccgatgtgatcgctactctgctgctggctctgggagtgttctgcttcgccggacacgaaacaggcagactgtctggcgctgccgatacacaggccctgctgagaaacgaccaagtgtatcagcccctgcgcgacagagatgatgcccagtattctcacctcggcggcaactgggctagaaacaag

SEQ ID NO: 8684 - DNA, 1272 bp, Artificial Sequence
  Synthetic Polynucloetide
atggccttaccagtgaccgccttgctcctgccgctggccttgctgctccacgccgccaggccggatattcagctgacccagagccacaagtttctgagcaccagcgtgggcgacagagtgtccatcacctgtaaagccagccaggacgtgtacaacgccgtggcctggtatcagcagaagcctggacagagccccaagctgctgatctacagcgccagcagcagatacacaggcgtgcccagcagattcaccggctctggatctggccccgacttcacctttaccatcagctctgtgcaggccgaggacctggccgtgtacttttgtcagcagcacttcagaacccctttcaccttcggcagcggcaccaagctggaaatcaagggcggaggcggaagtggaggcggaggatctggcggcggaggctctcaggttcagctccagcagtctggacccgagctgaagaaacctggcgagacagtgaagatcagctgcaaggccagcggctaccccttcaccaactacggcatgaactgggtcaagcaggcccctggacagggcctgaaatggatgggctggatcaataccagcaccggcgagagcaccttcgccgacgatttcaagggcagattcgacttcagcctggaaaccagcgccaacaccgcctacctccagatcaacaacctgaagtccgaggatatggctacctacttctgcgccagatgggaagtgtaccacggctacgtgccatattggggccagggcacaaccgtgacagtctcttctacgcgtcagagcatcaagggcaaccacctggtcaaggtgtacgactaccaagaggacggcagcgtgctgctgacatgtgatgccgaggccaagaacatcacctggtttaaggacggcaagatgatcggcttcctgaccgaggacaagaagaagtggaacctgggcagcaacgctaaggaccccagaggcatgtatcagtgcaagggcagccagaacaagagcaagcccctccaggtgtactaccggatgtgccagaactgcatcgagctgaacgccgctaccatcagcggctttctgttcgccgagatcgtgtccatcttcgtgctggccgtgggcgtgtactttatcgctggacaggatggcgtgcggcagagcagagcttccgataagcaaaccctgctgcctaacgaccagctgtaccagcctctgaaggacagagaggacgaccagtacagccacctccagggcaatcagctgagaagaaac

SEQ ID NO: 8685 - DNA, 1221 bp, Artificial Sequence
  Synthetic Polynucloetide
atggccttaccagtgaccgccttgctcctgccgctggccttgctgctccacgccgccaggccggatattcagctgacccagagccacaagtttctgagcaccagcgtgggcgacagagtgtccatcacctgtaaagccagccaggacgtgtacaacgccgtggcctggtatcagcagaagcctggacagagccccaagctgctgatctacagcgccagcagcagatacacaggcgtgcccagcagattcaccggctctggatctggccccgacttcacctttaccatcagctctgtgcaggccgaggacctggccgtgtacttttgtcagcagcacttcagaacccctttcaccttcggcagcggcaccaagctggaaatcaagggcggaggcggaagtggaggcggaggatctggcggcggaggctctcaggttcagctccagcagtctggacccgagctgaagaaacctggcgagacagtgaagatcagctgcaaggccagcggctaccccttcaccaactacggcatgaactgggtcaagcaggcccctggacagggcctgaaatggatgggctggatcaataccagcaccggcgagagcaccttcgccgacgatttcaagggcagattcgacttcagcctggaaaccagcgccaacaccgcctacctccagatcaacaacctgaagtccgaggatatggctacctacttctgcgccagatgggaagtgtaccacggctacgtgccatattggggccagggcacaaccgtgacagtctcttctacgcgtcagagttttgggttgttggaccctaaattgtgctatctgttggacggaatcctgttcatttacggagtgatcctgaccgcattgttcctgcgggttaagttttccagatccgcagacgcacccgcttaccaacaagggcagaaccaactctacaatgaacttaatttggggcggagggaagagtacgacgttctggacaaaaggaggggacgagatcccgagatgggcggaaagcctcagcgaaggaagaatccgcaagaggggctttataacgaactccagaaagataaaatggcagaagcctatagtgagattgggatgaagggagaaaggaggaggggtaaaggtcacgatgggttgtaccaaggattgagcacagccactaaagatacctatgatgcgctccacatgcaggccctgccgccaaga

SEQ ID NO: 8686 - DNA, 1347 bp, Artificial Sequence
  Synthetic Polynucloetide
atggccttaccagtgaccgccttgctcctgccgctggccttgctgctccacgccgccaggccgcaggttcagctccagcagtctggacccgagctgaagaaacctggcgagacagtgaagatcagctgcaaggccagcggctaccccttcaccaactacggcatgaactgggtcaagcaggcccctggacagggcctgaaatggatgggctggatcaataccagcaccggcgagagcaccttcgccgacgatttcaagggcagattcgacttcagcctggaaaccagcgccaacaccgcctacctccagatcaacaacctgaagtccgaggatatggctacctacttctgcgccagatgggaagtgtaccacggctacgtgccatattggggccagggcacaaccgtgacagtctcttctggcggaggcggaagtggaggcggaggatctggcggcggaggctctgatattcagctgacccagagccacaagtttctgagcaccagcgtgggcgacagagtgtccatcacctgtaaagccagccaggacgtgtacaacgccgtggcctggtatcagcagaagcctggacagagccccaagctgctgatctacagcgccagcagcagatacacaggcgtgcccagcagattcaccggctctggatctggccccgacttcacctttaccatcagctctgtgcaggccgaggacctggccgtgtacttttgtcagcagcacttcagaacccctttcaccttcggcagcggcaccaagctggaaatcaagacgcgtgacggtaacgaggagatgggaggaatcactcaaaccccttacaaagtctcaatttcaggaacaactgttatccttacatgtccccagtatcctggcagcgagatcctttggcagcataacgacaagaatatagggggagatgaagacgataagaatatcggatctgacgaggatcacttgagcctgaaagagttctccgagcttgaacaaagcggatattatgtgtgctatccgcgcgggtcaaagccggaagacgctaacttttacctttatctccgagccagagtgtgcgaaaattgcatggaaatggacgttatgtccgttgctacaatagttatcgtagatatatgcatcacgggtggactgcttctgctggtttattattggtccaagaatagaaaggccaaagctaaacccgtgaccagaggcgctggcgcaggcggaaggcaaaggggacaaaacaaagaacggccaccaccagtgccaaatccagattatgagcctattcggaaaggacagagggacctgtactctggcctgaatcagagaagaatc

SEQ ID NO: 8687 - DNA, 1242 bp, Artificial Sequence
  Synthetic Polynucloetide
atggccttaccagtgaccgccttgctcctgccgctggccttgctgctccacgccgccaggccgcaggttcagctccagcagtctggacccgagctgaagaaacctggcgagacagtgaagatcagctgcaaggccagcggctaccccttcaccaactacggcatgaactgggtcaagcaggcccctggacagggcctgaaatggatgggctggatcaataccagcaccggcgagagcaccttcgccgacgatttcaagggcagattcgacttcagcctggaaaccagcgccaacaccgcctacctccagatcaacaacctgaagtccgaggatatggctacctacttctgcgccagatgggaagtgtaccacggctacgtgccatattggggccagggcacaaccgtgacagtctcttctggcggaggcggaagtggaggcggaggatctggcggcggaggctctgatattcagctgacccagagccacaagtttctgagcaccagcgtgggcgacagagtgtccatcacctgtaaagccagccaggacgtgtacaacgccgtggcctggtatcagcagaagcctggacagagccccaagctgctgatctacagcgccagcagcagatacacaggcgtgcccagcagattcaccggctctggatctggccccgacttcacctttaccatcagctctgtgcaggccgaggacctggccgtgtacttttgtcagcagcacttcagaacccctttcaccttcggcagcggcaccaagctggaaatcaagacgcgtttcaagatccccatcgaggaactggaagatcgggtgttcgtgaactgcaacacctctatcacctgggtggaaggcaccgtgggaacactgctgagcgacatcaccagactggacctcggcaagcggattctggaccctcggggcatctacagatgcaacggcaccgacatctacaaggacaaagaaagcaccgtgcaggtccactacagaatgtgccagtcctgcgtggaactggaccctgctacagtggccggcatcatcgtgaccgatgtgatcgctactctgctgctggctctgggagtgttctgcttcgccggacacgaaacaggcagactgtctggcgctgccgatacacaggccctgctgagaaacgaccaagtgtatcagcccctgcgcgacagagatgatgcccagtattctcacctcggcggcaactgggctagaaacaag

SEQ ID NO: 8688 - DNA, 1272 bp, Artificial Sequence
  Synthetic Polynucloetide
atggccttaccagtgaccgccttgctcctgccgctggccttgctgctccacgccgccaggccgcaggttcagctccagcagtctggacccgagctgaagaaacctggcgagacagtgaagatcagctgcaaggccagcggctaccccttcaccaactacggcatgaactgggtcaagcaggcccctggacagggcctgaaatggatgggctggatcaataccagcaccggcgagagcaccttcgccgacgatttcaagggcagattcgacttcagcctggaaaccagcgccaacaccgcctacctccagatcaacaacctgaagtccgaggatatggctacctacttctgcgccagatgggaagtgtaccacggctacgtgccatattggggccagggcacaaccgtgacagtctcttctggcggaggcggaagtggaggcggaggatctggcggcggaggctctgatattcagctgacccagagccacaagtttctgagcaccagcgtgggcgacagagtgtccatcacctgtaaagccagccaggacgtgtacaacgccgtggcctggtatcagcagaagcctggacagagccccaagctgctgatctacagcgccagcagcagatacacaggcgtgcccagcagattcaccggctctggatctggccccgacttcacctttaccatcagctctgtgcaggccgaggacctggccgtgtacttttgtcagcagcacttcagaacccctttcaccttcggcagcggcaccaagctggaaatcaagacgcgtcagagcatcaagggcaaccacctggtcaaggtgtacgactaccaagaggacggcagcgtgctgctgacatgtgatgccgaggccaagaacatcacctggtttaaggacggcaagatgatcggcttcctgaccgaggacaagaagaagtggaacctgggcagcaacgctaaggaccccagaggcatgtatcagtgcaagggcagccagaacaagagcaagcccctccaggtgtactaccggatgtgccagaactgcatcgagctgaacgccgctaccatcagcggctttctgttcgccgagatcgtgtccatcttcgtgctggccgtgggcgtgtactttatcgctggacaggatggcgtgcggcagagcagagcttccgataagcaaaccctgctgcctaacgaccagctgtaccagcctctgaaggacagagaggacgaccagtacagccacctccagggcaatcagctgagaagaaac

SEQ ID NO: 8689 - DNA, 1221 bp, Artificial Sequence
  Synthetic Polynucloetide
atggccttaccagtgaccgccttgctcctgccgctggccttgctgctccacgccgccaggccgcaggttcagctccagcagtctggacccgagctgaagaaacctggcgagacagtgaagatcagctgcaaggccagcggctaccccttcaccaactacggcatgaactgggtcaagcaggcccctggacagggcctgaaatggatgggctggatcaataccagcaccggcgagagcaccttcgccgacgatttcaagggcagattcgacttcagcctggaaaccagcgccaacaccgcctacctccagatcaacaacctgaagtccgaggatatggctacctacttctgcgccagatgggaagtgtaccacggctacgtgccatattggggccagggcacaaccgtgacagtctcttctggcggaggcggaagtggaggcggaggatctggcggcggaggctctgatattcagctgacccagagccacaagtttctgagcaccagcgtgggcgacagagtgtccatcacctgtaaagccagccaggacgtgtacaacgccgtggcctggtatcagcagaagcctggacagagccccaagctgctgatctacagcgccagcagcagatacacaggcgtgcccagcagattcaccggctctggatctggccccgacttcacctttaccatcagctctgtgcaggccgaggacctggccgtgtacttttgtcagcagcacttcagaacccctttcaccttcggcagcggcaccaagctggaaatcaagacgcgtcagagttttgggttgttggaccctaaattgtgctatctgttggacggaatcctgttcatttacggagtgatcctgaccgcattgttcctgcgggttaagttttccagatccgcagacgcacccgcttaccaacaagggcagaaccaactctacaatgaacttaatttggggcggagggaagagtacgacgttctggacaaaaggaggggacgagatcccgagatgggcggaaagcctcagcgaaggaagaatccgcaagaggggctttataacgaactccagaaagataaaatggcagaagcctatagtgagattgggatgaagggagaaaggaggaggggtaaaggtcacgatgggttgtaccaaggattgagcacagccactaaagatacctatgatgcgctccacatgcaggccctgccgccaaga

SEQ ID NO: 8690 - DNA, 1923 bp, Artificial Sequence
  Synthetic Polynucloetide
atggccttaccagtgaccgccttgctcctgccgctggccttgctgctccacgccgccaggccggatattcagctgacccagagccacaagtttctgagcaccagcgtgggcgacagagtgtccatcacctgtaaagccagccaggacgtgtacaacgccgtggcctggtatcagcagaagcctggacagagccccaagctgctgatctacagcgccagcagcagatacacaggcgtgcccagcagattcaccggctctggatctggccccgacttcacctttaccatcagctctgtgcaggccgaggacctggccgtgtacttttgtcagcagcacttcagaacccctttcaccttcggcagcggcaccaagctggaaatcaagggcggaggcggaagtggaggcggaggatctggcggcggaggctctcaggttcagctccagcagtctggacccgagctgaagaaacctggcgagacagtgaagatcagctgcaaggccagcggctaccccttcaccaactacggcatgaactgggtcaagcaggcccctggacagggcctgaaatggatgggctggatcaataccagcaccggcgagagcaccttcgccgacgatttcaagggcagattcgacttcagcctggaaaccagcgccaacaccgcctacctccagatcaacaacctgaagtccgaggatatggctacctacttctgcgccagatgggaagtgtaccacggctacgtgccatattggggccagggcacaaccgtgacagtctcttctacgcgtgggagcggcatccagaaccctgatcctgccgtgtaccagctgcgggatagcaagagcagcgacaagagcgtgtgtctgttcaccgacttcgacagccagaccaacgtgtcccagagcaaggactccgacgtgtacatcaccgataagaccgtgctggacatgcggagcatggacttcaagagcaactccgccgtggcctggtccaacaagtccgatttcgcctgcgccaacgccttcaacaacagcattatccccgaggacacattcttcccaagccccgagagcagctgcgacgtgaagctggtggaaaagagcttcgagacagacaccaacctgaacttccagaacctgagcgtgatcggcttcagaatcctgctgctgaaagtggccggctttaacctgctgatgaccctgcggctgtggtccagccgcgccaagagaagcggatctggcgtgaagcagaccctgaatttcgacctgctgaagctggctggcgacgtggaatccaacccaggcccttctagaggccatatgaccgagtacaagcccacggtgcgcctcgccacccgcgacgacgtccccagggccgtacgcaccctcgccgccgcgttcgccgactaccccgccacgcgccacaccgtcgatccggaccgccacatcgagcgggtcaccgagctgcaagaactcttcctcacgcgcgtcgggctcgacatcggcaaggtgtgggtcgcggacgacggcgccgcggtggcggtctggaccacgccggagagcgtcgaagcgggggcggtgttcgccgagatcggcccgcgcatggccgagttgagcggttcccggctggccgcgcagcaacagatggaaggcctcctggcgccgcaccggcccaaggagcccgcgtggttcctggccaccgtcggcgtctcgcccgaccaccagggcaagggtctgggcagcgccgtcgtgctccccggagtggaggcggccgagcgcgccggggtgcccgccttcctggagacctccgcgccccgcaacctccccttctacgagcggctcggcttcaccgtcaccgccgacgtcgaggtgcccgaaggaccgcgcacctggtgcatgacccgcaagcccggtgcctga

SEQ ID NO: 8691 - DNA, 2019 bp, Artificial Sequence
  Synthetic Polynucloetide
atggccttaccagtgaccgccttgctcctgccgctggccttgctgctccacgccgccaggccggatattcagctgacccagagccacaagtttctgagcaccagcgtgggcgacagagtgtccatcacctgtaaagccagccaggacgtgtacaacgccgtggcctggtatcagcagaagcctggacagagccccaagctgctgatctacagcgccagcagcagatacacaggcgtgcccagcagattcaccggctctggatctggccccgacttcacctttaccatcagctctgtgcaggccgaggacctggccgtgtacttttgtcagcagcacttcagaacccctttcaccttcggcagcggcaccaagctggaaatcaagggcggaggcggaagtggaggcggaggatctggcggcggaggctctcaggttcagctccagcagtctggacccgagctgaagaaacctggcgagacagtgaagatcagctgcaaggccagcggctaccccttcaccaactacggcatgaactgggtcaagcaggcccctggacagggcctgaaatggatgggctggatcaataccagcaccggcgagagcaccttcgccgacgatttcaagggcagattcgacttcagcctggaaaccagcgccaacaccgcctacctccagatcaacaacctgaagtccgaggatatggctacctacttctgcgccagatgggaagtgtaccacggctacgtgccatattggggccagggcacaaccgtgacagtctcttctctcgaggacctgaagaacgtgttcccacctgaggtggccgtgttcgagcctagcgaggccgagatcagccacacccagaaagccaccctcgtgtgcctggctaccggcttctaccccgaccatgtggaactgtcttggtgggtcaacggcaaagaggtgcacagcggcgtgtctaccgacccccagccactgaaagaacagcccgccctgaacgacagccggtactgcctgagcagcagactgagagtgtccgccaccttctggcagaacccccggaaccacttcagatgccaggtgcagttctacggcctgagcgagaacgacgagtggacccaggacagagccaagcccgtgacccagatcgtgtctgccgaagcctggggcagagccgattgcggctttaccagcgagagctaccagcagggcgtgctgagcgccaccatcctgtacgagatcctgctgggcaaggccaccctgtacgccgtgctggtgtctgccctggtgctgatggctatggtcaagcggaaggacagccggggaagggccaagcgatctggatctggagcaacaaacttctcactactcaaacaagcaggtgacgtggaggagaatcccgggcctactagaggccatatgaccgagtacaagcccacggtgcgcctcgccacccgcgacgacgtccccagggccgtacgcaccctcgccgccgcgttcgccgactaccccgccacgcgccacaccgtcgatccggaccgccacatcgagcgggtcaccgagctgcaagaactcttcctcacgcgcgtcgggctcgacatcggcaaggtgtgggtcgcggacgacggcgccgcggtggcggtctggaccacgccggagagcgtcgaagcgggggcggtgttcgccgagatcggcccgcgcatggccgagttgagcggttcccggctggccgcgcagcaacagatggaaggcctcctggcgccgcaccggcccaaggagcccgcgtggttcctggccaccgtcggcgtctcgcccgaccaccagggcaagggtctgggcagcgccgtcgtgctccccggagtggaggcggccgagcgcgccggggtgcccgccttcctggagacctccgcgccccgcaacctccccttctacgagcggctcggcttcaccgtcaccgccgacgtcgaggtgcccgaaggaccgcgcacctggtgcatgacccgcaagcccggtgcctga

SEQ ID NO: 8692 - DNA, 2169 bp, Artificial Sequence
  Synthetic Polynucloetide
atggccttaccagtgaccgccttgctcctgccgctggccttgctgctccacgccgccaggccggatattcagctgacccagagccacaagtttctgagcaccagcgtgggcgacagagtgtccatcacctgtaaagccagccaggacgtgtacaacgccgtggcctggtatcagcagaagcctggacagagccccaagctgctgatctacagcgccagcagcagatacacaggcgtgcccagcagattcaccggctctggatctggccccgacttcacctttaccatcagctctgtgcaggccgaggacctggccgtgtacttttgtcagcagcacttcagaacccctttcaccttcggcagcggcaccaagctggaaatcaagggcggaggcggaagtggaggcggaggatctggcggcggaggctctcaggttcagctccagcagtctggacccgagctgaagaaacctggcgagacagtgaagatcagctgcaaggccagcggctaccccttcaccaactacggcatgaactgggtcaagcaggcccctggacagggcctgaaatggatgggctggatcaataccagcaccggcgagagcaccttcgccgacgatttcaagggcagattcgacttcagcctggaaaccagcgccaacaccgcctacctccagatcaacaacctgaagtccgaggatatggctacctacttctgcgccagatgggaagtgtaccacggctacgtgccatattggggccagggcacaaccgtgacagtctcttctacgcgtgagcagaaactgatctcggaagaggatctggggagcggcaccccattcccttctctggcccctcccatcatgctgctggtggacggcaagcagcagatggtggtcgtgtgcctggtgctggatgtggccccacctggactggacagccccatctggtttagcgccggcaatggctctgccctggacgcctttacctacggcccaagccctgccaccgatggcacctggacaaatctggcccacctgagcctgcccagcgaggaactggcttcttgggagcctctcgtgtgccacacaggacctggcgctgagggacacagcagatccacccagcctatgcacctgtctggcgaggccagcaccgccagaacctgtcctcaggaacctctgagaggcacccctggcggagcactgtggctgggagtgctgagactgctgctgttcaagctgctgctgtttgacctgctgctgacctgctcctgtctgtgcgatcctgccggccctctgccttctcctgccaccaccacaagactgagagccctgggcagccacagactgcaccctgccacagagacaggcggcagagaggccacaagcagccctagaccccagcccagagacagaagatggggcgataccccccctggcagaaagcctggatctccagtccgcgccaagagaagcggatctggcgtgaagcagaccctgaatttcgacctgctgaagctggctggcgacgtggaatccaacccaggcccttctagatctagaggccatatgaccgagtacaagcccacggtgcgcctcgccacccgcgacgacgtccccagggccgtacgcaccctcgccgccgcgttcgccgactaccccgccacgcgccacaccgtcgatccggaccgccacatcgagcgggtcaccgagctgcaagaactcttcctcacgcgcgtcgggctcgacatcggcaaggtgtgggtcgcggacgacggcgccgcggtggcggtctggaccacgccggagagcgtcgaagcgggggcggtgttcgccgagatcggcccgcgcatggccgagttgagcggttcccggctggccgcgcagcaacagatggaaggcctcctggcgccgcaccggcccaaggagcccgcgtggttcctggccaccgtcggcgtctcgcccgaccaccagggcaagggtctgggcagcgccgtcgtgctccccggagtggaggcggccgagcgcgccggggtgcccgccttcctggagacctccgcgccccgcaacctccccttctacgagcggctcggcttcaccgtcaccgccgacgtcgaggtgcccgaaggaccgcgcacctggtgcatgacccgcaagcccggtgcctga

SEQ ID NO: 8693 - DNA, 1617 bp, Artificial Sequence
  Synthetic Polynucloetide
atggccttaccagtgaccgccttgctcctgccgctggccttgctgctccacgccgccaggccggatattcagctgacccagagccacaagtttctgagcaccagcgtgggcgacagagtgtccatcacctgtaaagccagccaggacgtgtacaacgccgtggcctggtatcagcagaagcctggacagagccccaagctgctgatctacagcgccagcagcagatacacaggcgtgcccagcagattcaccggctctggatctggccccgacttcacctttaccatcagctctgtgcaggccgaggacctggccgtgtacttttgtcagcagcacttcagaacccctttcaccttcggcagcggcaccaagctggaaatcaagctcgaggacctgaagaacgtgttcccacctgaggtggccgtgttcgagcctagcgaggccgagatcagccacacccagaaagccaccctcgtgtgcctggctaccggcttctaccccgaccatgtggaactgtcttggtgggtcaacggcaaagaggtgcacagcggcgtgtctaccgacccccagccactgaaagaacagcccgccctgaacgacagccggtactgcctgagcagcagactgagagtgtccgccaccttctggcagaacccccggaaccacttcagatgccaggtgcagttctacggcctgagcgagaacgacgagtggacccaggacagagccaagcccgtgacccagatcgtgtctgccgaagcctggggcagagccgattgcggctttaccagcgagagctaccagcagggcgtgctgagcgccaccatcctgtacgagatcctgctgggcaaggccaccctgtacgccgtgctggtgtctgccctggtgctgatggctatggtcaagcggaaggacagccggggaagggccaagcgatctggatctggagcaacaaacttctcactactcaaacaagcaggtgacgtggaggagaatcccgggcctactagaggccatatgaccgagtacaagcccacggtgcgcctcgccacccgcgacgacgtccccagggccgtacgcaccctcgccgccgcgttcgccgactaccccgccacgcgccacaccgtcgatccggaccgccacatcgagcgggtcaccgagctgcaagaactcttcctcacgcgcgtcgggctcgacatcggcaaggtgtgggtcgcggacgacggcgccgcggtggcggtctggaccacgccggagagcgtcgaagcgggggcggtgttcgccgagatcggcccgcgcatggccgagttgagcggttcccggctggccgcgcagcaacagatggaaggcctcctggcgccgcaccggcccaaggagcccgcgtggttcctggccaccgtcggcgtctcgcccgaccaccagggcaagggtctgggcagcgccgtcgtgctccccggagtggaggcggccgagcgcgccggggtgcccgccttcctggagacctccgcgccccgcaacctccccttctacgagcggctcggcttcaccgtcaccgccgacgtcgaggtgcccgaaggaccgcgcacctggtgcatgacccgcaagcccggtgcctga

SEQ ID NO: 8694 - DNA, 924 bp, Artificial Sequence
  Synthetic Polynucloetide
atggccttaccagtgaccgccttgctcctgccgctggccttgctgctccacgccgccaggccggatattcagctgacccagagccacaagtttctgagcaccagcgtgggcgacagagtgtccatcacctgtaaagccagccaggacgtgtacaacgccgtggcctggtatcagcagaagcctggacagagccccaagctgctgatctacagcgccagcagcagatacacaggcgtgcccagcagattcaccggctctggatctggccccgacttcacctttaccatcagctctgtgcaggccgaggacctggccgtgtacttttgtcagcagcacttcagaacccctttcaccttcggcagcggcaccaagctggaaatcaagctcgaggacctgaagaacgtgttcccacctgaggtggccgtgttcgagcctagcgaggccgagatcagccacacccagaaagccaccctcgtgtgcctggctaccggcttctaccccgaccatgtggaactgtcttggtgggtcaacggcaaagaggtgcacagcggcgtgtctaccgacccccagccactgaaagaacagcccgccctgaacgacagccggtactgcctgagcagcagactgagagtgtccgccaccttctggcagaacccccggaaccacttcagatgccaggtgcagttctacggcctgagcgagaacgacgagtggacccaggacagagccaagcccgtgacccagatcgtgtctgccgaagcctggggcagagccgattgcggctttaccagcgagagctaccagcagggcgtgctgagcgccaccatcctgtacgagatcctgctgggcaaggccaccctgtacgccgtgctggtgtctgccctggtgctgatggctatggtcaagcggaaggacagccgggga

SEQ ID NO: 8695 - DNA, 1347 bp, Artificial Sequence
  Synthetic Polynucloetide
atggactggatttggcgcatccttttccttgtcggcgctgctaccggcgcgcattccttcgaacaggttcagctccagcagtctggacccgagctgaagaaacctggcgagacagtgaagatcagctgcaaggccagcggctaccccttcaccaactacggcatgaactgggtcaagcaggcccctggacagggcctgaaatggatgggctggatcaataccagcaccggcgagagcaccttcgccgacgatttcaagggcagattcgacttcagcctggaaaccagcgccaacaccgcctacctccagatcaacaacctgaagtccgaggatatggctacctacttctgcgccagatgggaagtgtaccacggctacgtgccatattggggccagggcacaaccgtgacagtctcttctacgcgtatccagaaccctgatcctgccgtgtaccagctgcgggatagcaagagcagcgacaagagcgtgtgtctgttcaccgacttcgacagccagaccaacgtgtcccagagcaaggactccgacgtgtacatcaccgataagaccgtgctggacatgcggagcatggacttcaagagcaactccgccgtggcctggtccaacaagtccgatttcgcctgcgccaacgccttcaacaacagcattatccccgaggacacattcttcccaagccccgagagcagctgcgacgtgaagctggtggaaaagagcttcgagacagacaccaacctgaacttccagaacctgagcgtgatcggcttcagaatcctgctgctgaaagtggccggctttaacctgctgatgaccctgcggctgtggtccagccgcgccaagagaagcggatctggcgtgaagcagaccctgaatttcgacctgctgaagctggctggcgacgtggaatccaacccaggcccttctagaggccatatggccaagcctttgtctcaagaagaatccaccctcattgaaagagcaacggctacaatcaacagcatccccatctctgaagactacagcgtcgccagcgcagctctctctagcgacggccgcatcttcactggtgtcaatgtatatcattttactgggggaccttgtgcagaactcgtggtgctgggcactgctgctgctgcggcagctggcaacctgacttgtatcgtcgcgatcggaaatgagaacaggggcatcttgagcccctgcggacggtgccgacaggtgcttctcgatctgcatcctgggatcaaagccatagtgaaggacagtgatggacagccgacggcagttgggattcgtgaattgctgccctctggttatgtgtgggagggctga

SEQ ID NO: 8696 - DNA, 846 bp, Artificial Sequence
  Synthetic Polynucloetide
atggactggatttggcgcatccttttccttgtcggcgctgctaccggcgcgcattccttcgaacaggttcagctccagcagtctggacccgagctgaagaaacctggcgagacagtgaagatcagctgcaaggccagcggctaccccttcaccaactacggcatgaactgggtcaagcaggcccctggacagggcctgaaatggatgggctggatcaataccagcaccggcgagagcaccttcgccgacgatttcaagggcagattcgacttcagcctggaaaccagcgccaacaccgcctacctccagatcaacaacctgaagtccgaggatatggctacctacttctgcgccagatgggaagtgtaccacggctacgtgccatattggggccagggcacaaccgtgacagtctcttctacgcgtatccagaaccctgatcctgccgtgtaccagctgcgggatagcaagagcagcgacaagagcgtgtgtctgttcaccgacttcgacagccagaccaacgtgtcccagagcaaggactccgacgtgtacatcaccgataagaccgtgctggacatgcggagcatggacttcaagagcaactccgccgtggcctggtccaacaagtccgatttcgcctgcgccaacgccttcaacaacagcattatccccgaggacacattcttcccaagccccgagagcagctgcgacgtgaagctggtggaaaagagcttcgagacagacaccaacctgaacttccagaacctgagcgtgatcggcttcagaatcctgctgctgaaagtggccggctttaacctgctgatgaccctgcggctgtggtccagc

SEQ ID NO: 8697 - DNA, 1671 bp, Artificial Sequence
  Synthetic Polynucloetide
atggccttaccagtgaccgccttgctcctgccgctggccttgctgctccacgccgccaggccggatattcagctgacccagagccacaagtttctgagcaccagcgtgggcgacagagtgtccatcacctgtaaagccagccaggacgtgtacaacgccgtggcctggtatcagcagaagcctggacagagccccaagctgctgatctacagcgccagcagcagatacacaggcgtgcccagcagattcaccggctctggatctggccccgacttcacctttaccatcagctctgtgcaggccgaggacctggccgtgtacttttgtcagcagcacttcagaacccctttcaccttcggcagcggcaccaagctggaaatcaagctcgaggggaaaccaattcccaaccctcttctgggactggattcaaccggcagcggcgaggacctgaagaacgtgttcccacctgaggtggccgtgttcgagcctagcgaggccgagatcagccacacccagaaagccaccctcgtgtgcctggctaccggcttctaccccgaccatgtggaactgtcttggtgggtcaacggcaaagaggtgcacagcggcgtgtgtaccgacccccagccactgaaagaacagcccgccctgaacgacagccggtactgcctgagcagcagactgagagtgtccgccaccttctggcagaacccccggaaccacttcagatgccaggtgcagttctacggcctgagcgagaacgacgagtggacccaggacagagccaagcccgtgacccagatcgtgtctgccgaagcctggggcagagccgattgcggctttaccagcgagagctaccagcagggcgtgctgagcgccaccatcctgtacgagatcctgctgggcaaggccaccctgtacgccgtgctggtgtctgccctggtgctgatggctatggtcaagcggaaggacagccggggaagggccaagcgatctggatctggagcaacaaacttctcactactcaaacaagcaggtgacgtggaggagaatcccgggcctactagaggccatatgaccgagtacaagcccacggtgcgcctcgccacccgcgacgacgtccccagggccgtacgcaccctcgccgccgcgttcgccgactaccccgccacgcgccacaccgtcgatccggaccgccacatcgagcgggtcaccgagctgcaagaactcttcctcacgcgcgtcgggctcgacatcggcaaggtgtgggtcgcggacgacggcgccgcggtggcggtctggaccacgccggagagcgtcgaagcgggggcggtgttcgccgagatcggcccgcgcatggccgagttgagcggttcccggctggccgcgcagcaacagatggaaggcctcctggcgccgcaccggcccaaggagcccgcgtggttcctggccaccgtcggcgtctcgcccgaccaccagggcaagggtctgggcagcgccgtcgtgctccccggagtggaggcggccgagcgcgccggggtgcccgccttcctggagacctccgcgccccgcaacctccccttctacgagcggctcggcttcaccgtcaccgccgacgtcgaggtgcccgaaggaccgcgcacctggtgcatgacccgcaagcccggtgcctga

SEQ ID NO: 8698 - DNA, 981 bp, Artificial Sequence
  Synthetic Polynucloetide
atggccttaccagtgaccgccttgctcctgccgctggccttgctgctccacgccgccaggccggatattcagctgacccagagccacaagtttctgagcaccagcgtgggcgacagagtgtccatcacctgtaaagccagccaggacgtgtacaacgccgtggcctggtatcagcagaagcctggacagagccccaagctgctgatctacagcgccagcagcagatacacaggcgtgcccagcagattcaccggctctggatctggccccgacttcacctttaccatcagctctgtgcaggccgaggacctggccgtgtacttttgtcagcagcacttcagaacccctttcaccttcggcagcggcaccaagctggaaatcaagctcgaggggaaaccaattcccaaccctcttctgggactggattcaaccggcagcggcgaggacctgaagaacgtgttcccacctgaggtggccgtgttcgagcctagcgaggccgagatcagccacacccagaaagccaccctcgtgtgcctggctaccggcttctaccccgaccatgtggaactgtcttggtgggtcaacggcaaagaggtgcacagcggcgtgtgtaccgacccccagccactgaaagaacagcccgccctgaacgacagccggtactgcctgagcagcagactgagagtgtccgccaccttctggcagaacccccggaaccacttcagatgccaggtgcagttctacggcctgagcgagaacgacgagtggacccaggacagagccaagcccgtgacccagatcgtgtctgccgaagcctggggcagagccgattgcggctttaccagcgagagctaccagcagggcgtgctgagcgccaccatcctgtacgagatcctgctgggcaaggccaccctgtacgccgtgctggtgtctgccctggtgctgatggctatggtcaagcggaaggacagccggggatga

SEQ ID NO: 8699 - DNA, 1383 bp, Artificial Sequence
  Synthetic Polynucloetide
atggactggatttggcgcatccttttccttgtcggcgctgctaccggcgcgcattccttcgaacaggttcagctccagcagtctggacccgagctgaagaaacctggcgagacagtgaagatcagctgcaaggccagcggctaccccttcaccaactacggcatgaactgggtcaagcaggcccctggacagggcctgaaatggatgggctggatcaataccagcaccggcgagagcaccttcgccgacgatttcaagggcagattcgacttcagcctggaaaccagcgccaacaccgcctacctccagatcaacaacctgaagtccgaggatatggctacctacttctgcgccagatgggaagtgtaccacggctacgtgccatattggggccagggcacaaccgtgacagtctcttctacgcgtgagcagaaactgatctcggaagaggatgggagcggcatccagaaccctgatcctgccgtgtaccagctgcgggatagcaagagcagcgacaagagcgtgtgtctgttcaccgacttcgacagccagaccaacgtgtcccagagcaaggactccgacgtgtacatcaccgataagtgcgtgctggacatgcggagcatggacttcaagagcaactccgccgtggcctggtccaacaagtccgatttcgcctgcgccaacgccttcaacaacagcattatccccgaggacacattcttcccaagccccgagagcagctgcgacgtgaagctggtggaaaagagcttcgagacagacaccaacctgaacttccagaacctgagcgtgatcggcttcagaatcctgctgctgaaagtggccggctttaacctgctgatgaccctgcggctgtggtccagccgcgccaagagaagcggatctggcgtgaagcagaccctgaatttcgacctgctgaagctggctggcgacgtggaatccaacccaggcccttctagaggccatatggccaagcctttgtctcaagaagaatccaccctcattgaaagagcaacggctacaatcaacagcatccccatctctgaagactacagcgtcgccagcgcagctctctctagcgacggccgcatcttcactggtgtcaatgtatatcattttactgggggaccttgtgcagaactcgtggtgctgggcactgctgctgctgcggcagctggcaacctgacttgtatcgtcgcgatcggaaatgagaacaggggcatcttgagcccctgcggacggtgccgacaggtgcttctcgatctgcatcctgggatcaaagccatagtgaaggacagtgatggacagccgacggcagttgggattcgtgaattgctgccctctggttatgtgtgggagggctga

SEQ ID NO: 8700 - DNA, 885 bp, Artificial Sequence
  Synthetic Polynucloetide
atggactggatttggcgcatccttttccttgtcggcgctgctaccggcgcgcattccttcgaacaggttcagctccagcagtctggacccgagctgaagaaacctggcgagacagtgaagatcagctgcaaggccagcggctaccccttcaccaactacggcatgaactgggtcaagcaggcccctggacagggcctgaaatggatgggctggatcaataccagcaccggcgagagcaccttcgccgacgatttcaagggcagattcgacttcagcctggaaaccagcgccaacaccgcctacctccagatcaacaacctgaagtccgaggatatggctacctacttctgcgccagatgggaagtgtaccacggctacgtgccatattggggccagggcacaaccgtgacagtctcttctacgcgtgagcagaaactgatctcggaagaggatgggagcggcatccagaaccctgatcctgccgtgtaccagctgcgggatagcaagagcagcgacaagagcgtgtgtctgttcaccgacttcgacagccagaccaacgtgtcccagagcaaggactccgacgtgtacatcaccgataagtgcgtgctggacatgcggagcatggacttcaagagcaactccgccgtggcctggtccaacaagtccgatttcgcctgcgccaacgccttcaacaacagcattatccccgaggacacattcttcccaagccccgagagcagctgcgacgtgaagctggtggaaaagagcttcgagacagacaccaacctgaacttccagaacctgagcgtgatcggcttcagaatcctgctgctgaaagtggccggctttaacctgctgatgaccctgcggctgtggtccagctga

SEQ ID NO: 8701 - DNA, 1923 bp, Artificial Sequence
  Synthetic Polynucloetide
atggccttaccagtgaccgccttgctcctgccgctggccttgctgctccacgccgccaggccggatattcagctgacccagagccacaagtttctgagcaccagcgtgggcgacagagtgtccatcacctgtaaagccagccaggacgtgtacaacgccgtggcctggtatcagcagaagcctggacagagccccaagctgctgatctacagcgccagcagcagatacacaggcgtgcccagcagattcaccggctctggatctggccccgacttcacctttaccatcagctctgtgcaggccgaggacctggccgtgtacttttgtcagcagcacttcagaacccctttcaccttcggcagcggcaccaagctggaaatcaagggcggaggcggaagtggaggcggaggatctggcggcggaggctctcaggttcagctccagcagtctggacccgagctgaagaaacctggcgagacagtgaagatcagctgcaaggccagcggctaccccttcaccaactacggcatgaactgggtcaagcaggcccctggacagggcctgaaatggatgggctggatcaataccagcaccggcgagagcaccttcgccgacgatttcaagggcagattcgacttcagcctggaaaccagcgccaacaccgcctacctccagatcaacaacctgaagtccgaggatatggctacctacttctgcgccagatgggaagtgtaccacggctacgtgccatattggggccagggcacaaccgtgacagtctcttctacgcgtgggagcggcatccagaaccctgatcctgccgtgtaccagctgcgggatagcaagagcagcgacaagagcgtgtgtctgttcaccgacttcgacagccagaccaacgtgtcccagagcaaggactccgacgtgtacatcaccgataagaccgtgctggacatgcggagcatggacttcaagagcaactccgccgtggcctggtccaacaagtccgatttcgcctgcgccaacgccttcaacaacagcattatccccgaggacacattcttcccaagcagcgacgtgccctgcgacgtgaagctggtggaaaagagcttcgagacagacaccaacctgaacttccagaacctgagcgtgatcggcttcagaatcctgctgctgaaagtggccggctttaacctgctgatgaccctgcggctgtggtccagccgcgccaagagaagcggatctggcgtgaagcagaccctgaatttcgacctgctgaagctggctggcgacgtggaatccaacccaggcccttctagaggccatatgaccgagtacaagcccacggtgcgcctcgccacccgcgacgacgtccccagggccgtacgcaccctcgccgccgcgttcgccgactaccccgccacgcgccacaccgtcgatccggaccgccacatcgagcgggtcaccgagctgcaagaactcttcctcacgcgcgtcgggctcgacatcggcaaggtgtgggtcgcggacgacggcgccgcggtggcggtctggaccacgccggagagcgtcgaagcgggggcggtgttcgccgagatcggcccgcgcatggccgagttgagcggttcccggctggccgcgcagcaacagatggaaggcctcctggcgccgcaccggcccaaggagcccgcgtggttcctggccaccgtcggcgtctcgcccgaccaccagggcaagggtctgggcagcgccgtcgtgctccccggagtggaggcggccgagcgcgccggggtgcccgccttcctggagacctccgcgccccgcaacctccccttctacgagcggctcggcttcaccgtcaccgccgacgtcgaggtgcccgaaggaccgcgcacctggtgcatgacccgcaagcccggtgcctga

SEQ ID NO: 8702 - DNA, 2019 bp, Artificial Sequence
  Synthetic Polynucloetide
atggccttaccagtgaccgccttgctcctgccgctggccttgctgctccacgccgccaggccggatattcagctgacccagagccacaagtttctgagcaccagcgtgggcgacagagtgtccatcacctgtaaagccagccaggacgtgtacaacgccgtggcctggtatcagcagaagcctggacagagccccaagctgctgatctacagcgccagcagcagatacacaggcgtgcccagcagattcaccggctctggatctggccccgacttcacctttaccatcagctctgtgcaggccgaggacctggccgtgtacttttgtcagcagcacttcagaacccctttcaccttcggcagcggcaccaagctggaaatcaagggcggaggcggaagtggaggcggaggatctggcggcggaggctctcaggttcagctccagcagtctggacccgagctgaagaaacctggcgagacagtgaagatcagctgcaaggccagcggctaccccttcaccaactacggcatgaactgggtcaagcaggcccctggacagggcctgaaatggatgggctggatcaataccagcaccggcgagagcaccttcgccgacgatttcaagggcagattcgacttcagcctggaaaccagcgccaacaccgcctacctccagatcaacaacctgaagtccgaggatatggctacctacttctgcgccagatgggaagtgtaccacggctacgtgccatattggggccagggcacaaccgtgacagtctcttctctcgaggacctgaagaacgtgttcccacctgaggtggccgtgttcgagcctagcaaggccgagatcgcccacacccagaaagccaccctcgtgtgcctggctaccggcttctaccccgaccatgtggaactgtcttggtgggtcaacggcaaagaggtgcacagcggcgtgtctaccgacccccagccactgaaagaacagcccgccctgaacgacagccggtactgcctgagcagcagactgagagtgtccgccaccttctggcagaacccccggaaccacttcagatgccaggtgcagttctacggcctgagcgagaacgacgagtggacccaggacagagccaagcccgtgacccagatcgtgtctgccgaagcctggggcagagccgattgcggcatcaccagcgccagctaccaccagggcgtgctgagcgccaccatcctgtacgagatcctgctgggcaaggccaccctgtacgccgtgctggtgtctgccctggtgctgatggctatggtcaagcggaaggacagccggggaagggccaagcgatctggatctggagcaacaaacttctcactactcaaacaagcaggtgacgtggaggagaatcccgggcctactagaggccatatgaccgagtacaagcccacggtgcgcctcgccacccgcgacgacgtccccagggccgtacgcaccctcgccgccgcgttcgccgactaccccgccacgcgccacaccgtcgatccggaccgccacatcgagcgggtcaccgagctgcaagaactcttcctcacgcgcgtcgggctcgacatcggcaaggtgtgggtcgcggacgacggcgccgcggtggcggtctggaccacgccggagagcgtcgaagcgggggcggtgttcgccgagatcggcccgcgcatggccgagttgagcggttcccggctggccgcgcagcaacagatggaaggcctcctggcgccgcaccggcccaaggagcccgcgtggttcctggccaccgtcggcgtctcgcccgaccaccagggcaagggtctgggcagcgccgtcgtgctccccggagtggaggcggccgagcgcgccggggtgcccgccttcctggagacctccgcgccccgcaacctccccttctacgagcggctcggcttcaccgtcaccgccgacgtcgaggtgcccgaaggaccgcgcacctggtgcatgacccgcaagcccggtgcctga

SEQ ID NO: 8703 - DNA, 2088 bp, Artificial Sequence
  Synthetic Polynucloetide
atggccttaccagtgaccgccttgctcctgccgctggccttgctgctccacgccgccaggccggatattcagctgacccagagccacaagtttctgagcaccagcgtgggcgacagagtgtccatcacctgtaaagccagccaggacgtgtacaacgccgtggcctggtatcagcagaagcctggacagagccccaagctgctgatctacagcgccagcagcagatacacaggcgtgcccagcagattcaccggctctggatctggccccgacttcacctttaccatcagctctgtgcaggccgaggacctggccgtgtacttttgtcagcagcacttcagaacccctttcaccttcggcagcggcaccaagctggaaatcaagggcggaggcggaagtggaggcggaggatctggcggcggaggctctcaggttcagctccagcagtctggacccgagctgaagaaacctggcgagacagtgaagatcagctgcaaggccagcggctaccccttcaccaactacggcatgaactgggtcaagcaggcccctggacagggcctgaaatggatgggctggatcaataccagcaccggcgagagcaccttcgccgacgatttcaagggcagattcgacttcagcctggaaaccagcgccaacaccgcctacctccagatcaacaacctgaagtccgaggatatggctacctacttctgcgccagatgggaagtgtaccacggctacgtgccatattggggccagggcacaaccgtgacagtctcttctacgcgtgggtctggaggcggaggcagcggcggaggcgggagcggcgacggtaacgaggagatgggaggaatcactcaaaccccttacaaagtctcaatttcaggaacaactgttatccttacatgtccccagtatcctggcagcgagatcctttggcagcataacgacaagaatatagggggagatgaagacgataagaatatcggatctgacgaggatcacttgagcctgaaagagttctccgagcttgaacaaagcggatattatgtgtgctatccgcgcgggtcaaagccggaagacgctaacttttacctttatctccgagccagagtgtgcgaaaattgcatggaaatggacgttatgtccgttgctacaatagttatcgtagatatatgcatcacgggtggactgcttctgctggtttattattggtccaagaatagaaaggccaaagctaaacccgtgaccagaggcgctggcgcaggcggaaggcaaaggggacaaaacaaagaacggccaccaccagtgccaaatccagattatgagcctattcggaaaggacagagggacctgtactctggcctgaatcagagaagaatccgcgccaagagaagcggatctggcgtgaagcagaccctgaatttcgacctgctgaagctggctggcgacgtggaatccaacccaggcccttctagaggccatatgaccgagtacaagcccacggtgcgcctcgccacccgcgacgacgtccccagggccgtacgcaccctcgccgccgcgttcgccgactaccccgccacgcgccacaccgtcgatccggaccgccacatcgagcgggtcaccgagctgcaagaactcttcctcacgcgcgtcgggctcgacatcggcaaggtgtgggtcgcggacgacggcgccgcggtggcggtctggaccacgccggagagcgtcgaagcgggggcggtgttcgccgagatcggcccgcgcatggccgagttgagcggttcccggctggccgcgcagcaacagatggaaggcctcctggcgccgcaccggcccaaggagcccgcgtggttcctggccaccgtcggcgtctcgcccgaccaccagggcaagggtctgggcagcgccgtcgtgctccccggagtggaggcggccgagcgcgccggggtgcccgccttcctggagacctccgcgccccgcaacctccccttctacgagcggctcggcttcaccgtcaccgccgacgtcgaggtgcccgaaggaccgcgcacctggtgcatgacccgcaagcccggtgcctga

SEQ ID NO: 8704 - DNA, 1983 bp, Artificial Sequence
  Synthetic Polynucloetide
atggccttaccagtgaccgccttgctcctgccgctggccttgctgctccacgccgccaggccggatattcagctgacccagagccacaagtttctgagcaccagcgtgggcgacagagtgtccatcacctgtaaagccagccaggacgtgtacaacgccgtggcctggtatcagcagaagcctggacagagccccaagctgctgatctacagcgccagcagcagatacacaggcgtgcccagcagattcaccggctctggatctggccccgacttcacctttaccatcagctctgtgcaggccgaggacctggccgtgtacttttgtcagcagcacttcagaacccctttcaccttcggcagcggcaccaagctggaaatcaagggcggaggcggaagtggaggcggaggatctggcggcggaggctctcaggttcagctccagcagtctggacccgagctgaagaaacctggcgagacagtgaagatcagctgcaaggccagcggctaccccttcaccaactacggcatgaactgggtcaagcaggcccctggacagggcctgaaatggatgggctggatcaataccagcaccggcgagagcaccttcgccgacgatttcaagggcagattcgacttcagcctggaaaccagcgccaacaccgcctacctccagatcaacaacctgaagtccgaggatatggctacctacttctgcgccagatgggaagtgtaccacggctacgtgccatattggggccagggcacaaccgtgacagtctcttctacgcgtgggtctggaggcggaggcagcggcggaggcgggagcggcttcaagatccccatcgaggaactggaagatcgggtgttcgtgaactgcaacacctctatcacctgggtggaaggcaccgtgggaacactgctgagcgacatcaccagactggacctcggcaagcggattctggaccctcggggcatctacagatgcaacggcaccgacatctacaaggacaaagaaagcaccgtgcaggtccactacagaatgtgccagtcctgcgtggaactggaccctgctacagtggccggcatcatcgtgaccgatgtgatcgctactctgctgctggctctgggagtgttctgcttcgccggacacgaaacaggcagactgtctggcgctgccgatacacaggccctgctgagaaacgaccaagtgtatcagcccctgcgcgacagagatgatgcccagtattctcacctcggcggcaactgggctagaaacaagcgcgccaagagaagcggatctggcgtgaagcagaccctgaatttcgacctgctgaagctggctggcgacgtggaatccaacccaggcccttctagaggccatatgaccgagtacaagcccacggtgcgcctcgccacccgcgacgacgtccccagggccgtacgcaccctcgccgccgcgttcgccgactaccccgccacgcgccacaccgtcgatccggaccgccacatcgagcgggtcaccgagctgcaagaactcttcctcacgcgcgtcgggctcgacatcggcaaggtgtgggtcgcggacgacggcgccgcggtggcggtctggaccacgccggagagcgtcgaagcgggggcggtgttcgccgagatcggcccgcgcatggccgagttgagcggttcccggctggccgcgcagcaacagatggaaggcctcctggcgccgcaccggcccaaggagcccgcgtggttcctggccaccgtcggcgtctcgcccgaccaccagggcaagggtctgggcagcgccgtcgtgctccccggagtggaggcggccgagcgcgccggggtgcccgccttcctggagacctccgcgccccgcaacctccccttctacgagcggctcggcttcaccgtcaccgccgacgtcgaggtgcccgaaggaccgcgcacctggtgcatgacccgcaagcccggtgcctga

SEQ ID NO: 8705 - DNA, 2013 bp, Artificial Sequence
  Synthetic Polynucloetide
atggccttaccagtgaccgccttgctcctgccgctggccttgctgctccacgccgccaggccggatattcagctgacccagagccacaagtttctgagcaccagcgtgggcgacagagtgtccatcacctgtaaagccagccaggacgtgtacaacgccgtggcctggtatcagcagaagcctggacagagccccaagctgctgatctacagcgccagcagcagatacacaggcgtgcccagcagattcaccggctctggatctggccccgacttcacctttaccatcagctctgtgcaggccgaggacctggccgtgtacttttgtcagcagcacttcagaacccctttcaccttcggcagcggcaccaagctggaaatcaagggcggaggcggaagtggaggcggaggatctggcggcggaggctctcaggttcagctccagcagtctggacccgagctgaagaaacctggcgagacagtgaagatcagctgcaaggccagcggctaccccttcaccaactacggcatgaactgggtcaagcaggcccctggacagggcctgaaatggatgggctggatcaataccagcaccggcgagagcaccttcgccgacgatttcaagggcagattcgacttcagcctggaaaccagcgccaacaccgcctacctccagatcaacaacctgaagtccgaggatatggctacctacttctgcgccagatgggaagtgtaccacggctacgtgccatattggggccagggcacaaccgtgacagtctcttctacgcgtgggtctggaggcggaggcagcggcggaggcgggagcggccagagcatcaagggcaaccacctggtcaaggtgtacgactaccaagaggacggcagcgtgctgctgacatgtgatgccgaggccaagaacatcacctggtttaaggacggcaagatgatcggcttcctgaccgaggacaagaagaagtggaacctgggcagcaacgctaaggaccccagaggcatgtatcagtgcaagggcagccagaacaagagcaagcccctccaggtgtactaccggatgtgccagaactgcatcgagctgaacgccgctaccatcagcggctttctgttcgccgagatcgtgtccatcttcgtgctggccgtgggcgtgtactttatcgctggacaggatggcgtgcggcagagcagagcttccgataagcaaaccctgctgcctaacgaccagctgtaccagcctctgaaggacagagaggacgaccagtacagccacctccagggcaatcagctgagaagaaaccgcgccaagagaagcggatctggcgtgaagcagaccctgaatttcgacctgctgaagctggctggcgacgtggaatccaacccaggcccttctagaggccatatgaccgagtacaagcccacggtgcgcctcgccacccgcgacgacgtccccagggccgtacgcaccctcgccgccgcgttcgccgactaccccgccacgcgccacaccgtcgatccggaccgccacatcgagcgggtcaccgagctgcaagaactcttcctcacgcgcgtcgggctcgacatcggcaaggtgtgggtcgcggacgacggcgccgcggtggcggtctggaccacgccggagagcgtcgaagcgggggcggtgttcgccgagatcggcccgcgcatggccgagttgagcggttcccggctggccgcgcagcaacagatggaaggcctcctggcgccgcaccggcccaaggagcccgcgtggttcctggccaccgtcggcgtctcgcccgaccaccagggcaagggtctgggcagcgccgtcgtgctccccggagtggaggcggccgagcgcgccggggtgcccgccttcctggagacctccgcgccccgcaacctccccttctacgagcggctcggcttcaccgtcaccgccgacgtcgaggtgcccgaaggaccgcgcacctggtgcatgacccgcaagcccggtgcctga

SEQ ID NO: 8706 - DNA, 1962 bp, Artificial Sequence
  Synthetic Polynucloetide
atggccttaccagtgaccgccttgctcctgccgctggccttgctgctccacgccgccaggccggatattcagctgacccagagccacaagtttctgagcaccagcgtgggcgacagagtgtccatcacctgtaaagccagccaggacgtgtacaacgccgtggcctggtatcagcagaagcctggacagagccccaagctgctgatctacagcgccagcagcagatacacaggcgtgcccagcagattcaccggctctggatctggccccgacttcacctttaccatcagctctgtgcaggccgaggacctggccgtgtacttttgtcagcagcacttcagaacccctttcaccttcggcagcggcaccaagctggaaatcaagggcggaggcggaagtggaggcggaggatctggcggcggaggctctcaggttcagctccagcagtctggacccgagctgaagaaacctggcgagacagtgaagatcagctgcaaggccagcggctaccccttcaccaactacggcatgaactgggtcaagcaggcccctggacagggcctgaaatggatgggctggatcaataccagcaccggcgagagcaccttcgccgacgatttcaagggcagattcgacttcagcctggaaaccagcgccaacaccgcctacctccagatcaacaacctgaagtccgaggatatggctacctacttctgcgccagatgggaagtgtaccacggctacgtgccatattggggccagggcacaaccgtgacagtctcttctacgcgtgggtctggaggcggaggcagcggcggaggcgggagcggccagagttttgggttgttggaccctaaattgtgctatctgttggacggaatcctgttcatttacggagtgatcctgaccgcattgttcctgcgggttaagttttccagatccgcagacgcacccgcttaccaacaagggcagaaccaactctacaatgaacttaatttggggcggagggaagagtacgacgttctggacaaaaggaggggacgagatcccgagatgggcggaaagcctcagcgaaggaagaatccgcaagaggggctttataacgaactccagaaagataaaatggcagaagcctatagtgagattgggatgaagggagaaaggaggaggggtaaaggtcacgatgggttgtaccaaggattgagcacagccactaaagatacctatgatgcgctccacatgcaggccctgccgccaagacgcgccaagagaagcggatctggcgtgaagcagaccctgaatttcgacctgctgaagctggctggcgacgtggaatccaacccaggcccttctagaggccatatgaccgagtacaagcccacggtgcgcctcgccacccgcgacgacgtccccagggccgtacgcaccctcgccgccgcgttcgccgactaccccgccacgcgccacaccgtcgatccggaccgccacatcgagcgggtcaccgagctgcaagaactcttcctcacgcgcgtcgggctcgacatcggcaaggtgtgggtcgcggacgacggcgccgcggtggcggtctggaccacgccggagagcgtcgaagcgggggcggtgttcgccgagatcggcccgcgcatggccgagttgagcggttcccggctggccgcgcagcaacagatggaaggcctcctggcgccgcaccggcccaaggagcccgcgtggttcctggccaccgtcggcgtctcgcccgaccaccagggcaagggtctgggcagcgccgtcgtgctccccggagtggaggcggccgagcgcgccggggtgcccgccttcctggagacctccgcgccccgcaacctccccttctacgagcggctcggcttcaccgtcaccgccgacgtcgaggtgcccgaaggaccgcgcacctggtgcatgacccgcaagcccggtgcctga

SEQ ID NO: 8707 - DNA, 2262 bp, Artificial Sequence
  Synthetic Polynucloetide
atggccttaccagtgaccgccttgctcctgccgctggccttgctgctccacgccgccaggccggaagtgcagctggttgaatctggcggaggactggttcagcctggcggatctctgagactgtcttgtgccgccagcggcttcagcttcagcgacttttggatgagctgggtccgacaggcccctggcaaaggacttgaatgggtcgccacaatcagccaggccggcagcgagaaggactacgtggactctgtgaagggcagattcaccatcagccgggacaacgccaagaagtccctgtacctccagatgaacagcctgagagccgaggacaccgccgtgtactattgtgcctctggcgtgtacagcttcgactacagaggccagggcaccctggtcacagtctcttctggtaccggcggaggcggatctggcggcggaggtagcggtggcggaggatctgaattcgatattcagctgacccagagccacaagtttctgagcaccagcgtgggcgacagagtgtccatcacctgtaaagccagccaggacgtgtacaacgccgtggcctggtatcagcagaagcctggacagagccccaagctgctgatctacagcgccagcagcagatacacaggcgtgcccagcagattcaccggctctggatctggccccgacttcacctttaccatcagctctgtgcaggccgaggacctggccgtgtacttttgtcagcagcacttcagaacccctttcaccttcggcagcggcaccaagctggaaatcaagctcgaggacctgaagaacgtgttcccacctgaggtggccgtgttcgagcctagcgaggccgagatcagccacacccagaaagccaccctcgtgtgcctggctaccggcttctaccccgaccatgtggaactgtcttggtgggtcaacggcaaagaggtgcacagcggcgtgtgtaccgacccccagccactgaaagaacagcccgccctgaacgacagccggtactgcctgagcagcagactgagagtgtccgccaccttctggcagaacccccggaaccacttcagatgccaggtgcagttctacggcctgagcgagaacgacgagtggacccaggacagagccaagcccgtgacccagatcgtgtctgccgaagcctggggcagagccgattgcggctttaccagcgagagctaccagcagggcgtgctgagcgccaccatcctgtacgagatcctgctgggcaaggccaccctgtacgccgtgctggtgtctgccctggtgctgatggctatggtcaagcggaaggacagccggggaagggccaagcgatctggatctggagcaacaaacttctcactactcaaacaagcaggtgacgtggaggagaatcccgggcctactagtatggactggatttggcgcatccttttccttgtcggcgctgctaccggcgcgcattccttcgaacaggttcagctccagcagtctggacccgagctgaagaaacctggcgagacagtgaagatcagctgcaaggccagcggctaccccttcaccaactacggcatgaactgggtcaagcaggcccctggacagggcctgaaatggatgggctggatcaataccagcaccggcgagagcaccttcgccgacgatttcaagggcagattcgacttcagcctggaaaccagcgccaacaccgcctacctccagatcaacaacctgaagtccgaggatatggctacctacttctgcgccagatgggaagtgtaccacggctacgtgccatattggggccagggcacaaccgtgacagtctcttctacgcgtatccagaaccctgatcctgccgtgtaccagctgcgggatagcaagagcagcgacaagagcgtgtgtctgttcaccgacttcgacagccagaccaacgtgtcccagagcaaggactccgacgtgtacatcaccgataagtgcgtgctggacatgcggagcatggacttcaagagcaactccgccgtggcctggtccaacaagtccgatttcgcctgcgccaacgccttcaacaacagcattatccccgaggacacattcttcccaagccccgagagcagctgcgacgtgaagctggtggaaaagagcttcgagacagacaccaacctgaacttccagaacctgagcgtgatcggcttcagaatcctgctgctgaaagtggccggctttaacctgctgatgaccctgcggctgtggtccagc

SEQ ID NO: 8708 - DNA, 2274 bp, Artificial Sequence
  Synthetic Polynucloetide
atggccttaccagtgaccgccttgctcctgccgctggccttgctgctccacgccgccaggccggaagtgcagctggttgaatctggcggaggactggttcagcctggcggatctctgagactgtcttgtgccgccagcggcttcagcttcagcgacttttggatgagctgggtccgacaggcccctggcaaaggacttgaatgggtcgccacaatcagccaggccggcagcgagaaggactacgtggactctgtgaagggcagattcaccatcagccgggacaacgccaagaagtccctgtacctccagatgaacagcctgagagccgaggacaccgccgtgtactattgtgcctctggcgtgtacagcttcgactacagaggccagggcaccctggtcacagtctcttctggtaccggcggaggcggatctggcggcggaggtagcggtggcggaggatctgaattcgatattcagctgacccagagccacaagtttctgagcaccagcgtgggcgacagagtgtccatcacctgtaaagccagccaggacgtgtacaacgccgtggcctggtatcagcagaagcctggacagagccccaagctgctgatctacagcgccagcagcagatacacaggcgtgcccagcagattcaccggctctggatctggccccgacttcacctttaccatcagctctgtgcaggccgaggacctggccgtgtacttttgtcagcagcacttcagaacccctttcaccttcggcagcggcaccaagctggaaatcaagctcgagatccagaaccctgatcctgccgtgtaccagctgcgggatagcaagagcagcgacaagagcgtgtgtctgttcaccgacttcgacagccagaccaacgtgtcccagagcaaggactccgacgtgtacatcaccgataagtgcgtgctggacatgcggagcatggacttcaagagcaactccgccgtggcctggtccaacaagtccgatttcgcctgcgccaacgccttcaacaacagcattatccccgaggacacattcttcccaagccccgagagcagctgcgacgtgaagctggtggaaaagagcttcgagacagacaccaacctgaacttccagaacctgagcgtgatcggcttcagaatcctgctgctgaaagtggccggctttaacctgctgatgaccctgcggctgtggtccagccgcgccaagagaagcggatctggcgtgaagcagaccctgaatttcgacctgctgaagctggctggcgacgtggaatccaacccaggccctactagtatggactggatttggcgcatccttttccttgtcggcgctgctaccggcgcgcattccttcgaacaggttcagctccagcagtctggacccgagctgaagaaacctggcgagacagtgaagatcagctgcaaggccagcggctaccccttcaccaactacggcatgaactgggtcaagcaggcccctggacagggcctgaaatggatgggctggatcaataccagcaccggcgagagcaccttcgccgacgatttcaagggcagattcgacttcagcctggaaaccagcgccaacaccgcctacctccagatcaacaacctgaagtccgaggatatggctacctacttctgcgccagatgggaagtgtaccacggctacgtgccatattggggccagggcacaaccgtgacagtctcttctacgcgtgaggacctgaagaacgtgttcccacctgaggtggccgtgttcgagcctagcgaggccgagatcagccacacccagaaagccaccctcgtgtgcctggctaccggcttctaccccgaccatgtggaactgtcttggtgggtcaacggcaaagaggtgcacagcggcgtgtgtaccgacccccagccactgaaagaacagcccgccctgaacgacagccggtactgcctgagcagcagactgagagtgtccgccaccttctggcagaacccccggaaccacttcagatgccaggtgcagttctacggcctgagcgagaacgacgagtggacccaggacagagccaagcccgtgacccagatcgtgtctgccgaagcctggggcagagccgattgcggctttaccagcgagagctaccagcagggcgtgctgagcgccaccatcctgtacgagatcctgctgggcaaggccaccctgtacgccgtgctggtgtctgccctggtgctgatggctatggtcaagcggaaggacagccgggga

SEQ ID NO: 8709 - DNA, 2850 bp, Artificial Sequence
  Synthetic Polynucloetide
atggccttaccagtgaccgccttgctcctgccgctggccttgctgctccacgccgccaggccggaagtgcagctggttgaatctggcggaggactggttcagcctggcggatctctgagactgtcttgtgccgccagcggcttcagcttcagcgacttttggatgagctgggtccgacaggcccctggcaaaggacttgaatgggtcgccacaatcagccaggccggcagcgagaaggactacgtggactctgtgaagggcagattcaccatcagccgggacaacgccaagaagtccctgtacctccagatgaacagcctgagagccgaggacaccgccgtgtactattgtgcctctggcgtgtacagcttcgactacagaggccagggcaccctggtcacagtctcttctggtaccggcggaggcggatctggcggcggaggtagcggtggcggaggatctgaattcgatattcagctgacccagagccacaagtttctgagcaccagcgtgggcgacagagtgtccatcacctgtaaagccagccaggacgtgtacaacgccgtggcctggtatcagcagaagcctggacagagccccaagctgctgatctacagcgccagcagcagatacacaggcgtgcccagcagattcaccggctctggatctggccccgacttcacctttaccatcagctctgtgcaggccgaggacctggccgtgtacttttgtcagcagcacttcagaacccctttcaccttcggcagcggcaccaagctggaaatcaagctcgaggacctgaagaacgtgttcccacctgaggtggccgtgttcgagcctagcgaggccgagatcagccacacccagaaagccaccctcgtgtgcctggctaccggcttctaccccgaccatgtggaactgtcttggtgggtcaacggcaaagaggtgcacagcggcgtgtctaccgacccccagccactgaaagaacagcccgccctgaacgacagccggtactgcctgagcagcagactgagagtgtccgccaccttctggcagaacccccggaaccacttcagatgccaggtgcagttctacggcctgagcgagaacgacgagtggacccaggacagagccaagcccgtgacccagatcgtgtctgccgaagcctggggcagagccgattgcggatcccagagcttcggcctgctggaccccaagctgtgctacctgctggatggcatcctgttcatctacggcgtgatcctgaccgccctgttcctgagagtgaagttcagcagaagcgccgacgcccctgcctaccagcagggacagaaccaactgtacaacgagctgaacctgggcagacgggaagagtacgacgtgctggacaagcggagaggcagggaccctgagatgggcggaaagccccagcggagaaagaacccccaggaaggactgtataacgaactccagaaagacaagatggccgaagcctacagcgagatcggcatgaagggcgagcggagaagaggcaagggccacgatggcctgtaccagggcctgagcaccgccaccaaggacacctatgacgccctgcacatgcaggccctgcctccaagaagggccaagcgatctggatctggagcaacaaacttctcactactcaaacaagcaggtgacgtggaggagaatcccgggcctactagtatggactggatttggcgcatccttttccttgtcggcgctgctaccggcgcgcattccttcgaacaggttcagctccagcagtctggacccgagctgaagaaacctggcgagacagtgaagatcagctgcaaggccagcggctaccccttcaccaactacggcatgaactgggtcaagcaggcccctggacagggcctgaaatggatgggctggatcaataccagcaccggcgagagcaccttcgccgacgatttcaagggcagattcgacttcagcctggaaaccagcgccaacaccgcctacctccagatcaacaacctgaagtccgaggatatggctacctacttctgcgccagatgggaagtgtaccacggctacgtgccatattggggccagggcacaaccgtgacagtctcttctacgcgtatccagaaccctgatcctgccgtgtaccagctgcgggatagcaagagcagcgacaagagcgtgtgtctgttcaccgacttcgacagccagaccaacgtgtcccagagcaaggactccgacgtgtacatcaccgataagaccgtgctggacatgcggagcatggacttcaagagcaactccgccgtggcctggtccaacaagtccgatttcgcctgcgccaacgccttcaacaacagcattatccccgaggacacattcttcccaagccccgagagcagctgcggtacccagagttttgggttgttggaccctaaattgtgctatctgttggacggaatcctgttcatttacggagtgatcctgaccgcattgttcctgcgggttaagttttccagatccgcagacgcacccgcttaccaacaagggcagaaccaactctacaatgaacttaatttggggcggagggaagagtacgacgttctggacaaaaggaggggacgagatcccgagatgggcggaaagcctcagcgaaggaagaatccgcaagaggggctttataacgaactccagaaagataaaatggcagaagcctatagtgagattgggatgaagggagaaaggaggaggggtaaaggtcacgatgggttgtaccaaggattgagcacagccactaaagatacctatgatgcgctccacatgcaggccctgccgccaaga

SEQ ID NO: 8710 - DNA, 2340 bp, Artificial Sequence
  Synthetic Polynucloetide
atggccttaccagtgaccgccttgctcctgccgctggccttgctgctccacgccgccaggccggaagtgcagctggttgaatctggcggaggactggttcagcctggcggatctctgagactgtcttgtgccgccagcggcttcagcttcagcgacttttggatgagctgggtccgacaggcccctggcaaaggacttgaatgggtcgccacaatcagccaggccggcagcgagaaggactacgtggactctgtgaagggcagattcaccatcagccgggacaacgccaagaagtccctgtacctccagatgaacagcctgagagccgaggacaccgccgtgtactattgtgcctctggcgtgtacagcttcgactacagaggccagggcaccctggtcacagtctcttctggtaccggcggaggcggatctggcggcggaggtagcggtggcggaggatctgaattcgatattcagctgacccagagccacaagtttctgagcaccagcgtgggcgacagagtgtccatcacctgtaaagccagccaggacgtgtacaacgccgtggcctggtatcagcagaagcctggacagagccccaagctgctgatctacagcgccagcagcagatacacaggcgtgcccagcagattcaccggctctggatctggccccgacttcacctttaccatcagctctgtgcaggccgaggacctggccgtgtacttttgtcagcagcacttcagaacccctttcaccttcggcagcggcaccaagctggaaatcaagctcgagggacagcctaaggccaatcctaccgtgacactgttccctccaagcagcgaagaactccaggccaacaaggccacacttgtgtgcctgatctccgacttctaccctggggctgtgacagtggcttggaaggccgatggatctcctgtgaaagccggcgtggaaaccaccaagccatccaagcagagcaacaacaaatacgccgccagctcctacctgagcctgacacctgagcagtggaagtcccacagatcctacagctgccaagtgacccacgaaggcagcaccgtggaaaagacagtggcccctacagagtgcagccccatcaagaccgatgtgattacaatggaccccaaggacaactgctccaaggacgccaacgataccctgctgctccagctgaccaacaccagcgcctactacatgtacttgttgctgctgctgaagtccgtggtgtacttcgccatcatcacatgctgcctgctgcggagaaccgccttctgctgcaacggcgagaagtctagggccaagcgatctggatctggagcaacaaacttctcactactcaaacaagcaggtgacgtggaggagaatcccgggcctactagtatggactggatttggcgcatccttttccttgtcggcgctgctaccggcgcgcattccttcgaacaggttcagctccagcagtctggacccgagctgaagaaacctggcgagacagtgaagatcagctgcaaggccagcggctaccccttcaccaactacggcatgaactgggtcaagcaggcccctggacagggcctgaaatggatgggctggatcaataccagcaccggcgagagcaccttcgccgacgatttcaagggcagattcgacttcagcctggaaaccagcgccaacaccgcctacctccagatcaacaacctgaagtccgaggatatggctacctacttctgcgccagatgggaagtgtaccacggctacgtgccatattggggccagggcacaaccgtgacagtctcttctacgcgtgcctctacaaagggaccctccgtgtttcctctggctcccagcagcaagtctacaagcggaggaacagccgctctgggctgcctggtcaaggattactttcccgagcctgtgaccgtgtcctggaatagcggagcactgacaagcggcgtgcacacctttccagccgtgctgcaaagcagcggcctgtactctctgagcagcgtggtcacagtgcctagctctagcctgggcacccagacctacatctgcaatgtgaaccacaagcctagcaacaccaaggtggacaagagagtggaacccaagagctgtgaagtgaaaaccgactccaccgaccacgtgaagcccaaagagacagagaacaccaagcagcccagcaagagctgccacaagcccaaggccatcgtgcacaccgagaaagtgaacatgatgagcctgaccgtgctgggcctgcggatgctgttcgccaaaaccgtggccgtgaacttcctgctgaccgccaagctgttcttcctc

SEQ ID NO: 8711 - DNA, 2283 bp, Artificial Sequence
  Synthetic Polynucloetide
atggccttaccagtgaccgccttgctcctgccgctggccttgctgctccacgccgccaggccggaagtgcagctggttgaatctggcggaggactggttcagcctggcggatctctgagactgtcttgtgccgccagcggcttcagcttcagcgacttttggatgagctgggtccgacaggcccctggcaaaggacttgaatgggtcgccacaatcagccaggccggcagcgagaaggactacgtggactctgtgaagggcagattcaccatcagccgggacaacgccaagaagtccctgtacctccagatgaacagcctgagagccgaggacaccgccgtgtactattgtgcctctggcgtgtacagcttcgactacagaggccagggcaccctggtcacagtctcttctggtaccggcggaggcggatctggcggcggaggtagcggtggcggaggatctgaattcgatattcagctgacccagagccacaagtttctgagcaccagcgtgggcgacagagtgtccatcacctgtaaagccagccaggacgtgtacaacgccgtggcctggtatcagcagaagcctggacagagccccaagctgctgatctacagcgccagcagcagatacacaggcgtgcccagcagattcaccggctctggatctggccccgacttcacctttaccatcagctctgtgcaggccgaggacctggccgtgtacttttgtcagcagcacttcagaacccctttcaccttcggcagcggcaccaagctggaaatcaagctcgagggacagcctaaggccaatcctaccgtgacactgttccctccaagcagcgaagaactccaggccaacaaggccacacttgtgtgcctgatctccgacttctaccctggggctgtgacagtggcttggaaggccgatggatctcctgtgaaagccggcgtggaaaccaccaagccatccaagcagagcaacaacaaatacgccgccagctcctacctgagcctgacacctgagcagtggaagtcccacagatcctacagctgccaagtgacccacgaaggcagcaccgtggaaaagacagtggcccctacagagtgcagcggcagagccgattgcggctttaccagcgagagctaccagcagggcgtgctgagcgccaccatcctgtacgagatcctgctgggcaaggccaccctgtacgccgtgctggtgtctgccctggtgctgatggctatggtcaagcggaaggacagccggggacgcgccaagagaagcggatctggcgtgaagcagaccctgaatttcgacctgctgaagctggctggcgacgtggaatccaacccaggccctactagtatggactggatttggcgcatccttttccttgtcggcgctgctaccggcgcgcattccttcgaacaggttcagctccagcagtctggacccgagctgaagaaacctggcgagacagtgaagatcagctgcaaggccagcggctaccccttcaccaactacggcatgaactgggtcaagcaggcccctggacagggcctgaaatggatgggctggatcaataccagcaccggcgagagcaccttcgccgacgatttcaagggcagattcgacttcagcctggaaaccagcgccaacaccgcctacctccagatcaacaacctgaagtccgaggatatggctacctacttctgcgccagatgggaagtgtaccacggctacgtgccatattggggccagggcacaaccgtgacagtctcttctacgcgtgcctctacaaagggaccctccgtgtttcctctggctcccagcagcaagtctacaagcggaggaacagccgctctgggctgcctggtcaaggattactttcccgagcctgtgaccgtgtcctggaatagcggagcactgacaagcggcgtgcacacctttccagccgtgctgcaaagcagcggcctgtactctctgagcagcgtggtcacagtgcctagctctagcctgggcacccagacctacatctgcaatgtgaaccacaagcctagcaacaccaaggtggacaagagagtggaacccaagagctgtatccccgaggacacattcttcccaagccccgagagcagctgcgacgtgaagctggtggaaaagagcttcgagacagacaccaacctgaacttccagaacctgagcgtgatcggcttcagaatcctgctgctgaaagtggccggctttaacctgctgatgaccctgcggctgtggtccagc

SEQ ID NO: 8712 - DNA, 2685 bp, Artificial Sequence
  Synthetic Polynucloetide
atggccttaccagtgaccgccttgctcctgccgctggccttgctgctccacgccgccaggccggaagtgcagctggttgaatctggcggaggactggttcagcctggcggatctctgagactgtcttgtgccgccagcggcttcagcttcagcgacttttggatgagctgggtccgacaggcccctggcaaaggacttgaatgggtcgccacaatcagccaggccggcagcgagaaggactacgtggactctgtgaagggcagattcaccatcagccgggacaacgccaagaagtccctgtacctccagatgaacagcctgagagccgaggacaccgccgtgtactattgtgcctctggcgtgtacagcttcgactacagaggccagggcaccctggtcacagtctcttctggtaccggcggaggcggatctggcggcggaggtagcggtggcggaggatctgaattcgatattcagctgacccagagccacaagtttctgagcaccagcgtgggcgacagagtgtccatcacctgtaaagccagccaggacgtgtacaacgccgtggcctggtatcagcagaagcctggacagagccccaagctgctgatctacagcgccagcagcagatacacaggcgtgcccagcagattcaccggctctggatctggccccgacttcacctttaccatcagctctgtgcaggccgaggacctggccgtgtacttttgtcagcagcacttcagaacccctttcaccttcggcagcggcaccaagctggaaatcaagctcgagatccagaaccctgatcctgccgtgtaccagctgcgggatagcaagagcagcgacaagagcgtgtgtctgttcaccgacttcgacagccagaccaacgtgtcccagagcaaggactccgacgtgtacatcaccgataagtgcgtgctggacatgcggagcatggacttcaagagcaactccgccgtggcctggtccaacaagtccgatttcgcctgcgccaacgccttcaacaacagcattatccccgaggacacattcttcccaagccccgagagcagctgcgacgtgaagctggtggaaaagagcttcgagacagacaccaacctgaacttccagaacctgagcgtgatcggcttcagaatcctgctgctgaaagtggccggctttaacctgctgatgaccctgcggctgtggtccagccgcgccaagagaagcggatctggcgtgaagcagaccctgaatttcgacctgctgaagctggctggcgacgtggaatccaacccaggccctactagtatggactggatttggcgcatccttttccttgtcggcgctgctaccggcgcgcattccgggccccagctccagctgcaagagtctggacctggcctggtcaagcctagcgagacactgagcctgacctgtaccgtgtccggcgatagcatcagcagcggcgattactactggggctggatcagacagcctcctggcaaaggactggaatggatcggccacatctactacagcggcgtgacctactacaaccccagcctgaagtccagagtgaccatcagcgtggacaccagccggaaccagttctccctgaagctgtctagcgtgacagccgccgataccgccgtgtactactgcaccagagaggacagcagcaactggcggagtagaggccagggaacactggtcacagttagctctggatccggcggaggcggaagtggaggcggaggatctggcggcggaggctctttcgaacaggttcagctccagcagtctggacccgagctgaagaaacctggcgagacagtgaagatcagctgcaaggccagcggctaccccttcaccaactacggcatgaactgggtcaagcaggcccctggacagggcctgaaatggatgggctggatcaataccagcaccggcgagagcaccttcgccgacgatttcaagggcagattcgacttcagcctggaaaccagcgccaacaccgcctacctccagatcaacaacctgaagtccgaggatatggctacctacttctgcgccagatgggaagtgtaccacggctacgtgccatattggggccagggcacaaccgtgacagtctcttctacgcgtgaggacctgaagaacgtgttcccacctgaggtggccgtgttcgagcctagcgaggccgagatcagccacacccagaaagccaccctcgtgtgcctggctaccggcttctaccccgaccatgtggaactgtcttggtgggtcaacggcaaagaggtgcacagcggcgtgtgtaccgacccccagccactgaaagaacagcccgccctgaacgacagccggtactgcctgagcagcagactgagagtgtccgccaccttctggcagaacccccggaaccacttcagatgccaggtgcagttctacggcctgagcgagaacgacgagtggacccaggacagagccaagcccgtgacccagatcgtgtctgccgaagcctggggcagagccgattgcggctttaccagcgagagctaccagcagggcgtgctgagcgccaccatcctgtacgagatcctgctgggcaaggccaccctgtacgccgtgctggtgtctgccctggtgctgatggctatggtcaagcggaaggacagccgggga

SEQ ID NO: 8713 - DNA, 3261 bp, Artificial Sequence
  Synthetic Polynucloetide
atggccttaccagtgaccgccttgctcctgccgctggccttgctgctccacgccgccaggccggaagtgcagctggttgaatctggcggaggactggttcagcctggcggatctctgagactgtcttgtgccgccagcggcttcagcttcagcgacttttggatgagctgggtccgacaggcccctggcaaaggacttgaatgggtcgccacaatcagccaggccggcagcgagaaggactacgtggactctgtgaagggcagattcaccatcagccgggacaacgccaagaagtccctgtacctccagatgaacagcctgagagccgaggacaccgccgtgtactattgtgcctctggcgtgtacagcttcgactacagaggccagggcaccctggtcacagtctcttctggtaccggcggaggcggatctggcggcggaggtagcggtggcggaggatctgaattcgatattcagctgacccagagccacaagtttctgagcaccagcgtgggcgacagagtgtccatcacctgtaaagccagccaggacgtgtacaacgccgtggcctggtatcagcagaagcctggacagagccccaagctgctgatctacagcgccagcagcagatacacaggcgtgcccagcagattcaccggctctggatctggccccgacttcacctttaccatcagctctgtgcaggccgaggacctggccgtgtacttttgtcagcagcacttcagaacccctttcaccttcggcagcggcaccaagctggaaatcaagctcgaggacctgaagaacgtgttcccacctgaggtggccgtgttcgagcctagcgaggccgagatcagccacacccagaaagccaccctcgtgtgcctggctaccggcttctaccccgaccatgtggaactgtcttggtgggtcaacggcaaagaggtgcacagcggcgtgtctaccgacccccagccactgaaagaacagcccgccctgaacgacagccggtactgcctgagcagcagactgagagtgtccgccaccttctggcagaacccccggaaccacttcagatgccaggtgcagttctacggcctgagcgagaacgacgagtggacccaggacagagccaagcccgtgacccagatcgtgtctgccgaagcctggggcagagccgattgcggatcccagagcttcggcctgctggaccccaagctgtgctacctgctggatggcatcctgttcatctacggcgtgatcctgaccgccctgttcctgagagtgaagttcagcagaagcgccgacgcccctgcctaccagcagggacagaaccaactgtacaacgagctgaacctgggcagacgggaagagtacgacgtgctggacaagcggagaggcagggaccctgagatgggcggaaagccccagcggagaaagaacccccaggaaggactgtataacgaactccagaaagacaagatggccgaagcctacagcgagatcggcatgaagggcgagcggagaagaggcaagggccacgatggcctgtaccagggcctgagcaccgccaccaaggacacctatgacgccctgcacatgcaggccctgcctccaagaagggccaagcgatctggatctggagcaacaaacttctcactactcaaacaagcaggtgacgtggaggagaatcccgggcctactagtatggactggatttggcgcatccttttccttgtcggcgctgctaccggcgcgcattccgggccccagctccagctgcaagagtctggacctggcctggtcaagcctagcgagacactgagcctgacctgtaccgtgtccggcgatagcatcagcagcggcgattactactggggctggatcagacagcctcctggcaaaggactggaatggatcggccacatctactacagcggcgtgacctactacaaccccagcctgaagtccagagtgaccatcagcgtggacaccagccggaaccagttctccctgaagctgtctagcgtgacagccgccgataccgccgtgtactactgcaccagagaggacagcagcaactggcggagtagaggccagggaacactggtcacagttagctctggatccggcggaggcggaagtggaggcggaggatctggcggcggaggctctttcgaacaggttcagctccagcagtctggacccgagctgaagaaacctggcgagacagtgaagatcagctgcaaggccagcggctaccccttcaccaactacggcatgaactgggtcaagcaggcccctggacagggcctgaaatggatgggctggatcaataccagcaccggcgagagcaccttcgccgacgatttcaagggcagattcgacttcagcctggaaaccagcgccaacaccgcctacctccagatcaacaacctgaagtccgaggatatggctacctacttctgcgccagatgggaagtgtaccacggctacgtgccatattggggccagggcacaaccgtgacagtctcttctacgcgtatccagaaccctgatcctgccgtgtaccagctgcgggatagcaagagcagcgacaagagcgtgtgtctgttcaccgacttcgacagccagaccaacgtgtcccagagcaaggactccgacgtgtacatcaccgataagaccgtgctggacatgcggagcatggacttcaagagcaactccgccgtggcctggtccaacaagtccgatttcgcctgcgccaacgccttcaacaacagcattatccccgaggacacattcttcccaagccccgagagcagctgcggtacccagagttttgggttgttggaccctaaattgtgctatctgttggacggaatcctgttcatttacggagtgatcctgaccgcattgttcctgcgggttaagttttccagatccgcagacgcacccgcttaccaacaagggcagaaccaactctacaatgaacttaatttggggcggagggaagagtacgacgttctggacaaaaggaggggacgagatcccgagatgggcggaaagcctcagcgaaggaagaatccgcaagaggggctttataacgaactccagaaagataaaatggcagaagcctatagtgagattgggatgaagggagaaaggaggaggggtaaaggtcacgatgggttgtaccaaggattgagcacagccactaaagatacctatgatgcgctccacatgcaggccctgccgccaaga

SEQ ID NO: 8714 - DNA, 2751 bp, Artificial Sequence
  Synthetic Polynucloetide
atggccttaccagtgaccgccttgctcctgccgctggccttgctgctccacgccgccaggccggaagtgcagctggttgaatctggcggaggactggttcagcctggcggatctctgagactgtcttgtgccgccagcggcttcagcttcagcgacttttggatgagctgggtccgacaggcccctggcaaaggacttgaatgggtcgccacaatcagccaggccggcagcgagaaggactacgtggactctgtgaagggcagattcaccatcagccgggacaacgccaagaagtccctgtacctccagatgaacagcctgagagccgaggacaccgccgtgtactattgtgcctctggcgtgtacagcttcgactacagaggccagggcaccctggtcacagtctcttctggtaccggcggaggcggatctggcggcggaggtagcggtggcggaggatctgaattcgatattcagctgacccagagccacaagtttctgagcaccagcgtgggcgacagagtgtccatcacctgtaaagccagccaggacgtgtacaacgccgtggcctggtatcagcagaagcctggacagagccccaagctgctgatctacagcgccagcagcagatacacaggcgtgcccagcagattcaccggctctggatctggccccgacttcacctttaccatcagctctgtgcaggccgaggacctggccgtgtacttttgtcagcagcacttcagaacccctttcaccttcggcagcggcaccaagctggaaatcaagctcgagggacagcctaaggccaatcctaccgtgacactgttccctccaagcagcgaagaactccaggccaacaaggccacacttgtgtgcctgatctccgacttctaccctggggctgtgacagtggcttggaaggccgatggatctcctgtgaaagccggcgtggaaaccaccaagccatccaagcagagcaacaacaaatacgccgccagctcctacctgagcctgacacctgagcagtggaagtcccacagatcctacagctgccaagtgacccacgaaggcagcaccgtggaaaagacagtggcccctacagagtgcagccccatcaagaccgatgtgattacaatggaccccaaggacaactgctccaaggacgccaacgataccctgctgctccagctgaccaacaccagcgcctactacatgtacttgttgctgctgctgaagtccgtggtgtacttcgccatcatcacatgctgcctgctgcggagaaccgccttctgctgcaacggcgagaagtctagggccaagcgatctggatctggagcaacaaacttctcactactcaaacaagcaggtgacgtggaggagaatcccgggcctactagtatggactggatttggcgcatccttttccttgtcggcgctgctaccggcgcgcattccgggccccagctccagctgcaagagtctggacctggcctggtcaagcctagcgagacactgagcctgacctgtaccgtgtccggcgatagcatcagcagcggcgattactactggggctggatcagacagcctcctggcaaaggactggaatggatcggccacatctactacagcggcgtgacctactacaaccccagcctgaagtccagagtgaccatcagcgtggacaccagccggaaccagttctccctgaagctgtctagcgtgacagccgccgataccgccgtgtactactgcaccagagaggacagcagcaactggcggagtagaggccagggaacactggtcacagttagctctggatccggcggaggcggaagtggaggcggaggatctggcggcggaggctctttcgaacaggttcagctccagcagtctggacccgagctgaagaaacctggcgagacagtgaagatcagctgcaaggccagcggctaccccttcaccaactacggcatgaactgggtcaagcaggcccctggacagggcctgaaatggatgggctggatcaataccagcaccggcgagagcaccttcgccgacgatttcaagggcagattcgacttcagcctggaaaccagcgccaacaccgcctacctccagatcaacaacctgaagtccgaggatatggctacctacttctgcgccagatgggaagtgtaccacggctacgtgccatattggggccagggcacaaccgtgacagtctcttctacgcgtgcctctacaaagggaccctccgtgtttcctctggctcccagcagcaagtctacaagcggaggaacagccgctctgggctgcctggtcaaggattactttcccgagcctgtgaccgtgtcctggaatagcggagcactgacaagcggcgtgcacacctttccagccgtgctgcaaagcagcggcctgtactctctgagcagcgtggtcacagtgcctagctctagcctgggcacccagacctacatctgcaatgtgaaccacaagcctagcaacaccaaggtggacaagagagtggaacccaagagctgtgaagtgaaaaccgactccaccgaccacgtgaagcccaaagagacagagaacaccaagcagcccagcaagagctgccacaagcccaaggccatcgtgcacaccgagaaagtgaacatgatgagcctgaccgtgctgggcctgcggatgctgttcgccaaaaccgtggccgtgaacttcctgctgaccgccaagctgttcttcctc

SEQ ID NO: 8715 - DNA, 2694 bp, Artificial Sequence
  Synthetic Polynucloetide
atggccttaccagtgaccgccttgctcctgccgctggccttgctgctccacgccgccaggccggaagtgcagctggttgaatctggcggaggactggttcagcctggcggatctctgagactgtcttgtgccgccagcggcttcagcttcagcgacttttggatgagctgggtccgacaggcccctggcaaaggacttgaatgggtcgccacaatcagccaggccggcagcgagaaggactacgtggactctgtgaagggcagattcaccatcagccgggacaacgccaagaagtccctgtacctccagatgaacagcctgagagccgaggacaccgccgtgtactattgtgcctctggcgtgtacagcttcgactacagaggccagggcaccctggtcacagtctcttctggtaccggcggaggcggatctggcggcggaggtagcggtggcggaggatctgaattcgatattcagctgacccagagccacaagtttctgagcaccagcgtgggcgacagagtgtccatcacctgtaaagccagccaggacgtgtacaacgccgtggcctggtatcagcagaagcctggacagagccccaagctgctgatctacagcgccagcagcagatacacaggcgtgcccagcagattcaccggctctggatctggccccgacttcacctttaccatcagctctgtgcaggccgaggacctggccgtgtacttttgtcagcagcacttcagaacccctttcaccttcggcagcggcaccaagctggaaatcaagctcgagggacagcctaaggccaatcctaccgtgacactgttccctccaagcagcgaagaactccaggccaacaaggccacacttgtgtgcctgatctccgacttctaccctggggctgtgacagtggcttggaaggccgatggatctcctgtgaaagccggcgtggaaaccaccaagccatccaagcagagcaacaacaaatacgccgccagctcctacctgagcctgacacctgagcagtggaagtcccacagatcctacagctgccaagtgacccacgaaggcagcaccgtggaaaagacagtggcccctacagagtgcagcggcagagccgattgcggctttaccagcgagagctaccagcagggcgtgctgagcgccaccatcctgtacgagatcctgctgggcaaggccaccctgtacgccgtgctggtgtctgccctggtgctgatggctatggtcaagcggaaggacagccggggacgcgccaagagaagcggatctggcgtgaagcagaccctgaatttcgacctgctgaagctggctggcgacgtggaatccaacccaggccctactagtatggactggatttggcgcatccttttccttgtcggcgctgctaccggcgcgcattccgggccccagctccagctgcaagagtctggacctggcctggtcaagcctagcgagacactgagcctgacctgtaccgtgtccggcgatagcatcagcagcggcgattactactggggctggatcagacagcctcctggcaaaggactggaatggatcggccacatctactacagcggcgtgacctactacaaccccagcctgaagtccagagtgaccatcagcgtggacaccagccggaaccagttctccctgaagctgtctagcgtgacagccgccgataccgccgtgtactactgcaccagagaggacagcagcaactggcggagtagaggccagggaacactggtcacagttagctctggatccggcggaggcggaagtggaggcggaggatctggcggcggaggctctttcgaacaggttcagctccagcagtctggacccgagctgaagaaacctggcgagacagtgaagatcagctgcaaggccagcggctaccccttcaccaactacggcatgaactgggtcaagcaggcccctggacagggcctgaaatggatgggctggatcaataccagcaccggcgagagcaccttcgccgacgatttcaagggcagattcgacttcagcctggaaaccagcgccaacaccgcctacctccagatcaacaacctgaagtccgaggatatggctacctacttctgcgccagatgggaagtgtaccacggctacgtgccatattggggccagggcacaaccgtgacagtctcttctacgcgtgcctctacaaagggaccctccgtgtttcctctggctcccagcagcaagtctacaagcggaggaacagccgctctgggctgcctggtcaaggattactttcccgagcctgtgaccgtgtcctggaatagcggagcactgacaagcggcgtgcacacctttccagccgtgctgcaaagcagcggcctgtactctctgagcagcgtggtcacagtgcctagctctagcctgggcacccagacctacatctgcaatgtgaaccacaagcctagcaacaccaaggtggacaagagagtggaacccaagagctgtatccccgaggacacattcttcccaagccccgagagcagctgcgacgtgaagctggtggaaaagagcttcgagacagacaccaacctgaacttccagaacctgagcgtgatcggcttcagaatcctgctgctgaaagtggccggctttaacctgctgatgaccctgcggctgtggtccagc

SEQ ID NO: 8716 - DNA, 2265 bp, Artificial Sequence
  Synthetic Polynucloetide
atggccttaccagtgaccgccttgctcctgccgctggccttgctgctccacgccgccaggccggaagtgcaggttttggagtctggcggaggactggttcagcctggcggatctctgagactgtcttgtgccgccagcggcttcaccttcagcaactttgccatgagctgggtccgacaggcccctggcaaaggacttgaatgggtgtccacaatcagcggcagcgccggcacaacagattacgccgattctgtgaagggcagattcaccatcagccgggacaacagcaagaaaaccctgtacctccagatgaacagcctgcgcgtggaagataccgccgtgtactactgtgccgatggcagaggccccttcttcgattatcgcggccagggcacactggtcaccgtttcttctggtaccggcggaggcggatctggcggcggaggtagcggtggcggaggatctgaattcgatattcagctgacccagagccacaagtttctgagcaccagcgtgggcgacagagtgtccatcacctgtaaagccagccaggacgtgtacaacgccgtggcctggtatcagcagaagcctggacagagccccaagctgctgatctacagcgccagcagcagatacacaggcgtgcccagcagattcaccggctctggatctggccccgacttcacctttaccatcagctctgtgcaggccgaggacctggccgtgtacttttgtcagcagcacttcagaacccctttcaccttcggcagcggcaccaagctggaaatcaagctcgaggacctgaagaacgtgttcccacctgaggtggccgtgttcgagcctagcgaggccgagatcagccacacccagaaagccaccctcgtgtgcctggctaccggcttctaccccgaccatgtggaactgtcttggtgggtcaacggcaaagaggtgcacagcggcgtgtgtaccgacccccagccactgaaagaacagcccgccctgaacgacagccggtactgcctgagcagcagactgagagtgtccgccaccttctggcagaacccccggaaccacttcagatgccaggtgcagttctacggcctgagcgagaacgacgagtggacccaggacagagccaagcccgtgacccagatcgtgtctgccgaagcctggggcagagccgattgcggctttaccagcgagagctaccagcagggcgtgctgagcgccaccatcctgtacgagatcctgctgggcaaggccaccctgtacgccgtgctggtgtctgccctggtgctgatggctatggtcaagcggaaggacagccggggaagggccaagcgatctggatctggagcaacaaacttctcactactcaaacaagcaggtgacgtggaggagaatcccgggcctactagtatggactggatttggcgcatccttttccttgtcggcgctgctaccggcgcgcattccttcgaacaggttcagctccagcagtctggacccgagctgaagaaacctggcgagacagtgaagatcagctgcaaggccagcggctaccccttcaccaactacggcatgaactgggtcaagcaggcccctggacagggcctgaaatggatgggctggatcaataccagcaccggcgagagcaccttcgccgacgatttcaagggcagattcgacttcagcctggaaaccagcgccaacaccgcctacctccagatcaacaacctgaagtccgaggatatggctacctacttctgcgccagatgggaagtgtaccacggctacgtgccatattggggccagggcacaaccgtgacagtctcttctacgcgtatccagaaccctgatcctgccgtgtaccagctgcgggatagcaagagcagcgacaagagcgtgtgtctgttcaccgacttcgacagccagaccaacgtgtcccagagcaaggactccgacgtgtacatcaccgataagtgcgtgctggacatgcggagcatggacttcaagagcaactccgccgtggcctggtccaacaagtccgatttcgcctgcgccaacgccttcaacaacagcattatccccgaggacacattcttcccaagccccgagagcagctgcgacgtgaagctggtggaaaagagcttcgagacagacaccaacctgaacttccagaacctgagcgtgatcggcttcagaatcctgctgctgaaagtggccggctttaacctgctgatgaccctgcggctgtggtccagc

SEQ ID NO: 8717 - DNA, 2268 bp, Artificial Sequence
  Synthetic Polynucloetide
atggccttaccagtgaccgccttgctcctgccgctggccttgctgctccacgccgccaggccggatattcagctgacccagagccacaagtttctgagcaccagcgtgggcgacagagtgtccatcacctgtaaagccagccaggacgtgtacaacgccgtggcctggtatcagcagaagcctggacagagccccaagctgctgatctacagcgccagcagcagatacacaggcgtgcccagcagattcaccggctctggatctggccccgacttcacctttaccatcagctctgtgcaggccgaggacctggccgtgtacttttgtcagcagcacttcagaacccctttcaccttcggcagcggcaccaagctggaaatcaagctcgaggacctgaagaacgtgttcccacctgaggtggccgtgttcgagcctagcgaggccgagatcagccacacccagaaagccaccctcgtgtgcctggctaccggcttctaccccgaccatgtggaactgtcttggtgggtcaacggcaaagaggtgcacagcggcgtgtgtaccgacccccagccactgaaagaacagcccgccctgaacgacagccggtactgcctgagcagcagactgagagtgtccgccaccttctggcagaacccccggaaccacttcagatgccaggtgcagttctacggcctgagcgagaacgacgagtggacccaggacagagccaagcccgtgacccagatcgtgtctgccgaagcctggggcagagccgattgcggctttaccagcgagagctaccagcagggcgtgctgagcgccaccatcctgtacgagatcctgctgggcaaggccaccctgtacgccgtgctggtgtctgccctggtgctgatggctatggtcaagcggaaggacagccggggaagggccaagcgatctggatctggagcaacaaacttctcactactcaaacaagcaggtgacgtggaggagaatcccgggcctactagtatggactggatttggcgcatccttttccttgtcggcgctgctaccggcgcccattccgggcccgaagtgcagctggttgaatctggcggaggactggttcaggctggcggatctctgagactgtcttgtgccgccagcggcagaacctttagcatgggctggtttagacaggcccctggcaaagagagagagttcgtcgccgccatcacatactctggcggcagcccttactacgccgactctgtgaagggcagattcaccatcagccgggacaacgccaagaacaccgtgtacctccagatgaacagcctgaagcctgaggacaccgccgtgtactactgcgccgccaatccaacatacggcagcgactggaacgccgagaattggggccagggaacccaagtgacagtgtctagcggatccggcggcggaggatctggcggaggcggatctgggggcggaggctctttcgaacaggttcagctccagcagtctggacccgagctgaagaaacctggcgagacagtgaagatcagctgcaaggccagcggctaccccttcaccaactacggcatgaactgggtcaagcaggcccctggacagggcctgaaatggatgggctggatcaataccagcaccggcgagagcaccttcgccgacgatttcaagggcagattcgacttcagcctggaaaccagcgccaacaccgcctacctccagatcaacaacctgaagtccgaggatatggctacctacttctgcgccagatgggaagtgtaccacggctacgtgccatattggggccagggcacaaccgtgacagtctcttctacgcgtatccagaaccctgatcctgccgtgtaccagctgcgggatagcaagagcagcgacaagagcgtgtgtctgttcaccgacttcgacagccagaccaacgtgtcccagagcaaggactccgacgtgtacatcaccgataagtgcgtgctggacatgcggagcatggacttcaagagcaactccgccgtggcctggtccaacaagtccgatttcgcctgcgccaacgccttcaacaacagcattatccccgaggacacattcttcccaagccccgagagcagctgcgacgtgaagctggtggaaaagagcttcgagacagacaccaacctgaacttccagaacctgagcgtgatcggcttcagaatcctgctgctgaaagtggccggctttaacctgctgatgaccctgcggctgtggtccagc

SEQ ID NO: 8718 - DNA, 2649 bp, Artificial Sequence
  Synthetic Polynucloetide
atggccttaccagtgaccgccttgctcctgccgctggccttgctgctccacgccgccaggccggatattcagctgacccagagccacaagtttctgagcaccagcgtgggcgacagagtgtccatcacctgtaaagccagccaggacgtgtacaacgccgtggcctggtatcagcagaagcctggacagagccccaagctgctgatctacagcgccagcagcagatacacaggcgtgcccagcagattcaccggctctggatctggccccgacttcacctttaccatcagctctgtgcaggccgaggacctggccgtgtacttttgtcagcagcacttcagaacccctttcaccttcggcagcggcaccaagctggaaatcaagctcgaggacctgaagaacgtgttcccacctgaggtggccgtgttcgagcctagcgaggccgagatcagccacacccagaaagccaccctcgtgtgcctggctaccggcttctaccccgaccatgtggaactgtcttggtgggtcaacggcaaagaggtgcacagcggcgtgtgtaccgacccccagccactgaaagaacagcccgccctgaacgacagccggtactgcctgagcagcagactgagagtgtccgccaccttctggcagaacccccggaaccacttcagatgccaggtgcagttctacggcctgagcgagaacgacgagtggacccaggacagagccaagcccgtgacccagatcgtgtctgccgaagcctggggcagagccgattgcggctttaccagcgagagctaccagcagggcgtgctgagcgccaccatcctgtacgagatcctgctgggcaaggccaccctgtacgccgtgctggtgtctgccctggtgctgatggctatggtcaagcggaaggacagccggggaagggccaagcgatctggatctggagcaacaaacttctcactactcaaacaagcaggtgacgtggaggagaatcccgggcctactagtatggactggatttggcgcatccttttccttgtcggcgctgctaccggcgcccattcccaactgcaactgcaagagtctggccctggcctggtcaagccttctgaaaccctgagcctgacctgtaccgtgtccggcggctctatcagcagcggcgattactactggggctggatcagacagcctccaggcaagggactcgaatggatcggcagcatcagctacagcggctccacctactacaacccaagcctgaagtccagagtgaccatcagcgtggacaccagcagaaaccagttctccctgaagctgagcagcgtgacagccgccgatacagccgtgtattattgcaccagagaggacagcagcaactggcggagtagaggacagggcacactggtcacagtgtcctcttctggaggcggtggaagcggtggaggaggatctgaagtgcagctggttgaatctggcggaggactggttcaggctggcggatctctgagactgtcttgtgccgccagcggcagaacctttagcatgggctggtttagacaggcccctggcaaagagagagagttcgtcgccgccatcacatactctggcggcagcccttactacgccgactctgtgaagggcagattcaccatcagccgggacaacgccaagaacaccgtgtacctccagatgaacagcctgaagcctgaggacaccgccgtgtactactgcgccgccaatccaacatacggcagcgactggaacgccgagaattggggccagggaacccaagtgacagtgtctagcggatccggcggcggaggatctggcggaggcggatctgggggcggaggctctttcgaacaggttcagctccagcagtctggacccgagctgaagaaacctggcgagacagtgaagatcagctgcaaggccagcggctaccccttcaccaactacggcatgaactgggtcaagcaggcccctggacagggcctgaaatggatgggctggatcaataccagcaccggcgagagcaccttcgccgacgatttcaagggcagattcgacttcagcctggaaaccagcgccaacaccgcctacctccagatcaacaacctgaagtccgaggatatggctacctacttctgcgccagatgggaagtgtaccacggctacgtgccatattggggccagggcacaaccgtgacagtctcttctacgcgtatccagaaccctgatcctgccgtgtaccagctgcgggatagcaagagcagcgacaagagcgtgtgtctgttcaccgacttcgacagccagaccaacgtgtcccagagcaaggactccgacgtgtacatcaccgataagtgcgtgctggacatgcggagcatggacttcaagagcaactccgccgtggcctggtccaacaagtccgatttcgcctgcgccaacgccttcaacaacagcattatccccgaggacacattcttcccaagccccgagagcagctgcgacgtgaagctggtggaaaagagcttcgagacagacaccaacctgaacttccagaacctgagcgtgatcggcttcagaatcctgctgctgaaagtggccggctttaacctgctgatgaccctgcggctgtggtccagc

SEQ ID NO: 8719 - DNA, 2676 bp, Artificial Sequence
  Synthetic Polynucloetide
atggccttaccagtgaccgccttgctcctgccgctggccttgctgctccacgccgccaggccggaagtgcaggttttggagtctggcggaggactggttcagcctggcggatctctgagactgtcttgtgccgccagcggcttcaccttcagcaactttgccatgagctgggtccgacaggcccctggcaaaggacttgaatgggtgtccacaatcagcggcagcgccggcacaacagattacgccgattctgtgaagggcagattcaccatcagccgggacaacagcaagaaaaccctgtacctccagatgaacagcctgcgcgtggaagataccgccgtgtactactgtgccgatggcagaggccccttcttcgattatcgcggccagggcacactggtcaccgtttcttctggtaccggcggaggcggatctggcggcggaggtagcggtggcggaggatctgaattcgatattcagctgacccagagccacaagtttctgagcaccagcgtgggcgacagagtgtccatcacctgtaaagccagccaggacgtgtacaacgccgtggcctggtatcagcagaagcctggacagagccccaagctgctgatctacagcgccagcagcagatacacaggcgtgcccagcagattcaccggctctggatctggccccgacttcacctttaccatcagctctgtgcaggccgaggacctggccgtgtacttttgtcagcagcacttcagaacccctttcaccttcggcagcggcaccaagctggaaatcaagctcgaggacctgaagaacgtgttcccacctgaggtggccgtgttcgagcctagcgaggccgagatcagccacacccagaaagccaccctcgtgtgcctggctaccggcttctaccccgaccatgtggaactgtcttggtgggtcaacggcaaagaggtgcacagcggcgtgtgtaccgacccccagccactgaaagaacagcccgccctgaacgacagccggtactgcctgagcagcagactgagagtgtccgccaccttctggcagaacccccggaaccacttcagatgccaggtgcagttctacggcctgagcgagaacgacgagtggacccaggacagagccaagcccgtgacccagatcgtgtctgccgaagcctggggcagagccgattgcggctttaccagcgagagctaccagcagggcgtgctgagcgccaccatcctgtacgagatcctgctgggcaaggccaccctgtacgccgtgctggtgtctgccctggtgctgatggctatggtcaagcggaaggacagccggggaagggccaagcgatctggatctggagcaacaaacttctcactactcaaacaagcaggtgacgtggaggagaatcccgggcctactagtatggactggatttggcgcatccttttccttgtcggcgctgctaccggcgcccattccgggcccgaagtgcagctggttgaatctggcggaggactggttcaggctggcggatctctgagactgtcttgtgccgccagcggcagaacctttagcatgggctggtttagacaggcccctggcaaagagagagagttcgtcgccgccatcacatacagcggcggcagcccttactacgcctcttctgtcagaggccggttcaccatcagccgggacaacgccaagaacaccgtgtacctccagatgaacagcctgaagccagaggacaccgccgtgtactactgtgccgccaatccaacctacggcagcgactggaatgccgagaattggggccagggcacccaagtgacagtgtctagtggatccggcggcggaggatctggcggaggcggatctgggggcggaggctctttcgaacaggttcagctccagcagtctggacccgagctgaagaaacctggcgagacagtgaagatcagctgcaaggccagcggctaccccttcaccaactacggcatgaactgggtcaagcaggcccctggacagggcctgaaatggatgggctggatcaataccagcaccggcgagagcaccttcgccgacgatttcaagggcagattcgacttcagcctggaaaccagcgccaacaccgcctacctccagatcaacaacctgaagtccgaggatatggctacctacttctgcgccagatgggaagtgtaccacggctacgtgccatattggggccagggcacaaccgtgacagtctcttctacgcgtatccagaaccctgatcctgccgtgtaccagctgcgggatagcaagagcagcgacaagagcgtgtgtctgttcaccgacttcgacagccagaccaacgtgtcccagagcaaggactccgacgtgtacatcaccgataagtgcgtgctggacatgcggagcatggacttcaagagcaactccgccgtggcctggtccaacaagtccgatttcgcctgcgccaacgccttcaacaacagcattatccccgaggacacattcttcccaagccccgagagcagctgcgacgtgaagctggtggaaaagagcttcgagacagacaccaacctgaacttccagaacctgagcgtgatcggcttcagaatcctgctgctgaaagtggccggctttaacctgctgatgaccctgcggctgtggtccagc

SEQ ID NO: 8720 - DNA, 2169 bp, Artificial Sequence
  Synthetic Polynucloetide
atggccttaccagtgaccgccttgctcctgccgctggccttgctgctccacgccgccaggccggacatccagctgacacagagcccttctagcctgtctgccagcgtgggcgacagagtgaccatcacctgtaaagccagccaggacgtgggcacaagcgtggcatggtatcagcagaagcctggcaaggcccctaagctgctgatctactggaccagcaccagacacacaggcgtgcccagcagattttctggcagcggctctggcaccgacttcaccttcacaatatccagcctccagcctgaggacattgccacctactactgccagcagtacagcctgtaccgctctttcggccagggcaccaaggtggaaatcaaaggcggaggcggaagtggaggcggaggatctggcggcggaggctctgaagtgcagctggttgaatcaggtggcggcgttgtgcagcctggcagaagtctgagactgagctgtagcgccagcggcttcgatttcaccacctactggatgagctgggtccgacaggcccctggcaaaggactggaatggatcggcgagattcaccccgacagcagcaccatcaattacgcccctagcctgaaggacagattcaccatcagccgggacaacgccaagaacaccctgttcctccagatggactccctgaggccagaggataccggcgtgtacttttgcgccagcctgtatttcggcttcccttggtttgcctactggggccagggaacccctgtgacagttagctctacgcgtgagcagaaactgatctcggaagaggatctggcgaagcccaccacgacgccagcgccgcgaccaccaacaccggcgcccaccatcgcgtcgcagcccctgtccctgcgcccagaggcgtgccggccagcggcggggggcgcagtgcacacgagggggctggacttcgcctgtgacatctacatctgggcgcccttggccgggacttgtggggtccttctcctgtcactggttatcaccctttactgcaaacggggcagaaagaaactcctgtatatattcaaacaaccatttatgagaccagtacaaactactcaagaggaagatggctgtagctgccgatttccagaagaagaagaaggaggatgtgaactgagagtgaagttcagcaggagcgcagacgcccccgcgtaccagcagggccagaaccagctctataacgagctgaatctaggacgaagagaggagtacgatgttttggacaagagacgtggccgggaccctgagatggggggaaagccgagaaggaagaaccctcaggaaggcctgtacaatgaactgcagaaagataagatggcggaggcctacagtgagattgggatgaaaggcgagcgccggaggggcaaggggcacgatggcctttaccagggtctcagtacagccaccaaggacacctacgacgcccttcacatgcaggccctgccccctcgctctagtggctccggcgagggcagaggaagtctactaacctgcggagatgtggaagaaaatcctggcccacatatgaccgagtacaagcccacggtgcgcctcgccacccgcgacgacgtccccagggccgtacgcaccctcgccgccgcgttcgccgactaccccgccacgcgccacaccgtcgatccggaccgccacatcgagcgggtcaccgagctgcaagaactcttcctcacgcgcgtcgggctcgacatcggcaaggtgtgggtcgcggacgacggcgccgcggtggcggtctggaccacgccggagagcgtcgaagcgggggcggtgttcgccgagatcggcccgcgcatggccgagttgagcggttcccggctggccgcgcagcaacagatggaaggcctcctggcgccgcaccggcccaaggagcccgcgtggttcctggccaccgtcggcgtctcgcccgaccaccagggcaagggtctgggcagcgccgtcgtgctccccggagtggaggcggccgagcgcgccggggtgcccgccttcctggagacctccgcgccccgcaacctccccttctacgagcggctcggcttcaccgtcaccgccgacgtcgaggtgcccgaaggaccgcgcacctggtgcatgacccgcaagcccggtgcctga

SEQ ID NO: 8721 - DNA, 2151 bp, Artificial Sequence
  Synthetic Polynucloetide
atggccttaccagtgaccgccttgctcctgccgctggccttgctgctccacgccgccaggccggacatccagctgacacagagcccttctagcctgtctgccagcgtgggcgacagagtgaccatcacctgtaaagccagccaggacgtgggcacaagcgtggcatggtatcagcagaagcctggcaaggcccctaagctgctgatctactggaccagcaccagacacacaggcgtgcccagcagattttctggcagcggctctggcaccgacttcaccttcacaatatccagcctccagcctgaggacattgccacctactactgccagcagtacagcctgtaccgctctttcggccagggcaccaaggtggaaatcaaaggcggaggcggaagtggaggcggaggatctggcggcggaggctctgaagtgcagctggttgaatcaggtggcggcgttgtgcagcctggcagaagtctgagactgagctgtagcgccagcggcttcgatttcaccacctactggatgagctgggtccgacaggcccctggcaaaggactggaatggatcggcgagattcaccccgacagcagcaccatcaattacgcccctagcctgaaggacagattcaccatcagccgggacaacgccaagaacaccctgttcctccagatggactccctgaggccagaggataccggcgtgtacttttgcgccagcctgtatttcggcttcccttggtttgcctactggggccagggaacccctgtgacagttagctctacgcgtgagcagaaactgatctcggaagaggatctgaaaattgaagttatgtatcctcctccttacctagacaatgagaagagcaatggaaccattatccatgtgaaagggaaacacctttgtccaagtcccctatttcccggaccttctaagcccttttgggtgctggtggtggttgggggagtcctggcttgctatagcttgctagtaacagtggcctttattattttctgggtgaggagtaagaggagcaggctcctgcacagtgactacatgaacatgactccacgccgccccggacccacccgcaagcattaccagccctatgccccaccacgcgacttcgcagcctatcgctccagagtgaagttcagcaggagcgcagacgcccccgcgtaccagcagggccagaaccagctctataacgagctcaatctaggacgaagagaggagtacgatgttttggacaagagacgtggccgggaccctgagatggggggaaagccgagaaggaagaaccctcaggaaggcctgtacaatgaactgcagaaagataagatggcggaggcctacagtgagattgggatgaaaggcgagcgccggaggggcaaggggcacgatggcctttaccagggtctcagtacagccaccaaggacacctacgacgcccttcacatgcaggccctgccccctcgctctagtggctccggcgagggcagaggaagtctactaacctgcggagatgtggaagaaaatcctggcccacatatgaccgagtacaagcccacggtgcgcctcgccacccgcgacgacgtccccagggccgtacgcaccctcgccgccgcgttcgccgactaccccgccacgcgccacaccgtcgatccggaccgccacatcgagcgggtcaccgagctgcaagaactcttcctcacgcgcgtcgggctcgacatcggcaaggtgtgggtcgcggacgacggcgccgcggtggcggtctggaccacgccggagagcgtcgaagcgggggcggtgttcgccgagatcggcccgcgcatggccgagttgagcggttcccggctggccgcgcagcaacagatggaaggcctcctggcgccgcaccggcccaaggagcccgcgtggttcctggccaccgtcggcgtctcgcccgaccaccagggcaagggtctgggcagcgccgtcgtgctccccggagtggaggcggccgagcgcgccggggtgcccgccttcctggagacctccgcgccccgcaacctccccttctacgagcggctcggcttcaccgtcaccgccgacgtcgaggtgcccgaaggaccgcgcacctggtgcatgacccgcaagcccggtgcctga

SEQ ID NO: 8722 - DNA, 1479 bp, Artificial Sequence
  Synthetic Polynucloetide
atggccttaccagtgaccgccttgctcctgccgctggccttgctgctccacgccgccaggccggacatccagctgacacagagcccttctagcctgtctgccagcgtgggcgacagagtgaccatcacctgtaaagccagccaggacgtgggcacaagcgtggcatggtatcagcagaagcctggcaaggcccctaagctgctgatctactggaccagcaccagacacacaggcgtgcccagcagattttctggcagcggctctggcaccgacttcaccttcacaatatccagcctccagcctgaggacattgccacctactactgccagcagtacagcctgtaccgctctttcggccagggcaccaaggtggaaatcaaaggcggaggcggaagtggaggcggaggatctggcggcggaggctctgaagtgcagctggttgaatcaggtggcggcgttgtgcagcctggcagaagtctgagactgagctgtagcgccagcggcttcgatttcaccacctactggatgagctgggtccgacaggcccctggcaaaggactggaatggatcggcgagattcaccccgacagcagcaccatcaattacgcccctagcctgaaggacagattcaccatcagccgggacaacgccaagaacaccctgttcctccagatggactccctgaggccagaggataccggcgtgtacttttgcgccagcctgtatttcggcttcccttggtttgcctactggggccagggaacccctgtgacagttagctctacgcgtgagcagaaactgatctcggaagaggatctgaaaattgaagttatgtatcctcctccttacctagacaatgagaagagcaatggaaccattatccatgtgaaagggaaacacctttgtccaagtcccctatttcccggaccttctaagcccttttgggtgctggtggtggttgggggagtcctggcttgctatagcttgctagtaacagtggcctttattattttctgggtgaggagtaagaggagcaggctcctgcacagtgactacatgaacatgactccacgccgccccggacccacccgcaagcattaccagccctatgccccaccacgcgacttcgcagcctatcgctccagagtgaagttcagcaggagcgcagacgcccccgcgtaccagcagggccagaaccagctctataacgagctcaatctaggacgaagagaggagtacgatgttttggacaagagacgtggccgggaccctgagatggggggaaagccgagaaggaagaaccctcaggaaggcctgtacaatgaactgcagaaagataagatggcggaggcctacagtgagattgggatgaaaggcgagcgccggaggggcaaggggcacgatggcctttaccagggtctcagtacagccaccaaggacacctacgacgcccttcacatgcaggccctgccccctcgc

SEQ ID NO: 8723 - DNA, 1500 bp, Artificial Sequence
  Synthetic Polynucloetide
atggccttaccagtgaccgccttgctcctgccgctggccttgctgctccacgccgccaggccggacatccagctgacacagagcccttctagcctgtctgccagcgtgggcgacagagtgaccatcacctgtaaagccagccaggacgtgggcacaagcgtggcatggtatcagcagaagcctggcaaggcccctaagctgctgatctactggaccagcaccagacacacaggcgtgcccagcagattttctggcagcggctctggcaccgacttcaccttcacaatatccagcctccagcctgaggacattgccacctactactgccagcagtacagcctgtaccgctctttcggccagggcaccaaggtggaaatcaaaggcggaggcggaagtggaggcggaggatctggcggcggaggctctgaagtgcagctggttgaatcaggtggcggcgttgtgcagcctggcagaagtctgagactgagctgtagcgccagcggcttcgatttcaccacctactggatgagctgggtccgacaggcccctggcaaaggactggaatggatcggcgagattcaccccgacagcagcaccatcaattacgcccctagcctgaaggacagattcaccatcagccgggacaacgccaagaacaccctgttcctccagatggactccctgaggccagaggataccggcgtgtacttttgcgccagcctgtatttcggcttcccttggtttgcctactggggccagggaacccctgtgacagttagctctacgcgtgagcagaaactgatctcggaagaggatctggcgaagcccaccacgacgccagcgccgcgaccaccaacaccggcgcccaccatcgcgtcgcagcccctgtccctgcgcccagaggcgtgccggccagcggcggggggcgcagtgcacacgagggggctggacttcgcctgtgacatctacatctgggcgcccttggccgggacttgtggggtccttctcctgtcactggttatcaccctttactgcaaacggggcagaaagaaactcctgtatatattcaaacaaccatttatgagaccagtacaaactactcaagaggaagatggctgtagctgccgatttccagaagaagaagaaggaggatgtgaactgagagtgaagttcagcaggagcgcagacgcccccgcgtaccagcagggccagaaccagctctataacgagctgaatctaggacgaagagaggagtacgatgttttggacaagagacgtggccgggaccctgagatggggggaaagccgagaaggaagaaccctcaggaaggcctgtacaatgaactgcagaaagataagatggcggaggcctacagtgagattgggatgaaaggcgagcgccggaggggcaaggggcacgatggcctttaccagggtctcagtacagccaccaaggacacctacgacgcccttcacatgcaggccctgccccctcgctga

SEQ ID NO: 8724 - DNA, 1500 bp, Artificial Sequence
  Synthetic Polynucloetide
atggccttaccagtgaccgccttgctcctgccgctggccttgctgctccacgccgccaggccggaagtgcagctggttgaatcaggtggcggcgttgtgcagcctggcagaagtctgagactgagctgtagcgccagcggcttcgatttcaccacctactggatgagctgggtccgacaggcccctggcaaaggactggaatggatcggcgagattcaccccgacagcagcaccatcaattacgcccctagcctgaaggacagattcaccatcagccgggacaacgccaagaacaccctgttcctccagatggactccctgaggccagaggataccggcgtgtacttttgcgccagcctgtatttcggcttcccttggtttgcctactggggccagggaacccctgtgacagttagctctggcggaggcggaagtggaggcggaggatctggcggcggaggctctgacatccagctgacacagagcccttctagcctgtctgccagcgtgggcgacagagtgaccatcacctgtaaagccagccaggacgtgggcacaagcgtggcatggtatcagcagaagcctggcaaggcccctaagctgctgatctactggaccagcaccagacacacaggcgtgcccagcagattttctggcagcggctctggcaccgacttcaccttcacaatatccagcctccagcctgaggacattgccacctactactgccagcagtacagcctgtaccgctctttcggccagggcaccaaggtggaaatcaaaacgcgtgagcagaaactgatctcggaagaggatctggcgaagcccaccacgacgccagcgccgcgaccaccaacaccggcgcccaccatcgcgtcgcagcccctgtccctgcgcccagaggcgtgccggccagcggcggggggcgcagtgcacacgagggggctggacttcgcctgtgacatctacatctgggcgcccttggccgggacttgtggggtccttctcctgtcactggttatcaccctttactgcaaacggggcagaaagaaactcctgtatatattcaaacaaccatttatgagaccagtacaaactactcaagaggaagatggctgtagctgccgatttccagaagaagaagaaggaggatgtgaactgagagtgaagttcagcaggagcgcagacgcccccgcgtaccagcagggccagaaccagctctataacgagctgaatctaggacgaagagaggagtacgatgttttggacaagagacgtggccgggaccctgagatggggggaaagccgagaaggaagaaccctcaggaaggcctgtacaatgaactgcagaaagataagatggcggaggcctacagtgagattgggatgaaaggcgagcgccggaggggcaaggggcacgatggcctttaccagggtctcagtacagccaccaaggacacctacgacgcccttcacatgcaggccctgccccctcgctga

SEQ ID NO: 8725 - DNA, 2739 bp, Artificial Sequence
  Synthetic Polynucloetide
atggccttaccagtgaccgccttgctcctgccgctggccttgctgctccacgccgccaggccggacatccagctgacacagagcccttctagcctgtctgccagcgtgggcgacagagtgaccatcacctgtaaagccagccaggacgtgggcacaagcgtggcatggtatcagcagaagcctggcaaggcccctaagctgctgatctactggaccagcaccagacacacaggcgtgcccagcagattttctggcagcggctctggcaccgacttcaccttcacaatatccagcctccagcctgaggacattgccacctactactgccagcagtacagcctgtaccgctctttcggccagggcaccaaggtggaaatcaaaggcggaggcggaagtggaggcggaggatctggcggcggaggctctgaagtgcagctggttgaatcaggtggcggcgttgtgcagcctggcagaagtctgagactgagctgtagcgccagcggcttcgatttcaccacctactggatgagctgggtccgacaggcccctggcaaaggactggaatggatcggcgagattcaccccgacagcagcaccatcaattacgcccctagcctgaaggacagattcaccatcagccgggacaacgccaagaacaccctgttcctccagatggactccctgaggccagaggataccggcgtgtacttttgcgccagcctgtatttcggcttcccttggtttgcctactggggccagggaacccctgtgacagttagctctacgcgtgagcagaaactgatctcggaagaggatctggcgaagcccaccacgacgccagcgccgcgaccaccaacaccggcgcccaccatcgcgtcgcagcccctgtccctgcgcccagaggcgtgccggccagcggcggggggcgcagtgcacacgagggggctggacttcgcctgtgacatctacatctgggcgcccttggccgggacttgtggggtccttctcctgtcactggttatcaccctttactgcgggcgcgccagagtgaagttcagcaggagcgcagacgcccccgcgtaccagcagggccagaaccagctctataacgagctgaatctaggacgaagagaggagtacgatgttttggacaagagacgtggccgggaccctgagatggggggaaagccgagaaggaagaaccctcaggaaggcctgtacaatgaactgcagaaagataagatggcggaggcctacagtgagattgggatgaaaggcgagcgccggaggggcaaggggcacgatggcctttaccagggtctcagtacagccaccaaggacacctacgacgcccttcacatgcaggccctgccccctcgctctagaggatctggagcaacaaacttctcactactcaaacaagcaggtgacgtggaggagaatcccgggcctgggatccacatggccacttacgaggttctctgtgaggtggcgcggaaactgggcacggatgacagggaagtggtattgttcctcctaaacgtgttcatacctcaacccacactggcccaattaattggagctcttagagctttaaaggaggagggcaggttaacgtttcccctgttagcggaatgtctgtttcgtgcaggtcgcagagacctcttgcgcgacctgcttcacttagacccgcgttttttagagcgccacctagcgggcacaatgagttatttcagcccttatcagctcactgttctccacgtagacggggagctgtgtgcgagggatattaggtctttgatatttttaagcaaggacactatagggtctcgcagcacaccacagacattcttacactgggtgtactgtatggaaaacttagacctactgggtcccactgacgtggatgccctaatgtcaatgcttagatctttgtcaagagtagacctacagcgccaagtgcaaaccctaatgggccttcacctttccggcccatcacactcccaacactatcgccatacaccactcgagaccgatttctacgactacaaggacgacgatgacaagactagtggctccggcgagggcagaggaagtctactaacctgcggagatgtggaagaaaatcctggcccacatatgaccgagtacaagcccacggtgcgcctcgccacccgcgacgacgtccccagggccgtacgcaccctcgccgccgcgttcgccgactaccccgccacgcgccacaccgtcgatccggaccgccacatcgagcgggtcaccgagctgcaagaactcttcctcacgcgcgtcgggctcgacatcggcaaggtgtgggtcgcggacgacggcgccgcggtggcggtctggaccacgccggagagcgtcgaagcgggggcggtgttcgccgagatcggcccgcgcatggccgagttgagcggttcccggctggccgcgcagcaacagatggaaggcctcctggcgccgcaccggcccaaggagcccgcgtggttcctggccaccgtcggcgtctcgcccgaccaccagggcaagggtctgggcagcgccgtcgtgctccccggagtggaggcggccgagcgcgccggggtgcccgccttcctggagacctccgcgccccgcaacctccccttctacgagcggctcggcttcaccgtcaccgccgacgtcgaggtgcccgaaggaccgcgcacctggtgcatgacccgcaagcccggtgcctga

SEQ ID NO: 8726 - DNA, 2559 bp, Artificial Sequence
  Synthetic Polynucloetide
atggccttaccagtgaccgccttgctcctgccgctggccttgctgctccacgccgccaggccggacatccagctgacacagagcccttctagcctgtctgccagcgtgggcgacagagtgaccatcacctgtaaagccagccaggacgtgggcacaagcgtggcatggtatcagcagaagcctggcaaggcccctaagctgctgatctactggaccagcaccagacacacaggcgtgcccagcagattttctggcagcggctctggcaccgacttcaccttcacaatatccagcctccagcctgaggacattgccacctactactgccagcagtacagcctgtaccgctctttcggccagggcaccaaggtggaaatcaaactcgagatccagaaccctgatcctgccgtgtaccagctgcgggatagcaagagcagcgacaagagcgtgtgtctgttcaccgacttcgacagccagaccaacgtgtcccagagcaaggactccgacgtgtacatcaccgataagtgcgtgctggacatgcggagcatggacttcaagagcaactccgccgtggcctggtccaacaagtccgatttcgcctgcgccaacgccttcaacaacagcattatccccgaggacacattcttcccaagcagcgacgtgccctgcgacgtgaagctggtggaaaagagcttcgagacagacaccaacctgaacttccagaacctgagcgtgatcggcttcagaatcctgctgctgaaagtggccggctttaacctgctgatgaccctgcggctgtggtccagccgcgccaagagaagcggatctggcgtgaagcagaccctgaatttcgacctgctgaagctggctggcgacgtggaatccaacccaggccctactagtatggactggatttggcgcatccttttccttgtcggcgctgctaccggcgcgcattccttcgaagaagtgcagctggttgaatcaggtggcggcgttgtgcagcctggcagaagtctgagactgagctgtagcgccagcggcttcgatttcaccacctactggatgagctgggtccgacaggcccctggcaaaggactggaatggatcggcgagattcaccccgacagcagcaccatcaattacgcccctagcctgaaggacagattcaccatcagccgggacaacgccaagaacaccctgttcctccagatggactccctgaggccagaggataccggcgtgtacttttgcgccagcctgtatttcggcttcccttggtttgcctactggggccagggaacccctgtgacagttagctctacgcgtgaggacctgaagaacgtgttcccacctgaggtggccgtgttcgagcctagcaaggccgagatcgcccacacccagaaagccaccctcgtgtgcctggctaccggcttctaccccgaccatgtggaactgtcttggtgggtcaacggcaaagaggtgcacagcggcgtgtgtaccgacccccagccactgaaagaacagcccgccctgaacgacagccggtactgcctgagcagcagactgagagtgtccgccaccttctggcagaacccccggaaccacttcagatgccaggtgcagttctacggcctgagcgagaacgacgagtggacccaggacagagccaagcccgtgacccagatcgtgtctgccgaagcctggggcagagccgattgcggcatcaccagcgccagctaccaccagggcgtgctgagcgccaccatcctgtacgagatcctgctgggcaaggccaccctgtacgccgtgctggtgtctgccctggtgctgatggctatggtcaagcggaaggacagccggggaagggccaagcgatctggatctggagcaacaaacttctcactactcaaacaagcaggtgacgtggaggagaatcccgggccttctagaggccatatgaccgagtacaagcccacggtgcgcctcgccacccgcgacgacgtccccagggccgtacgcaccctcgccgccgcgttcgccgactaccccgccacgcgccacaccgtcgatccggaccgccacatcgagcgggtcaccgagctgcaagaactcttcctcacgcgcgtcgggctcgacatcggcaaggtgtgggtcgcggacgacggcgccgcggtggcggtctggaccacgccggagagcgtcgaagcgggggcggtgttcgccgagatcggcccgcgcatggccgagttgagcggttcccggctggccgcgcagcaacagatggaaggcctcctggcgccgcaccggcccaaggagcccgcgtggttcctggccaccgtcggcgtctcgcccgaccaccagggcaagggtctgggcagcgccgtcgtgctccccggagtggaggcggccgagcgcgccggggtgcccgccttcctggagacctccgcgccccgcaacctccccttctacgagcggctcggcttcaccgtcaccgccgacgtcgaggtgcccgaaggaccgcgcacctggtgcatgacccgcaagcccggtgcctga

SEQ ID NO: 8727 - DNA, 2556 bp, Artificial Sequence
  Synthetic Polynucloetide
atggccttaccagtgaccgccttgctcctgccgctggccttgctgctccacgccgccaggccggacatccagctgacacagagcccttctagcctgtctgccagcgtgggcgacagagtgaccatcacctgtaaagccagccaggacgtgggcacaagcgtggcatggtatcagcagaagcctggcaaggcccctaagctgctgatctactggaccagcaccagacacacaggcgtgcccagcagattttctggcagcggctctggcaccgacttcaccttcacaatatccagcctccagcctgaggacattgccacctactactgccagcagtacagcctgtaccgctctttcggccagggcaccaaggtggaaatcaaactcgaggacctgaagaacgtgttcccacctgaggtggccgtgttcgagcctagcaaggccgagatcgcccacacccagaaagccaccctcgtgtgcctggctaccggcttctaccccgaccatgtggaactgtcttggtgggtcaacggcaaagaggtgcacagcggcgtgtgtaccgacccccagccactgaaagaacagcccgccctgaacgacagccggtactgcctgagcagcagactgagagtgtccgccaccttctggcagaacccccggaaccacttcagatgccaggtgcagttctacggcctgagcgagaacgacgagtggacccaggacagagccaagcccgtgacccagatcgtgtctgccgaagcctggggcagagccgattgcggcatcaccagcgccagctaccaccagggcgtgctgagcgccaccatcctgtacgagatcctgctgggcaaggccaccctgtacgccgtgctggtgtctgccctggtgctgatggctatggtcaagcggaaggacagccggggaagggccaagcgatctggatctggagcaacaaacttctcactactcaaacaagcaggtgacgtggaggagaatcccgggcctactagtatggactggatttggcgcatccttttccttgtcggcgctgctaccggcgcgcattccttcgaagaagtgcagctggttgaatcaggtggcggcgttgtgcagcctggcagaagtctgagactgagctgtagcgccagcggcttcgatttcaccacctactggatgagctgggtccgacaggcccctggcaaaggactggaatggatcggcgagattcaccccgacagcagcaccatcaattacgcccctagcctgaaggacagattcaccatcagccgggacaacgccaagaacaccctgttcctccagatggactccctgaggccagaggataccggcgtgtacttttgcgccagcctgtatttcggcttcccttggtttgcctactggggccagggaacccctgtgacagttagctctacgcgtatccagaaccctgatcctgccgtgtaccagctgcgggatagcaagagcagcgacaagagcgtgtgtctgttcaccgacttcgacagccagaccaacgtgtcccagagcaaggactccgacgtgtacatcaccgataagtgcgtgctggacatgcggagcatggacttcaagagcaactccgccgtggcctggtccaacaagtccgatttcgcctgcgccaacgccttcaacaacagcattatccccgaggacacattcttcccaagcagcgacgtgccctgcgacgtgaagctggtggaaaagagcttcgagacagacaccaacctgaacttccagaacctgagcgtgatcggcttcagaatcctgctgctgaaagtggccggctttaacctgctgatgaccctgcggctgtggtccagccgcgccaagagaagcggatctggcgtgaagcagaccctgaatttcgacctgctgaagctggctggcgacgtggaatccaacccaggcccttctagaggccatatgaccgagtacaagcccacggtgcgcctcgccacccgcgacgacgtccccagggccgtacgcaccctcgccgccgcgttcgccgactaccccgccacgcgccacaccgtcgatccggaccgccacatcgagcgggtcaccgagctgcaagaactcttcctcacgcgcgtcgggctcgacatcggcaaggtgtgggtcgcggacgacggcgccgcggtggcggtctggaccacgccggagagcgtcgaagcgggggcggtgttcgccgagatcggcccgcgcatggccgagttgagcggttcccggctggccgcgcagcaacagatggaaggcctcctggcgccgcaccggcccaaggagcccgcgtggttcctggccaccgtcggcgtctcgcccgaccaccagggcaagggtctgggcagcgccgtcgtgctccccggagtggaggcggccgagcgcgccggggtgcccgccttcctggagacctccgcgccccgcaacctccccttctacgagcggctcggcttcaccgtcaccgccgacgtcgaggtgcccgaaggaccgcgcacctggtgcatgacccgcaagcccggtgcctga

SEQ ID NO: 8728 - DNA, 1854 bp, Artificial Sequence
  Synthetic Polynucloetide
atggccttaccagtgaccgccttgctcctgccgctggccttgctgctccacgccgccaggccggacatccagctgacacagagcccttctagcctgtctgccagcgtgggcgacagagtgaccatcacctgtaaagccagccaggacgtgggcacaagcgtggcatggtatcagcagaagcctggcaaggcccctaagctgctgatctactggaccagcaccagacacacaggcgtgcccagcagattttctggcagcggctctggcaccgacttcaccttcacaatatccagcctccagcctgaggacattgccacctactactgccagcagtacagcctgtaccgctctttcggccagggcaccaaggtggaaatcaaactcgaggacctgaagaacgtgttcccacctgaggtggccgtgttcgagcctagcgaggccgagatcagccacacccagaaagccaccctcgtgtgcctggctaccggcttctaccccgaccatgtggaactgtcttggtgggtcaacggcaaagaggtgcacagcggcgtgtgtaccgacccccagccactgaaagaacagcccgccctgaacgacagccggtactgcctgagcagcagactgagagtgtccgccaccttctggcagaacccccggaaccacttcagatgccaggtgcagttctacggcctgagcgagaacgacgagtggacccaggacagagccaagcccgtgacccagatcgtgtctgccgaagcctggggcagagccgattgcggctttaccagcgagagctaccagcagggcgtgctgagcgccaccatcctgtacgagatcctgctgggcaaggccaccctgtacgccgtgctggtgtctgccctggtgctgatggctatggtcaagcggaaggacagccggggaagggccaagcgatctggatctggagcaacaaacttctcactactcaaacaagcaggtgacgtggaggagaatcccgggcctactagtatggactggatttggcgcatccttttccttgtcggcgctgctaccggcgcgcattccttcgaagaagtgcagctggttgaatcaggtggcggcgttgtgcagcctggcagaagtctgagactgagctgtagcgccagcggcttcgatttcaccacctactggatgagctgggtccgacaggcccctggcaaaggactggaatggatcggcgagattcaccccgacagcagcaccatcaattacgcccctagcctgaaggacagattcaccatcagccgggacaacgccaagaacaccctgttcctccagatggactccctgaggccagaggataccggcgtgtacttttgcgccagcctgtatttcggcttcccttggtttgcctactggggccagggaacccctgtgacagttagctctacgcgtatccagaaccctgatcctgccgtgtaccagctgcgggatagcaagagcagcgacaagagcgtgtgtctgttcaccgacttcgacagccagaccaacgtgtcccagagcaaggactccgacgtgtacatcaccgataagtgcgtgctggacatgcggagcatggacttcaagagcaactccgccgtggcctggtccaacaagtccgatttcgcctgcgccaacgccttcaacaacagcattatccccgaggacacattcttcccaagccccgagagcagctgcgacgtgaagctggtggaaaagagcttcgagacagacaccaacctgaacttccagaacctgagcgtgatcggcttcagaatcctgctgctgaaagtggccggctttaacctgctgatgaccctgcggctgtggtccagc

SEQ ID NO: 8729 - DNA, 2529 bp, Artificial Sequence
  Synthetic Polynucloetide
atggccttaccagtgaccgccttgctcctgccgctggccttgctgctccacgccgccaggccggacatccagctgacacagagcccttctagcctgtctgccagcgtgggcgacagagtgaccatcacctgtaaagccagccaggacgtgggcacaagcgtggcatggtatcagcagaagcctggcaaggcccctaagctgctgatctactggaccagcaccagacacacaggcgtgcccagcagattttctggcagcggctctggcaccgacttcaccttcacaatatccagcctccagcctgaggacattgccacctactactgccagcagtacagcctgtaccgctctttcggccagggcaccaaggtggaaatcaaactcgaggacctgaagaacgtgttcccacctgaggtggccgtgttcgagcctagcgaggccgagatcagccacacccagaaagccaccctcgtgtgcctggctaccggcttctaccccgaccatgtggaactgtcttggtgggtcaacggcaaagaggtgcacagcggcgtgtgtaccgacccccagccactgaaagaacagcccgccctgaacgacagccggtactgcctgagcagcagactgagagtgtccgccaccttctggcagaacccccggaaccacttcagatgccaggtgcagttctacggcctgagcgagaacgacgagtggacccaggacagagccaagcccgtgacccagatcgtgtctgccgaagcctggggcagagccgattgcggctttaccagcgagagctaccagcagggcgtgctgagcgccaccatcctgtacgagatcctgctgggcaaggccaccctgtacgccgtgctggtgtctgccctggtgctgatggctatggtcaagcggaaggacagccggggaagggccaagcgatctggatctggagcaacaaacttctcactactcaaacaagcaggtgacgtggaggagaatcccgggcctactagtatggactggatttggcgcatccttttccttgtcggcgctgctaccggcgcgcattccttcgaagaagtgcagctggttgaatcaggtggcggcgttgtgcagcctggcagaagtctgagactgagctgtagcgccagcggcttcgatttcaccacctactggatgagctgggtccgacaggcccctggcaaaggactggaatggatcggcgagattcaccccgacagcagcaccatcaattacgcccctagcctgaaggacagattcaccatcagccgggacaacgccaagaacaccctgttcctccagatggactccctgaggccagaggataccggcgtgtacttttgcgccagcctgtatttcggcttcccttggtttgcctactggggccagggaacccctgtgacagttagctctacgcgtatccagaaccctgatcctgccgtgtaccagctgcgggatagcaagagcagcgacaagagcgtgtgtctgttcaccgacttcgacagccagaccaacgtgtcccagagcaaggactccgacgtgtacatcaccgataagtgcgtgctggacatgcggagcatggacttcaagagcaactccgccgtggcctggtccaacaagtccgatttcgcctgcgccaacgccttcaacaacagcattatccccgaggacacattcttcccaagccccgagagcagctgcgacgtgaagctggtggaaaagagcttcgagacagacaccaacctgaacttccagaacctgagcgtgatcggcttcagaatcctgctgctgaaagtggccggctttaacctgctgatgaccctgcggctgtggtccagccgcgccaagagaagcggatctggcgtgaagcagaccctgaatttcgacctgctgaagctggctggcgacgtggaatccaacccaggcccttctagaggcgggatccacaccatggctacctacgaggtgctgtgcgaggtggcaagaaagctgggcaccgacgacagagaagtggtgctgttcctgctgaacgtgttcatccctcagcctacactggcccagctgatcggtgcactgagagccctgaaagaggaaggccggctgacctttcctctgctggccgaatgcctgttcagagccggaagaagggatctgctgcgggacctgctgcatctggaccccagatttctggaaagacacctggccggcaccatgagctacttcagcccttaccagctgaccgtgctgcacgttgacggcgaactgtgcgccagagatattcggagcctgatcttcctgagcaaggacaccatcggcagccggtctacccctcagacatttctgcactgggtgtactgcatggaaaacctggacctgctcggccccacagatgtggatgccctgatgtccatgctgagaagcctgagcagagtggacctccagagacaggtgcagacactgatgggactgcacctgagcggacctagccacagccagcactacagacacacccct

SEQ ID NO: 8730 - DNA, 1866 bp, Artificial Sequence
  Synthetic Polynucloetide
atggccttaccagtgaccgccttgctcctgccgctggccttgctgctccacgccgccaggccggacatccagctgacacagagcccttctagcctgtctgccagcgtgggcgacagagtgaccatcacctgtaaagccagccaggacgtgggcacaagcgtggcatggtatcagcagaagcctggcaaggcccctaagctgctgatctactggaccagcaccagacacacaggcgtgcccagcagattttctggcagcggctctggcaccgacttcaccttcacaatatccagcctccagcctgaggacattgccacctactactgccagcagtacagcctgtaccgctctttcggccagggcaccaaggtggaaatcaaactcgagatccagaaccctgatcctgccgtgtaccagctgcgggatagcaagagcagcgacaagagcgtgtgtctgttcaccgacttcgacagccagaccaacgtgtcccagagcaaggactccgacgtgtacatcaccgataagtgcgtgctggacatgcggagcatggacttcaagagcaactccgccgtggcctggtccaacaagtccgatttcgcctgcgccaacgccttcaacaacagcattatccccgaggacacattcttcccaagccccgagagcagctgcgacgtgaagctggtggaaaagagcttcgagacagacaccaacctgaacttccagaacctgagcgtgatcggcttcagaatcctgctgctgaaagtggccggctttaacctgctgatgaccctgcggctgtggtccagccgcgccaagagaagcggatctggcgtgaagcagaccctgaatttcgacctgctgaagctggctggcgacgtggaatccaacccaggccctactagtatggactggatttggcgcatccttttccttgtcggcgctgctaccggcgcgcattccttcgaagaagtgcagctggttgaatcaggtggcggcgttgtgcagcctggcagaagtctgagactgagctgtagcgccagcggcttcgatttcaccacctactggatgagctgggtccgacaggcccctggcaaaggactggaatggatcggcgagattcaccccgacagcagcaccatcaattacgcccctagcctgaaggacagattcaccatcagccgggacaacgccaagaacaccctgttcctccagatggactccctgaggccagaggataccggcgtgtacttttgcgccagcctgtatttcggcttcccttggtttgcctactggggccagggaacccctgtgacagttagctctacgcgtgaggacctgaagaacgtgttcccacctgaggtggccgtgttcgagcctagcgaggccgagatcagccacacccagaaagccaccctcgtgtgcctggctaccggcttctaccccgaccatgtggaactgtcttggtgggtcaacggcaaagaggtgcacagcggcgtgtgtaccgacccccagccactgaaagaacagcccgccctgaacgacagccggtactgcctgagcagcagactgagagtgtccgccaccttctggcagaacccccggaaccacttcagatgccaggtgcagttctacggcctgagcgagaacgacgagtggacccaggacagagccaagcccgtgacccagatcgtgtctgccgaagcctggggcagagccgattgcggctttaccagcgagagctaccagcagggcgtgctgagcgccaccatcctgtacgagatcctgctgggcaaggccaccctgtacgccgtgctggtgtctgccctggtgctgatggctatggtcaagcggaaggacagccgggga

SEQ ID NO: 8731 - DNA, 2532 bp, Artificial Sequence
  Synthetic Polynucloetide
atggccttaccagtgaccgccttgctcctgccgctggccttgctgctccacgccgccaggccggacatccagctgacacagagcccttctagcctgtctgccagcgtgggcgacagagtgaccatcacctgtaaagccagccaggacgtgggcacaagcgtggcatggtatcagcagaagcctggcaaggcccctaagctgctgatctactggaccagcaccagacacacaggcgtgcccagcagattttctggcagcggctctggcaccgacttcaccttcacaatatccagcctccagcctgaggacattgccacctactactgccagcagtacagcctgtaccgctctttcggccagggcaccaaggtggaaatcaaactcgagatccagaaccctgatcctgccgtgtaccagctgcgggatagcaagagcagcgacaagagcgtgtgtctgttcaccgacttcgacagccagaccaacgtgtcccagagcaaggactccgacgtgtacatcaccgataagtgcgtgctggacatgcggagcatggacttcaagagcaactccgccgtggcctggtccaacaagtccgatttcgcctgcgccaacgccttcaacaacagcattatccccgaggacacattcttcccaagccccgagagcagctgcgacgtgaagctggtggaaaagagcttcgagacagacaccaacctgaacttccagaacctgagcgtgatcggcttcagaatcctgctgctgaaagtggccggctttaacctgctgatgaccctgcggctgtggtccagccgcgccaagagaagcggatctggcgtgaagcagaccctgaatttcgacctgctgaagctggctggcgacgtggaatccaacccaggccctactagtatggactggatttggcgcatccttttccttgtcggcgctgctaccggcgcgcattccttcgaagaagtgcagctggttgaatcaggtggcggcgttgtgcagcctggcagaagtctgagactgagctgtagcgccagcggcttcgatttcaccacctactggatgagctgggtccgacaggcccctggcaaaggactggaatggatcggcgagattcaccccgacagcagcaccatcaattacgcccctagcctgaaggacagattcaccatcagccgggacaacgccaagaacaccctgttcctccagatggactccctgaggccagaggataccggcgtgtacttttgcgccagcctgtatttcggcttcccttggtttgcctactggggccagggaacccctgtgacagttagctctacgcgtgaggacctgaagaacgtgttcccacctgaggtggccgtgttcgagcctagcgaggccgagatcagccacacccagaaagccaccctcgtgtgcctggctaccggcttctaccccgaccatgtggaactgtcttggtgggtcaacggcaaagaggtgcacagcggcgtgtgtaccgacccccagccactgaaagaacagcccgccctgaacgacagccggtactgcctgagcagcagactgagagtgtccgccaccttctggcagaacccccggaaccacttcagatgccaggtgcagttctacggcctgagcgagaacgacgagtggacccaggacagagccaagcccgtgacccagatcgtgtctgccgaagcctggggcagagccgattgcggctttaccagcgagagctaccagcagggcgtgctgagcgccaccatcctgtacgagatcctgctgggcaaggccaccctgtacgccgtgctggtgtctgccctggtgctgatggctatggtcaagcggaaggacagccggggaagggccaagcgatctggatctggagcaacaaacttctcactactcaaacaagcaggtgacgtggaggagaatcccgggccttctagaggcgggatccacaccatggctacctacgaggtgctgtgcgaggtggcaagaaagctgggcaccgacgacagagaagtggtgctgttcctgctgaacgtgttcatccctcagcctacactggcccagctgatcggtgcactgagagccctgaaagaggaaggccggctgacctttcctctgctggccgaatgcctgttcagagccggaagaagggatctgctgcgggacctgctgcatctggaccccagatttctggaaagacacctggccggcaccatgagctacttcagcccttaccagctgaccgtgctgcacgttgacggcgaactgtgcgccagagatattcggagcctgatcttcctgagcaaggacaccatcggcagccggtctacccctcagacatttctgcactgggtgtactgcatggaaaacctggacctgctcggccccacagatgtggatgccctgatgtccatgctgagaagcctgagcagagtggacctccagagacaggtgcagacactgatgggactgcacctgagcggacctagccacagccagcactacagacacacccct

SEQ ID NO: 8732 - DNA, 2691 bp, Artificial Sequence
  Synthetic Polynucloetide
atggccttaccagtgaccgccttgctcctgccgctggccttgctgctccacgccgccaggccgctcgaggggaaaccaattcccaaccctcttctgggactggattcaaccggcagcggcgaggacctgaagaacgtgttcccacctgaggtggccgtgttcgagcctagcaaggccgagatcgcccacacccagaaagccaccctcgtgtgcctggctaccggcttctaccccgaccatgtggaactgtcttggtgggtcaacggcaaagaggtgcacagcggcgtgtgtaccgacccccagccactgaaagaacagcccgccctgaacgacagccggtactgcctgagcagcagactgagagtgtccgccaccttctggcagaacccccggaaccacttcagatgccaggtgcagttctacggcctgagcgagaacgacgagtggacccaggacagagccaagcccgtgacccagatcgtgtctgccgaagcctggggcagagccgattgcggcatcaccagcgccagctaccaccagggcgtgctgagcgccaccatcctgtacgagatcctgctgggcaaggccaccctgtacgccgtgctggtgtctgccctggtgctgatggctatggtcaagcggaaggacagccggggaagggccaagcgatctggatctggagcaacaaacttctcactactcaaacaagcaggtgacgtggaggagaatcccgggcctactagcatggccttaccagtgaccgccttgctcctgccgctggccttgctgctccacgccgccaggccggacatccagctgacacagagcccttctagcctgtctgccagcgtgggcgacagagtgaccatcacctgtaaagccagccaggacgtgggcacaagcgtggcatggtatcagcagaagcctggcaaggcccctaagctgctgatctactggaccagcaccagacacacaggcgtgcccagcagattttctggcagcggctctggcaccgacttcaccttcacaatatccagcctccagcctgaggacattgccacctactactgccagcagtacagcctgtaccgctctttcggccagggcaccaaggtggaaatcaaaggcggaggcggaagtggaggcggaggatctggcggcggaggctctgaagtgcagctggttgaatcaggtggcggcgttgtgcagcctggcagaagtctgagactgagctgtagcgccagcggcttcgatttcaccacctactggatgagctgggtccgacaggcccctggcaaaggactggaatggatcggcgagattcaccccgacagcagcaccatcaattacgcccctagcctgaaggacagattcaccatcagccgggacaacgccaagaacaccctgttcctccagatggactccctgaggccagaggataccggcgtgtacttttgcgccagcctgtatttcggcttcccttggtttgcctactggggccagggaacccctgtgacagttagctctacgcgtgagcagaaactgatctcggaagaggatgggagcggcatccagaaccctgatcctgccgtgtaccagctgcgggatagcaagagcagcgacaagagcgtgtgtctgttcaccgacttcgacagccagaccaacgtgtcccagagcaaggactccgacgtgtacatcaccgataagtgcgtgctggacatgcggagcatggacttcaagagcaactccgccgtggcctggtccaacaagtccgatttcgcctgcgccaacgccttcaacaacagcattatccccgaggacacattcttcccaagcagcgacgtgccctgcgacgtgaagctggtggaaaagagcttcgagacagacaccaacctgaacttccagaacctgagcgtgatcggcttcagaatcctgctgctgaaagtggccggctttaacctgctgatgaccctgcggctgtggtccagccgcgccaagagaagcggatctggcgtgaagcagaccctgaatttcgacctgctgaagctggctggcgacgtggaatccaacccaggcccttctagaggccatatgaccgagtacaagcccacggtgcgcctcgccacccgcgacgacgtccccagggccgtacgcaccctcgccgccgcgttcgccgactaccccgccacgcgccacaccgtcgatccggaccgccacatcgagcgggtcaccgagctgcaagaactcttcctcacgcgcgtcgggctcgacatcggcaaggtgtgggtcgcggacgacggcgccgcggtggcggtctggaccacgccggagagcgtcgaagcgggggcggtgttcgccgagatcggcccgcgcatggccgagttgagcggttcccggctggccgcgcagcaacagatggaaggcctcctggcgccgcaccggcccaaggagcccgcgtggttcctggccaccgtcggcgtctcgcccgaccaccagggcaagggtctgggcagcgccgtcgtgctccccggagtggaggcggccgagcgcgccggggtgcccgccttcctggagacctccgcgccccgcaacctccccttctacgagcggctcggcttcaccgtcaccgccgacgtcgaggtgcccgaaggaccgcgcacctggtgcatgacccgcaagcccggtgcctga

SEQ ID NO: 8733 - DNA, 2694 bp, Artificial Sequence
  Synthetic Polynucloetide
atggccttaccagtgaccgccttgctcctgccgctggccttgctgctccacgccgccaggccgctcgagcagaaactgatctcggaagaggatctgggctccggcgatcgccctgatcctgccgtgtaccagctgcgggatagcaagagcagcgacaagagcgtgtgtctgttcaccgacttcgacagccagaccaacgtgtcccagagcaaggactccgacgtgtacatcaccgataagtgcgtgctggacatgcggagcatggacttcaagagcaactccgccgtggcctggtccaacaagtccgatttcgcctgcgccaacgccttcaacaacagcattatccccgaggacacattcttcccaagccccgagagcagctgcgacgtgaagctggtggaaaagagcttcgagacagacaccaacctgaacttccagaacctgagcgtgatcggcttcagaatcctgctgctgaaagtggccggctttaacctgctgatgaccctgcggctgtggtccagctctagtcgcgccaagagaagcggatctggcgtgaagcagaccctgaatttcgacctgctgaagctggctggcgacgtggaatccaacccaggccccactagcatggccttaccagtgaccgccttgctcctgccgctggccttgctgctccacgccgccaggccggacatccagctgacacagagcccttctagcctgtctgccagcgtgggcgacagagtgaccatcacctgtaaagccagccaggacgtgggcacaagcgtggcatggtatcagcagaagcctggcaaggcccctaagctgctgatctactggaccagcaccagacacacaggcgtgcccagcagattttctggcagcggctctggcaccgacttcaccttcacaatatccagcctccagcctgaggacattgccacctactactgccagcagtacagcctgtaccgctctttcggccagggcaccaaggtggaaatcaaaggcggaggcggaagtggaggcggaggatctggcggcggaggctctgaagtgcagctggttgaatcaggtggcggcgttgtgcagcctggcagaagtctgagactgagctgtagcgccagcggcttcgatttcaccacctactggatgagctgggtccgacaggcccctggcaaaggactggaatggatcggcgagattcaccccgacagcagcaccatcaattacgcccctagcctgaaggacagattcaccatcagccgggacaacgccaagaacaccctgttcctccagatggactccctgaggccagaggataccggcgtgtacttttgcgccagcctgtatttcggcttcccttggtttgcctactggggccagggaacccctgtgacagttagctctacgcgtgggaaaccaattcccaaccctcttctgggactggattcaaccggcagcggcgaggacctgaagaacgtgttcccacctgaggtggccgtgttcgagcctagcgaggccgagatcagccacacccagaaagccaccctcgtgtgcctggctaccggcttctaccccgaccatgtggaactgtcttggtgggtcaacggcaaagaggtgcacagcggcgtgtgtaccgacccccagccactgaaagaacagcccgccctgaacgacagccggtactgcctgagcagcagactgagagtgtccgccaccttctggcagaacccccggaaccacttcagatgccaggtgcagttctacggcctgagcgagaacgacgagtggacccaggacagagccaagcccgtgacccagatcgtgtctgccgaagcctggggcagagccgattgcggctttaccagcgagagctaccagcagggcgtgctgagcgccaccatcctgtacgagatcctgctgggcaaggccaccctgtacgccgtgctggtgtctgccctggtgctgatggctatggtcaagcggaaggacagccggggaagggccaagcgatctggatctggagcaacaaacttctcactactcaaacaagcaggtgacgtggaggagaatcccgggccttctagaggccatatgaccgagtacaagcccacggtgcgcctcgccacccgcgacgacgtccccagggccgtacgcaccctcgccgccgcgttcgccgactaccccgccacgcgccacaccgtcgatccggaccgccacatcgagcgggtcaccgagctgcaagaactcttcctcacgcgcgtcgggctcgacatcggcaaggtgtgggtcgcggacgacggcgccgcggtggcggtctggaccacgccggagagcgtcgaagcgggggcggtgttcgccgagatcggcccgcgcatggccgagttgagcggttcccggctggccgcgcagcaacagatggaaggcctcctggcgccgcaccggcccaaggagcccgcgtggttcctggccaccgtcggcgtctcgcccgaccaccagggcaagggtctgggcagcgccgtcgtgctccccggagtggaggcggccgagcgcgccggggtgcccgccttcctggagacctccgcgccccgcaacctccccttctacgagcggctcggcttcaccgtcaccgccgacgtcgaggtgcccgaaggaccgcgcacctggtgcatgacccgcaagcccggtgcctga

SEQ ID NO: 8734 - DNA, 2556 bp, Artificial Sequence
  Synthetic Polynucloetide
atggccttaccagtgaccgccttgctcctgccgctggccttgctgctccacgccgccaggccggacatccagctgacacagagcccttctagcctgtctgccagcgtgggcgacagagtgaccatcacctgtaaagccagccaggacgtgggcacaagcgtggcatggtatcagcagaagcctggcaaggcccctaagctgctgatctactggaccagcaccagacacacaggcgtgcccagcagattttctggcagcggctctggcaccgacttcaccttcacaatatccagcctccagcctgaggacattgccacctactactgccagcagtacagcctgtaccgctctttcggccagggcaccaaggtggaaatcaaactcgaggacctgaagaacgtgttcccacctgaggtggccgtgttcgagcctagcgaggccgagatcagccacacccagaaagccaccctcgtgtgcctggctaccggcttctaccccgaccatgtggaactgtcttggtgggtcaacggcaaagaggtgcacagcggcgtgtctaccgacccccagccactgaaagaacagcccgccctgaacgacagccggtactgcctgagcagcagactgagagtgtccgccaccttctggcagaacccccggaaccacttcagatgccaggtgcagttctacggcctgagcgagaacgacgagtggacccaggacagagccaagcccgtgacccagatcgtgtctgccgaagcctggggcagagccgattgcggctttaccagcgagagctaccagcagggcgtgctgagcgccaccatcctgtacgagatcctgctgggcaaggccaccctgtacgccgtgctggtgtctgccctggtgctgatggctatggtcaagcggaaggacagccggggaagggccaagcgatctggatctggagcaacaaacttctcactactcaaacaagcaggtgacgtggaggagaatcccgggcctactagtatggactggatttggcgcatccttttccttgtcggcgctgctaccggcgcgcattccttcgaagaagtgcagctggttgaatcaggtggcggcgttgtgcagcctggcagaagtctgagactgagctgtagcgccagcggcttcgatttcaccacctactggatgagctgggtccgacaggcccctggcaaaggactggaatggatcggcgagattcaccccgacagcagcaccatcaattacgcccctagcctgaaggacagattcaccatcagccgggacaacgccaagaacaccctgttcctccagatggactccctgaggccagaggataccggcgtgtacttttgcgccagcctgtatttcggcttcccttggtttgcctactggggccagggaacccctgtgacagttagctctacgcgtatccagaaccctgatcctgccgtgtaccagctgcgggatagcaagagcagcgacaagagcgtgtgtctgttcaccgacttcgacagccagaccaacgtgtcccagagcaaggactccgacgtgtacatcaccgataagaccgtgctggacatgcggagcatggacttcaagagcaactccgccgtggcctggtccaacaagtccgatttcgcctgcgccaacgccttcaacaacagcattatccccgaggacacattcttcccaagccccgagagcagctgcgacgtgaagctggtggaaaagagcttcgagacagacaccaacctgaacttccagaacctgagcgtgatcggcttcagaatcctgctgctgaaagtggccggctttaacctgctgatgaccctgcggctgtggtccagccgcgccaagagaagcggatctggcgtgaagcagaccctgaatttcgacctgctgaagctggctggcgacgtggaatccaacccaggcccttctagaggccatatgaccgagtacaagcccacggtgcgcctcgccacccgcgacgacgtccccagggccgtacgcaccctcgccgccgcgttcgccgactaccccgccacgcgccacaccgtcgatccggaccgccacatcgagcgggtcaccgagctgcaagaactcttcctcacgcgcgtcgggctcgacatcggcaaggtgtgggtcgcggacgacggcgccgcggtggcggtctggaccacgccggagagcgtcgaagcgggggcggtgttcgccgagatcggcccgcgcatggccgagttgagcggttcccggctggccgcgcagcaacagatggaaggcctcctggcgccgcaccggcccaaggagcccgcgtggttcctggccaccgtcggcgtctcgcccgaccaccagggcaagggtctgggcagcgccgtcgtgctccccggagtggaggcggccgagcgcgccggggtgcccgccttcctggagacctccgcgccccgcaacctccccttctacgagcggctcggcttcaccgtcaccgccgacgtcgaggtgcccgaaggaccgcgcacctggtgcatgacccgcaagcccggtgcctga

SEQ ID NO: 8735 - DNA, 2802 bp, Artificial Sequence
  Synthetic Polynucloetide
atggccttaccagtgaccgccttgctcctgccgctggccttgctgctccacgccgccaggccggacatccagctgacacagagcccttctagcctgtctgccagcgtgggcgacagagtgaccatcacctgtaaagccagccaggacgtgggcacaagcgtggcatggtatcagcagaagcctggcaaggcccctaagctgctgatctactggaccagcaccagacacacaggcgtgcccagcagattttctggcagcggctctggcaccgacttcaccttcacaatatccagcctccagcctgaggacattgccacctactactgccagcagtacagcctgtaccgctctttcggccagggcaccaaggtggaaatcaaactcgaggacctgaagaacgtgttcccacctgaggtggccgtgttcgagcctagcgaggccgagatcagccacacccagaaagccaccctcgtgtgcctggctaccggcttctaccccgaccatgtggaactgtcttggtgggtcaacggcaaagaggtgcacagcggcgtgtctaccgacccccagccactgaaagaacagcccgccctgaacgacagccggtactgcctgagcagcagactgagagtgtccgccaccttctggcagaacccccggaaccacttcagatgccaggtgcagttctacggcctgagcgagaacgacgagtggacccaggacagagccaagcccgtgacccagatcgtgtctgccgaagcctggggcagagccgattgcggctttaccagcgagagctaccagcagggcgtgctgagcgccaccatcctgtacgagatcctgctgggcaaggccaccctgtacgccgtgctggtgtctgccctggtgctgatggctatggtcaagcggaaggacagccggggaagggccaagcgatctggatctggagcaacaaacttctcactactcaaacaagcaggtgacgtggaggagaatcccgggcctactagtatggactggatttggcgcatccttttccttgtcggcgctgctaccggcgcgcattccttcgaagaagtgcagctggttgaatcaggtggcggcgttgtgcagcctggcagaagtctgagactgagctgtagcgccagcggcttcgatttcaccacctactggatgagctgggtccgacaggcccctggcaaaggactggaatggatcggcgagattcaccccgacagcagcaccatcaattacgcccctagcctgaaggacagattcaccatcagccgggacaacgccaagaacaccctgttcctccagatggactccctgaggccagaggataccggcgtgtacttttgcgccagcctgtatttcggcttcccttggtttgcctactggggccagggaacccctgtgacagttagctctacgcgtgagcagaaactgatctcggaagaggatgggagcggcaccccattcccttctctggcccctcccatcatgctgctggtggacggcaagcagcagatggtggtcgtgtgcctggtgctggatgtggccccacctggactggacagccccatctggtttagcgccggcaatggctctgccctggacgcctttacctacggcccaagccctgccaccgatggcacctggacaaatctggcccacctgagcctgcccagcgaggaactggcttcttgggagcctctcgtgtgccacacaggacctggcgctgagggacacagcagatccacccagcctatgcacctgtctggcgaggccagcaccgccagaacctgtcctcaggaacctctgagaggcacccctggcggagcactgtggctgggagtgctgagactgctgctgttcaagctgctgctgtttgacctgctgctgacctgctcctgtctgtgcgatcctgccggccctctgccttctcctgccaccaccacaagactgagagccctgggcagccacagactgcaccctgccacagagacaggcggcagagaggccacaagcagccctagaccccagcccagagacagaagatggggcgataccccccctggcagaaagcctggatctccagtccgcgccaagagaagcggatctggcgtgaagcagaccctgaatttcgacctgctgaagctggctggcgacgtggaatccaacccaggcccttctagaggccatatgaccgagtacaagcccacggtgcgcctcgccacccgcgacgacgtccccagggccgtacgcaccctcgccgccgcgttcgccgactaccccgccacgcgccacaccgtcgatccggaccgccacatcgagcgggtcaccgagctgcaagaactcttcctcacgcgcgtcgggctcgacatcggcaaggtgtgggtcgcggacgacggcgccgcggtggcggtctggaccacgccggagagcgtcgaagcgggggcggtgttcgccgagatcggcccgcgcatggccgagttgagcggttcccggctggccgcgcagcaacagatggaaggcctcctggcgccgcaccggcccaaggagcccgcgtggttcctggccaccgtcggcgtctcgcccgaccaccagggcaagggtctgggcagcgccgtcgtgctccccggagtggaggcggccgagcgcgccggggtgcccgccttcctggagacctccgcgccccgcaacctccccttctacgagcggctcggcttcaccgtcaccgccgacgtcgaggtgcccgaaggaccgcgcacctggtgcatgacccgcaagcccggtgcctga

SEQ ID NO: 8736 - DNA, 2856 bp, Artificial Sequence
  Synthetic Polynucloetide
atggccttaccagtgaccgccttgctcctgccgctggccttgctgctccacgccgccaggccgctcgaggacctgaagaacgtgttcccacctgaggtggccgtgttcgagcctagcgaggccgagatcagccacacccagaaagccaccctcgtgtgcctggctaccggcttctaccccgaccatgtggaactgtcttggtgggtcaacggcaaagaggtgcacagcggcgtgtctaccgacccccagccactgaaagaacagcccgccctgaacgacagccggtactgcctgagcagcagactgagagtgtccgccaccttctggcagaacccccggaaccacttcagatgccaggtgcagttctacggcctgagcgagaacgacgagtggacccaggacagagccaagcccgtgacccagatcgtgtctgccgaagcctggggcagagccgattgcggctttaccagcgagagctaccagcagggcgtgctgagcgccaccatcctgtacgagatcctgctgggcaaggccaccctgtacgccgtgctggtgtctgccctggtgctgatggctatggtcaagcggaaggacagccggggaagggccaagcgatctggatctggagcaacaaacttctcactactcaaacaagcaggtgacgtggaggagaatcccgggcctactagcatggccttaccagtgaccgccttgctcctgccgctggccttgctgctccacgccgccaggccggacatccagctgacacagagcccttctagcctgtctgccagcgtgggcgacagagtgaccatcacctgtaaagccagccaggacgtgggcacaagcgtggcatggtatcagcagaagcctggcaaggcccctaagctgctgatctactggaccagcaccagacacacaggcgtgcccagcagattttctggcagcggctctggcaccgacttcaccttcacaatatccagcctccagcctgaggacattgccacctactactgccagcagtacagcctgtaccgctctttcggccagggcaccaaggtggaaatcaaaggcggaggcggaagtggaggcggaggatctggcggcggaggctctgaagtgcagctggttgaatcaggtggcggcgttgtgcagcctggcagaagtctgagactgagctgtagcgccagcggcttcgatttcaccacctactggatgagctgggtccgacaggcccctggcaaaggactggaatggatcggcgagattcaccccgacagcagcaccatcaattacgcccctagcctgaaggacagattcaccatcagccgggacaacgccaagaacaccctgttcctccagatggactccctgaggccagaggataccggcgtgtacttttgcgccagcctgtatttcggcttcccttggtttgcctactggggccagggaacccctgtgacagttagctctacgcgtgagcagaaactgatctcggaagaggatctggggagcggcaccccattcccttctctggcccctcccatcatgctgctggtggacggcaagcagcagatggtggtcgtgtgcctggtgctggatgtggccccacctggactggacagccccatctggtttagcgccggcaatggctctgccctggacgcctttacctacggcccaagccctgccaccgatggcacctggacaaatctggcccacctgagcctgcccagcgaggaactggcttcttgggagcctctcgtgtgccacacaggacctggcgctgagggacacagcagatccacccagcctatgcacctgtctggcgaggccagcaccgccagaacctgtcctcaggaacctctgagaggcacccctggcggagcactgtggctgggagtgctgagactgctgctgttcaagctgctgctgtttgacctgctgctgacctgctcctgtctgtgcgatcctgccggccctctgccttctcctgccaccaccacaagactgagagccctgggcagccacagactgcaccctgccacagagacaggcggcagagaggccacaagcagccctagaccccagcccagagacagaagatggggcgataccccccctggcagaaagcctggatctccagtccgcgccaagagaagcggatctggcgtgaagcagaccctgaatttcgacctgctgaagctggctggcgacgtggaatccaacccaggcccttctagatctagaggccatatgaccgagtacaagcccacggtgcgcctcgccacccgcgacgacgtccccagggccgtacgcaccctcgccgccgcgttcgccgactaccccgccacgcgccacaccgtcgatccggaccgccacatcgagcgggtcaccgagctgcaagaactcttcctcacgcgcgtcgggctcgacatcggcaaggtgtgggtcgcggacgacggcgccgcggtggcggtctggaccacgccggagagcgtcgaagcgggggcggtgttcgccgagatcggcccgcgcatggccgagttgagcggttcccggctggccgcgcagcaacagatggaaggcctcctggcgccgcaccggcccaaggagcccgcgtggttcctggccaccgtcggcgtctcgcccgaccaccagggcaagggtctgggcagcgccgtcgtgctccccggagtggaggcggccgagcgcgccggggtgcccgccttcctggagacctccgcgccccgcaacctccccttctacgagcggctcggcttcaccgtcaccgccgacgtcgaggtgcccgaaggaccgcgcacctggtgcatgacccgcaagcccggtgcctga

SEQ ID NO: 8737 - DNA, 2667 bp, Artificial Sequence
  Synthetic Polynucloetide
atggccttaccagtgaccgccttgctcctgccgctggccttgctgctccacgccgccaggccggacatccagctgacacagagcccttctagcctgtctgccagcgtgggcgacagagtgaccatcacctgtaaagccagccaggacgtgggcacaagcgtggcatggtatcagcagaagcctggcaaggcccctaagctgctgatctactggaccagcaccagacacacaggcgtgcccagcagattttctggcagcggctctggcaccgacttcaccttcacaatatccagcctccagcctgaggacattgccacctactactgccagcagtacagcctgtaccgctctttcggccagggcaccaaggtggaaatcaaactcgaggggaaaccaattcccaaccctcttctgggactggattcaaccggcagcggcgacaagcagctggacgccgacgtgtcccccaagcctaccatcttcctgccctctatcgccgagacaaagctccagaaggccggcacctacctgtgcctgctggaaaagttcttcccagatgtgattaagatccactggcaggaaaagaagtccaacaccatcctgggcagccaggaaggcaacaccatgaagaccaacgacacctacatgaagttcagctggctgaccgtgcccgagaagtccctggacaaagaacacagatgcatcgtgcggcacgaaaacaacaagaacggcgtggaccaggaaatcatcttcccacccatcaagaccgatgtgattacaatggaccccaaggacaactgctccaaggacgccaacgataccctgctgctccagctgaccaacaccagcgcctactacatgtacttgttgctgctgctgaagtccgtggtgtacttcgccatcatcacatgctgcctgctgcggagaaccgccttctgctgcaacggcgagaagtctagggccaagcgatctggatctggagcaacaaacttctcactactcaaacaagcaggtgacgtggaggagaatcccgggcctactagtatggactggatttggcgcatccttttccttgtcggcgctgctaccggcgcgcattccttcgaagaagtgcagctggttgaatcaggtggcggcgttgtgcagcctggcagaagtctgagactgagctgtagcgccagcggcttcgatttcaccacctactggatgagctgggtccgacaggcccctggcaaaggactggaatggatcggcgagattcaccccgacagcagcaccatcaattacgcccctagcctgaaggacagattcaccatcagccgggacaacgccaagaacaccctgttcctccagatggactccctgaggccagaggataccggcgtgtacttttgcgccagcctgtatttcggcttcccttggtttgcctactggggccagggaacccctgtgacagttagctctacgcgtgagcagaaactgatctcggaagaggatgggagcggcagccagcctcacaccaagcccagcgtgttcgtgatgaagaacggcaccaacgtggcctgcctcgtgaaagagttctaccccaaggacatcaggatcaacctggtgtccagcaagaagatcaccgagttcgaccccgccatcgtgatctcccccagcggcaagtacaacgccgtgaagctggggaagtacgaggacagcaacagcgtgacctgctccgtgcagcacgacaacaagaccgtgcacagcaccgactttgaagtgaaaaccgactccaccgaccacgtgaagcccaaagagacagagaacaccaagcagcccagcaagagctgccacaagcccaaggccatcgtgcacaccgagaaagtgaacatgatgagcctgaccgtgctgggcctgcggatgctgttcgccaaaaccgtggccgtgaacttcctgctgaccgccaagctgttcttcctccgcgccaagagaagcggatctggcgtgaagcagaccctgaatttcgacctgctgaagctggctggcgacgtggaatccaacccaggcccttctagaggccatatgaccgagtacaagcccacggtgcgcctcgccacccgcgacgacgtccccagggccgtacgcaccctcgccgccgcgttcgccgactaccccgccacgcgccacaccgtcgatccggaccgccacatcgagcgggtcaccgagctgcaagaactcttcctcacgcgcgtcgggctcgacatcggcaaggtgtgggtcgcggacgacggcgccgcggtggcggtctggaccacgccggagagcgtcgaagcgggggcggtgttcgccgagatcggcccgcgcatggccgagttgagcggttcccggctggccgcgcagcaacagatggaaggcctcctggcgccgcaccggcccaaggagcccgcgtggttcctggccaccgtcggcgtctcgcccgaccaccagggcaagggtctgggcagcgccgtcgtgctccccggagtggaggcggccgagcgcgccggggtgcccgccttcctggagacctccgcgccccgcaacctccccttctacgagcggctcggcttcaccgtcaccgccgacgtcgaggtgcccgaaggaccgcgcacctggtgcatgacccgcaagcccggtgcctga

SEQ ID NO: 8738 - DNA, 1878 bp, Artificial Sequence
  Synthetic Polynucloetide
atggccttaccagtgaccgccttgctcctgccgctggccttgctgctccacgccgccaggccggacatccagctgacacagagcccttctagcctgtctgccagcgtgggcgacagagtgaccatcacctgtaaagccagccaggacgtgggcacaagcgtggcatggtatcagcagaagcctggcaaggcccctaagctgctgatctactggaccagcaccagacacacaggcgtgcccagcagattttctggcagcggctctggcaccgacttcaccttcacaatatccagcctccagcctgaggacattgccacctactactgccagcagtacagcctgtaccgctctttcggccagggcaccaaggtggaaatcaaactcgagagccagcctcacaccaagcccagcgtgttcgtgatgaagaacggcaccaacgtggcctgcctcgtgaaagagttctaccccaaggacatcaggatcaacctggtgtccagcaagaagatcaccgagttcgaccccgccatcgtgatctcccccagcggcaagtacaacgccgtgaagctggggaagtacgaggacagcaacagcgtgacctgctccgtgcagcacgacaacaagaccgtgcacagcaccgactttgaagtgaaaaccgactccaccgaccacgtgaagcccaaagagacagagaacaccaagcagcccagcaagagctgccacaagcccaaggccatcgtgcacaccgagaaagtgaacatgatgagcctgaccgtgctgggcctgcggatgctgttcgccaaaaccgtggccgtgaacttcctgctgaccgccaagctgttcttcctcagggccaagcgatctggatctggagcaacaaacttctcactactcaaacaagcaggtgacgtggaggagaatcccgggcctactagtatggactggatttggcgcatccttttccttgtcggcgctgctaccggcgcgcattccttcgaagaagtgcagctggttgaatcaggtggcggcgttgtgcagcctggcagaagtctgagactgagctgtagcgccagcggcttcgatttcaccacctactggatgagctgggtccgacaggcccctggcaaaggactggaatggatcggcgagattcaccccgacagcagcaccatcaattacgcccctagcctgaaggacagattcaccatcagccgggacaacgccaagaacaccctgttcctccagatggactccctgaggccagaggataccggcgtgtacttttgcgccagcctgtatttcggcttcccttggtttgcctactggggccagggaacccctgtgacagttagctctacgcgtgacaagcagctggacgccgacgtgtcccccaagcctaccatcttcctgccctctatcgccgagacaaagctccagaaggccggcacctacctgtgcctgctggaaaagttcttcccagatgtgattaagatccactggcaggaaaagaagtccaacaccatcctgggcagccaggaaggcaacaccatgaagaccaacgacacctacatgaagttcagctggctgaccgtgcccgagaagtccctggacaaagaacacagatgcatcgtgcggcacgaaaacaacaagaacggcgtggaccaggaaatcatcttcccacccatcaagaccgatgtgattacaatggaccccaaggacaactgctccaaggacgccaacgataccctgctgctccagctgaccaacaccagcgcctactacatgtacttgttgctgctgctgaagtccgtggtgtacttcgccatcatcacatgctgcctgctgcggagaaccgccttctgctgcaacggcgagaagtct

SEQ ID NO: 8739 - DNA, 2712 bp, Artificial Sequence
  Synthetic Polynucloetide
atggccttaccagtgaccgccttgctcctgccgctggccttgctgctccacgccgccaggccgctcgaggggaaaccaattcccaaccctcttctgggactggattcaaccggcagcggcgacaagcagctggacgccgacgtgtcccccaagcctaccatcttcctgccctctatcgccgagacaaagctccagaaggccggcacctacctgtgcctgctggaaaagttcttcccagatgtgattaagatccactggcaggaaaagaagtccaacaccatcctgggcagccaggaaggcaacaccatgaagaccaacgacacctacatgaagttcagctggctgaccgtgcccgagaagtccctggacaaagaacacagatgcatcgtgcggcacgaaaacaacaagaacggcgtggaccaggaaatcatcttcccacccatcaagaccgatgtgattacaatggaccccaaggacaactgctccaaggacgccaacgataccctgctgctccagctgaccaacaccagcgcctactacatgtacttgttgctgctgctgaagtccgtggtgtacttcgccatcatcacatgctgcctgctgcggagaaccgccttctgctgcaacggcgagaagtctagggccaagcgatctggatctggagcaacaaacttctcactactcaaacaagcaggtgacgtggaggagaatcccgggcctactagcatggccttaccagtgaccgccttgctcctgccgctggccttgctgctccacgccgccaggccggacatccagctgacacagagcccttctagcctgtctgccagcgtgggcgacagagtgaccatcacctgtaaagccagccaggacgtgggcacaagcgtggcatggtatcagcagaagcctggcaaggcccctaagctgctgatctactggaccagcaccagacacacaggcgtgcccagcagattttctggcagcggctctggcaccgacttcaccttcacaatatccagcctccagcctgaggacattgccacctactactgccagcagtacagcctgtaccgctctttcggccagggcaccaaggtggaaatcaaaggcggaggcggaagtggaggcggaggatctggcggcggaggctctgaagtgcagctggttgaatcaggtggcggcgttgtgcagcctggcagaagtctgagactgagctgtagcgccagcggcttcgatttcaccacctactggatgagctgggtccgacaggcccctggcaaaggactggaatggatcggcgagattcaccccgacagcagcaccatcaattacgcccctagcctgaaggacagattcaccatcagccgggacaacgccaagaacaccctgttcctccagatggactccctgaggccagaggataccggcgtgtacttttgcgccagcctgtatttcggcttcccttggtttgcctactggggccagggaacccctgtgacagttagctctacgcgtgagcagaaactgatctcggaagaggatgggagcggcagccagcctcacaccaagcccagcgtgttcgtgatgaagaacggcaccaacgtggcctgcctcgtgaaagagttctaccccaaggacatcaggatcaacctggtgtccagcaagaagatcaccgagttcgaccccgccatcgtgatctcccccagcggcaagtacaacgccgtgaagctggggaagtacgaggacagcaacagcgtgacctgctccgtgcagcacgacaacaagaccgtgcacagcaccgactttgaagtgaaaaccgactccaccgaccacgtgaagcccaaagagacagagaacaccaagcagcccagcaagagctgccacaagcccaaggccatcgtgcacaccgagaaagtgaacatgatgagcctgaccgtgctgggcctgcggatgctgttcgccaaaaccgtggccgtgaacttcctgctgaccgccaagctgttcttcctccgcgccaagagaagcggatctggcgtgaagcagaccctgaatttcgacctgctgaagctggctggcgacgtggaatccaacccaggcccttctagaggccatatgaccgagtacaagcccacggtgcgcctcgccacccgcgacgacgtccccagggccgtacgcaccctcgccgccgcgttcgccgactaccccgccacgcgccacaccgtcgatccggaccgccacatcgagcgggtcaccgagctgcaagaactcttcctcacgcgcgtcgggctcgacatcggcaaggtgtgggtcgcggacgacggcgccgcggtggcggtctggaccacgccggagagcgtcgaagcgggggcggtgttcgccgagatcggcccgcgcatggccgagttgagcggttcccggctggccgcgcagcaacagatggaaggcctcctggcgccgcaccggcccaaggagcccgcgtggttcctggccaccgtcggcgtctcgcccgaccaccagggcaagggtctgggcagcgccgtcgtgctccccggagtggaggcggccgagcgcgccggggtgcccgccttcctggagacctccgcgccccgcaacctccccttctacgagcggctcggcttcaccgtcaccgccgacgtcgaggtgcccgaaggaccgcgcacctggtgcatgacccgcaagcccggtgcctga

SEQ ID NO: 8740 - DNA, 3087 bp, Artificial Sequence
  Synthetic Polynucloetide
atggccttaccagtgaccgccttgctcctgccgctggccttgctgctccacgccgccaggccggacatccagctgacacagagcccttctagcctgtctgccagcgtgggcgacagagtgaccatcacctgtaaagccagccaggacgtgggcacaagcgtggcatggtatcagcagaagcctggcaaggcccctaagctgctgatctactggaccagcaccagacacacaggcgtgcccagcagattttctggcagcggctctggcaccgacttcaccttcacaatatccagcctccagcctgaggacattgccacctactactgccagcagtacagcctgtaccgctctttcggccagggcaccaaggtggaaatcaaaggacagcctaaggccaatcctaccgtgacactgttccctccaagcagcgaagaactccaggccaacaaggccacacttgtgtgcctgatctccgacttctaccctggggctgtgacagtggcttggaaggccgatggatctcctgtgaaagccggcgtggaaaccaccaagccatccaagcagagcaacaacaaatacgccgccagctcctacctgagcctgacacctgagcagtggaagtcccacagatcctacagctgccaagtgacccacgaaggcagcaccgtggaaaagacagtggcccctacagagtgcagcggatcccagagcttcggcctgctggaccccaagctgtgctacctgctggatggcatcctgttcatctacggcgtgatcctgaccgccctgttcctgagagtgaagttcagcagaagcgccgacgcccctgcctaccagcagggacagaaccaactgtacaacgagctgaacctgggcagacgggaagagtacgacgtgctggacaagcggagaggcagggaccctgagatgggcggaaagccccagcggagaaagaacccccaggaaggactgtataacgaactccagaaagacaagatggccgaagcctacagcgagatcggcatgaagggcgagcggagaagaggcaagggccacgatggcctgtaccagggcctgagcaccgccaccaaggacacctatgacgccctgcacatgcaggccctgcctccaagaagggccaagcgatctggatctggagcaacaaacttctcactactcaaacaagcaggtgacgtggaggagaatcccgggcctactagtatggactggatttggcgcatccttttccttgtcggcgctgctaccggcgcgcattccttcgaagaagtgcagctggttgaatcaggtggcggcgttgtgcagcctggcagaagtctgagactgagctgtagcgccagcggcttcgatttcaccacctactggatgagctgggtccgacaggcccctggcaaaggactggaatggatcggcgagattcaccccgacagcagcaccatcaattacgcccctagcctgaaggacagattcaccatcagccgggacaacgccaagaacaccctgttcctccagatggactccctgaggccagaggataccggcgtgtacttttgcgccagcctgtatttcggcttcccttggtttgcctactggggccagggaacccctgtgacagttagctctgcctctacaaagggaccctccgtgtttcctctggctcccagcagcaagtctacaagcggaggaacagccgctctgggctgcctggtcaaggattactttcccgagcctgtgaccgtgtcctggaatagcggagcactgacaagcggcgtgcacacctttccagccgtgctgcaaagcagcggcctgtactctctgagcagcgtggtcacagtgcctagctctagcctgggcacccagacctacatctgcaatgtgaaccacaagcctagcaacaccaaggtggacaagagagtggaacccaagagctgtggtacccagagttttgggttgttggaccctaaattgtgctatctgttggacggaatcctgttcatttacggagtgatcctgaccgcattgttcctgcgggttaagttttccagatccgcagacgcacccgcttaccaacaagggcagaaccaactctacaatgaacttaatttggggcggagggaagagtacgacgttctggacaaaaggaggggacgagatcccgagatgggcggaaagcctcagcgaaggaagaatccgcaagaggggctttataacgaactccagaaagataaaatggcagaagcctatagtgagattgggatgaagggagaaaggaggaggggtaaaggtcacgatgggttgtaccaaggattgagcacagccactaaagatacctatgatgcgctccacatgcaggccctgccgccaagacgcgccaagagaagcggatctggcgtgaagcagaccctgaatttcgacctgctgaagctggctggcgacgtggaatccaacccaggcccttctagaggccatatgaccgagtacaagcccacggtgcgcctcgccacccgcgacgacgtccccagggccgtacgcaccctcgccgccgcgttcgccgactaccccgccacgcgccacaccgtcgatccggaccgccacatcgagcgggtcaccgagctgcaagaactcttcctcacgcgcgtcgggctcgacatcggcaaggtgtgggtcgcggacgacggcgccgcggtggcggtctggaccacgccggagagcgtcgaagcgggggcggtgttcgccgagatcggcccgcgcatggccgagttgagcggttcccggctggccgcgcagcaacagatggaaggcctcctggcgccgcaccggcccaaggagcccgcgtggttcctggccaccgtcggcgtctcgcccgaccaccagggcaagggtctgggcagcgccgtcgtgctccccggagtggaggcggccgagcgcgccggggtgcccgccttcctggagacctccgcgccccgcaacctccccttctacgagcggctcggcttcaccgtcaccgccgacgtcgaggtgcccgaaggaccgcgcacctggtgcatgacccgcaagcccggtgcctga

SEQ ID NO: 8741 - DNA, 2442 bp, Artificial Sequence
  Synthetic Polynucloetide
atggccttaccagtgaccgccttgctcctgccgctggccttgctgctccacgccgccaggccggacatccagctgacacagagcccttctagcctgtctgccagcgtgggcgacagagtgaccatcacctgtaaagccagccaggacgtgggcacaagcgtggcatggtatcagcagaagcctggcaaggcccctaagctgctgatctactggaccagcaccagacacacaggcgtgcccagcagattttctggcagcggctctggcaccgacttcaccttcacaatatccagcctccagcctgaggacattgccacctactactgccagcagtacagcctgtaccgctctttcggccagggcaccaaggtggaaatcaaactcgaggacctgaagaacgtgttcccacctgaggtggccgtgttcgagcctagcgaggccgagatcagccacacccagaaagccaccctcgtgtgcctggctaccggcttctaccccgaccatgtggaactgtcttggtgggtcaacggcaaagaggtgcacagcggcgtgtctaccgacccccagccactgaaagaacagcccgccctgaacgacagccggtactgcctgagcagcagactgagagtgtccgccaccttctggcagaacccccggaaccacttcagatgccaggtgcagttctacggcctgagcgagaacgacgagtggacccaggacagagccaagcccgtgacccagatcgtgtctgccgaagcctggggcagagccgattgcggatcccagagcttcggcctgctggaccccaagctgtgctacctgctggatggcatcctgttcatctacggcgtgatcctgaccgccctgttcctgagagtgaagttcagcagaagcgccgacgcccctgcctaccagcagggacagaaccaactgtacaacgagctgaacctgggcagacgggaagagtacgacgtgctggacaagcggagaggcagggaccctgagatgggcggaaagccccagcggagaaagaacccccaggaaggactgtataacgaactccagaaagacaagatggccgaagcctacagcgagatcggcatgaagggcgagcggagaagaggcaagggccacgatggcctgtaccagggcctgagcaccgccaccaaggacacctatgacgccctgcacatgcaggccctgcctccaagaagggccaagcgatctggatctggagcaacaaacttctcactactcaaacaagcaggtgacgtggaggagaatcccgggcctactagtatggactggatttggcgcatccttttccttgtcggcgctgctaccggcgcgcattccttcgaagaagtgcagctggttgaatcaggtggcggcgttgtgcagcctggcagaagtctgagactgagctgtagcgccagcggcttcgatttcaccacctactggatgagctgggtccgacaggcccctggcaaaggactggaatggatcggcgagattcaccccgacagcagcaccatcaattacgcccctagcctgaaggacagattcaccatcagccgggacaacgccaagaacaccctgttcctccagatggactccctgaggccagaggataccggcgtgtacttttgcgccagcctgtatttcggcttcccttggtttgcctactggggccagggaacccctgtgacagttagctctacgcgtatccagaaccctgatcctgccgtgtaccagctgcgggatagcaagagcagcgacaagagcgtgtgtctgttcaccgacttcgacagccagaccaacgtgtcccagagcaaggactccgacgtgtacatcaccgataagaccgtgctggacatgcggagcatggacttcaagagcaactccgccgtggcctggtccaacaagtccgatttcgcctgcgccaacgccttcaacaacagcattatccccgaggacacattcttcccaagccccgagagcagctgcggtacccagagttttgggttgttggaccctaaattgtgctatctgttggacggaatcctgttcatttacggagtgatcctgaccgcattgttcctgcgggttaagttttccagatccgcagacgcacccgcttaccaacaagggcagaaccaactctacaatgaacttaatttggggcggagggaagagtacgacgttctggacaaaaggaggggacgagatcccgagatgggcggaaagcctcagcgaaggaagaatccgcaagaggggctttataacgaactccagaaagataaaatggcagaagcctatagtgagattgggatgaagggagaaaggaggaggggtaaaggtcacgatgggttgtaccaaggattgagcacagccactaaagatacctatgatgcgctccacatgcaggccctgccgccaaga

SEQ ID NO: 8742 - DNA, 2442 bp, Artificial Sequence
  Synthetic Polynucloetide
atggccttaccagtgaccgccttgctcctgccgctggccttgctgctccacgccgccaggccggacatccagctgacacagagcccttctagcctgtctgccagcgtgggcgacagagtgaccatcacctgtaaagccagccaggacgtgggcacaagcgtggcatggtatcagcagaagcctggcaaggcccctaagctgctgatctactggaccagcaccagacacacaggcgtgcccagcagattttctggcagcggctctggcaccgacttcaccttcacaatatccagcctccagcctgaggacattgccacctactactgccagcagtacagcctgtaccgctctttcggccagggcaccaaggtggaaatcaaactcgaggacctgaagaacgtgttcccacctgaggtggccgtgttcgagcctagcaaggccgagatcgcccacacccagaaagccaccctcgtgtgcctggctaccggcttctaccccgaccatgtggaactgtcttggtgggtcaacggcaaagaggtgcacagcggcgtgtgtaccgacccccagccactgaaagaacagcccgccctgaacgacagccggtactgcctgagcagcagactgagagtgtccgccaccttctggcagaacccccggaaccacttcagatgccaggtgcagttctacggcctgagcgagaacgacgagtggacccaggacagagccaagcccgtgacccagatcgtgtctgccgaagcctggggcagagccgattgcggatcccagagcttcggcctgctggaccccaagctgtgctacctgctggatggcatcctgttcatctacggcgtgatcctgaccgccctgttcctgagagtgaagttcagcagaagcgccgacgcccctgcctaccagcagggacagaaccaactgtacaacgagctgaacctgggcagacgggaagagtacgacgtgctggacaagcggagaggcagggaccctgagatgggcggaaagccccagcggagaaagaacccccaggaaggactgtataacgaactccagaaagacaagatggccgaagcctacagcgagatcggcatgaagggcgagcggagaagaggcaagggccacgatggcctgtaccagggcctgagcaccgccaccaaggacacctatgacgccctgcacatgcaggccctgcctccaagaagggccaagcgatctggatctggagcaacaaacttctcactactcaaacaagcaggtgacgtggaggagaatcccgggcctactagtatggactggatttggcgcatccttttccttgtcggcgctgctaccggcgcgcattccttcgaagaagtgcagctggttgaatcaggtggcggcgttgtgcagcctggcagaagtctgagactgagctgtagcgccagcggcttcgatttcaccacctactggatgagctgggtccgacaggcccctggcaaaggactggaatggatcggcgagattcaccccgacagcagcaccatcaattacgcccctagcctgaaggacagattcaccatcagccgggacaacgccaagaacaccctgttcctccagatggactccctgaggccagaggataccggcgtgtacttttgcgccagcctgtatttcggcttcccttggtttgcctactggggccagggaacccctgtgacagttagctctacgcgtatccagaaccctgatcctgccgtgtaccagctgcgggatagcaagagcagcgacaagagcgtgtgtctgttcaccgacttcgacagccagaccaacgtgtcccagagcaaggactccgacgtgtacatcaccgataagtgcgtgctggacatgcggagcatggacttcaagagcaactccgccgtggcctggtccaacaagtccgatttcgcctgcgccaacgccttcaacaacagcattatccccgaggacacattcttcccaagcagcgacgtgccctgcggtacccagagttttgggttgttggaccctaaattgtgctatctgttggacggaatcctgttcatttacggagtgatcctgaccgcattgttcctgcgggttaagttttccagatccgcagacgcacccgcttaccaacaagggcagaaccaactctacaatgaacttaatttggggcggagggaagagtacgacgttctggacaaaaggaggggacgagatcccgagatgggcggaaagcctcagcgaaggaagaatccgcaagaggggctttataacgaactccagaaagataaaatggcagaagcctatagtgagattgggatgaagggagaaaggaggaggggtaaaggtcacgatgggttgtaccaaggattgagcacagccactaaagatacctatgatgcgctccacatgcaggccctgccgccaaga

SEQ ID NO: 8743 - DNA, 2655 bp, Artificial Sequence
  Synthetic Polynucloetide
atggccttaccagtgaccgccttgctcctgccgctggccttgctgctccacgccgccaggccggacatccagctgacacagagcccttctagcctgtctgccagcgtgggcgacagagtgaccatcacctgtaaagccagccaggacgtgggcacaagcgtggcatggtatcagcagaagcctggcaaggcccctaagctgctgatctactggaccagcaccagacacacaggcgtgcccagcagattttctggcagcggctctggcaccgacttcaccttcacaatatccagcctccagcctgaggacattgccacctactactgccagcagtacagcctgtaccgctctttcggccagggcaccaaggtggaaatcaaactcgaggggaaaccaattcccaaccctcttctgggactggattcaaccggcagcggcgaggacctgaagaacgtgttcccacctgaggtggccgtgttcgagcctagcgaggccgagatcagccacacccagaaagccaccctcgtgtgcctggctaccggcttctaccccgaccatgtggaactgtcttggtgggtcaacggcaaagaggtgcacagcggcgtgtctaccgacccccagccactgaaagaacagcccgccctgaacgacagccggtactgcctgagcagcagactgagagtgtccgccaccttctggcagaacccccggaaccacttcagatgccaggtgcagttctacggcctgagcgagaacgacgagtggacccaggacagagccaagcccgtgacccagatcgtgtctgccgaagcctggggcagagccgattgcggatcccagagcttcggcctgctggaccccaagctgtgctacctgctggatggcatcctgttcatctacggcgtgatcctgaccgccctgttcctgagagtgaagttcagcagaagcgccgacgcccctgcctaccagcagggacagaaccaactgtacaacgagctgaacctgggcagacgggaagagtacgacgtgctggacaagcggagaggcagggaccctgagatgggcggaaagccccagcggagaaagaacccccaggaaggactgtataacgaactccagaaagacaagatggccgaagcctacagcgagatcggcatgaagggcgagcggagaagaggcaagggccacgatggcctgtaccagggcctgagcaccgccaccaaggacacctatgacgccctgcacatgcaggccctgcctccaagaagggccaagcgatctggatctggagcaacaaacttctcactactcaaacaagcaggtgacgtggaggagaatcccgggcctactagtatggactggatttggcgcatccttttccttgtcggcgctgctaccggcgcgcattccttcgaagaagtgcagctggttgaatcaggtggcggcgttgtgcagcctggcagaagtctgagactgagctgtagcgccagcggcttcgatttcaccacctactggatgagctgggtccgacaggcccctggcaaaggactggaatggatcggcgagattcaccccgacagcagcaccatcaattacgcccctagcctgaaggacagattcaccatcagccgggacaacgccaagaacaccctgttcctccagatggactccctgaggccagaggataccggcgtgtacttttgcgccagcctgtatttcggcttcccttggtttgcctactggggccagggaacccctgtgacagttagctctacgcgtgagcagaaactgatctcggaagaggatgggagcggcatccagaaccctgatcctgccgtgtaccagctgcgggatagcaagagcagcgacaagagcgtgtgtctgttcaccgacttcgacagccagaccaacgtgtcccagagcaaggactccgacgtgtacatcaccgataagaccgtgctggacatgcggagcatggacttcaagagcaactccgccgtggcctggtccaacaagtccgatttcgcctgcgccaacgccttcaacaacagcattatccccgaggacacattcttcccaagccccgagagcagctgcggtacccagagttttgggttgttggaccctaaattgtgctatctgttggacggaatcctgttcatttacggagtgatcctgaccgcattgttcctgaggagcaagcggtcacggctgctccacagcgattacatgaatatgacaccacgaagaccgggtcctactcgcaaacactaccaaccctacgcacctccccgcgactttgcagcgtaccgatctcgggttaagttttccagatccgcagacgcacccgcttaccaacaagggcagaaccaactctacaatgaacttaatttggggcggagggaagagtacgacgttctggacaaaaggaggggacgagatcccgagatgggcggaaagcctcagcgaaggaagaatccgcaagaggggctttataacgaactccagaaagataaaatggcagaagcctatagtgagattgggatgaagggagaaaggaggaggggtaaaggtcacgatgggttgtaccaaggattgagcacagccactaaagatacctatgatgcgctccacatgcaggccctgccgccaaga

SEQ ID NO: 8744 - DNA, 2778 bp, Artificial Sequence
  Synthetic Polynucloetide
atggccttaccagtgaccgccttgctcctgccgctggccttgctgctccacgccgccaggccggacatccagctgacacagagcccttctagcctgtctgccagcgtgggcgacagagtgaccatcacctgtaaagccagccaggacgtgggcacaagcgtggcatggtatcagcagaagcctggcaaggcccctaagctgctgatctactggaccagcaccagacacacaggcgtgcccagcagattttctggcagcggctctggcaccgacttcaccttcacaatatccagcctccagcctgaggacattgccacctactactgccagcagtacagcctgtaccgctctttcggccagggcaccaaggtggaaatcaaactcgaggggaaaccaattcccaaccctcttctgggactggattcaaccggcagcggcgaggacctgaagaacgtgttcccacctgaggtggccgtgttcgagcctagcgaggccgagatcagccacacccagaaagccaccctcgtgtgcctggctaccggcttctaccccgaccatgtggaactgtcttggtgggtcaacggcaaagaggtgcacagcggcgtgtctaccgacccccagccactgaaagaacagcccgccctgaacgacagccggtactgcctgagcagcagactgagagtgtccgccaccttctggcagaacccccggaaccacttcagatgccaggtgcagttctacggcctgagcgagaacgacgagtggacccaggacagagccaagcccgtgacccagatcgtgtctgccgaagcctggggcagagccgattgcggatcccagagcttcggcctgctggaccccaagctgtgctacctgctggatggcatcctgttcatctacggcgtgatcctgaccgccctgttcctgaggagtaagaggagcaggctcctgcacagtgactacatgaacatgactccacgccgccccggacccacccgcaagcattaccagccctatgccccaccacgcgacttcgcagcctatcgctccagagtgaagttcagcagaagcgccgacgcccctgcctaccagcagggacagaaccaactgtacaacgagctgaacctgggcagacgggaagagtacgacgtgctggacaagcggagaggcagggaccctgagatgggcggaaagccccagcggagaaagaacccccaggaaggactgtataacgaactccagaaagacaagatggccgaagcctacagcgagatcggcatgaagggcgagcggagaagaggcaagggccacgatggcctgtaccagggcctgagcaccgccaccaaggacacctatgacgccctgcacatgcaggccctgcctccaagaagggccaagcgatctggatctggagcaacaaacttctcactactcaaacaagcaggtgacgtggaggagaatcccgggcctactagtatggactggatttggcgcatccttttccttgtcggcgctgctaccggcgcgcattccttcgaagaagtgcagctggttgaatcaggtggcggcgttgtgcagcctggcagaagtctgagactgagctgtagcgccagcggcttcgatttcaccacctactggatgagctgggtccgacaggcccctggcaaaggactggaatggatcggcgagattcaccccgacagcagcaccatcaattacgcccctagcctgaaggacagattcaccatcagccgggacaacgccaagaacaccctgttcctccagatggactccctgaggccagaggataccggcgtgtacttttgcgccagcctgtatttcggcttcccttggtttgcctactggggccagggaacccctgtgacagttagctctacgcgtgagcagaaactgatctcggaagaggatgggagcggcatccagaaccctgatcctgccgtgtaccagctgcgggatagcaagagcagcgacaagagcgtgtgtctgttcaccgacttcgacagccagaccaacgtgtcccagagcaaggactccgacgtgtacatcaccgataagaccgtgctggacatgcggagcatggacttcaagagcaactccgccgtggcctggtccaacaagtccgatttcgcctgcgccaacgccttcaacaacagcattatccccgaggacacattcttcccaagccccgagagcagctgcggtacccagagttttgggttgttggaccctaaattgtgctatctgttggacggaatcctgttcatttacggagtgatcctgaccgcattgttcctgaggagcaagcggtcacggctgctccacagcgattacatgaatatgacaccacgaagaccgggtcctactcgcaaacactaccaaccctacgcacctccccgcgactttgcagcgtaccgatctcgggttaagttttccagatccgcagacgcacccgcttaccaacaagggcagaaccaactctacaatgaacttaatttggggcggagggaagagtacgacgttctggacaaaaggaggggacgagatcccgagatgggcggaaagcctcagcgaaggaagaatccgcaagaggggctttataacgaactccagaaagataaaatggcagaagcctatagtgagattgggatgaagggagaaaggaggaggggtaaaggtcacgatgggttgtaccaaggattgagcacagccactaaagatacctatgatgcgctccacatgcaggccctgccgccaaga

SEQ ID NO: 8745 - DNA, 2661 bp, Artificial Sequence
  Synthetic Polynucloetide
atggccttaccagtgaccgccttgctcctgccgctggccttgctgctccacgccgccaggccggacatccagctgacacagagcccttctagcctgtctgccagcgtgggcgacagagtgaccatcacctgtaaagccagccaggacgtgggcacaagcgtggcatggtatcagcagaagcctggcaaggcccctaagctgctgatctactggaccagcaccagacacacaggcgtgcccagcagattttctggcagcggctctggcaccgacttcaccttcacaatatccagcctccagcctgaggacattgccacctactactgccagcagtacagcctgtaccgctctttcggccagggcaccaaggtggaaatcaaactcgaggggaaaccaattcccaaccctcttctgggactggattcaaccggcagcggcgaggacctgaagaacgtgttcccacctgaggtggccgtgttcgagcctagcgaggccgagatcagccacacccagaaagccaccctcgtgtgcctggctaccggcttctaccccgaccatgtggaactgtcttggtgggtcaacggcaaagaggtgcacagcggcgtgtctaccgacccccagccactgaaagaacagcccgccctgaacgacagccggtactgcctgagcagcagactgagagtgtccgccaccttctggcagaacccccggaaccacttcagatgccaggtgcagttctacggcctgagcgagaacgacgagtggacccaggacagagccaagcccgtgacccagatcgtgtctgccgaagcctggggcagagccgattgcggatcccagagcttcggcctgctggaccccaagctgtgctacctgctggatggcatcctgttcatctacggcgtgatcctgaccgccctgttcctgagagtgaagttcagcagaagcgccgacgcccctgcctaccagcagggacagaaccaactgtacaacgagctgaacctgggcagacgggaagagtacgacgtgctggacaagcggagaggcagggaccctgagatgggcggaaagccccagcggagaaagaacccccaggaaggactgtataacgaactccagaaagacaagatggccgaagcctacagcgagatcggcatgaagggcgagcggagaagaggcaagggccacgatggcctgtaccagggcctgagcaccgccaccaaggacacctatgacgccctgcacatgcaggccctgcctccaagaagggccaagcgatctggatctggagcaacaaacttctcactactcaaacaagcaggtgacgtggaggagaatcccgggcctactagtatggactggatttggcgcatccttttccttgtcggcgctgctaccggcgcgcattccttcgaagaagtgcagctggttgaatcaggtggcggcgttgtgcagcctggcagaagtctgagactgagctgtagcgccagcggcttcgatttcaccacctactggatgagctgggtccgacaggcccctggcaaaggactggaatggatcggcgagattcaccccgacagcagcaccatcaattacgcccctagcctgaaggacagattcaccatcagccgggacaacgccaagaacaccctgttcctccagatggactccctgaggccagaggataccggcgtgtacttttgcgccagcctgtatttcggcttcccttggtttgcctactggggccagggaacccctgtgacagttagctctacgcgtgagcagaaactgatctcggaagaggatctggggagcggcatccagaaccctgatcctgccgtgtaccagctgcgggatagcaagagcagcgacaagagcgtgtgtctgttcaccgacttcgacagccagaccaacgtgtcccagagcaaggactccgacgtgtacatcaccgataagaccgtgctggacatgcggagcatggacttcaagagcaactccgccgtggcctggtccaacaagtccgatttcgcctgcgccaacgccttcaacaacagcattatccccgaggacacattcttcccaagccccgagagcagctgcggtacccagagttttgggttgttggaccctaaattgtgctatctgttggacggaatcctgttcatttacggagtgatcctgaccgcattgttcctgaagagaggccggaagaagctgctgtacatcttcaagcagcctttcatgcggcccgtgcagaccacccaggaagaggacggctgctcctgccggttccccgaggaagaagaaggcggctgcgagctgcgggttaagttttccagatccgcagacgcacccgcttaccaacaagggcagaaccaactctacaatgaacttaatttggggcggagggaagagtacgacgttctggacaaaaggaggggacgagatcccgagatgggcggaaagcctcagcgaaggaagaatccgcaagaggggctttataacgaactccagaaagataaaatggcagaagcctatagtgagattgggatgaagggagaaaggaggaggggtaaaggtcacgatgggttgtaccaaggattgagcacagccactaaagatacctatgatgcgctccacatgcaggccctgccgccaaga

SEQ ID NO: 8746 - DNA, 2787 bp, Artificial Sequence
  Synthetic Polynucloetide
atggccttaccagtgaccgccttgctcctgccgctggccttgctgctccacgccgccaggccggacatccagctgacacagagcccttctagcctgtctgccagcgtgggcgacagagtgaccatcacctgtaaagccagccaggacgtgggcacaagcgtggcatggtatcagcagaagcctggcaaggcccctaagctgctgatctactggaccagcaccagacacacaggcgtgcccagcagattttctggcagcggctctggcaccgacttcaccttcacaatatccagcctccagcctgaggacattgccacctactactgccagcagtacagcctgtaccgctctttcggccagggcaccaaggtggaaatcaaactcgaggggaaaccaattcccaaccctcttctgggactggattcaaccggcagcggcgaggacctgaagaacgtgttcccacctgaggtggccgtgttcgagcctagcgaggccgagatcagccacacccagaaagccaccctcgtgtgcctggctaccggcttctaccccgaccatgtggaactgtcttggtgggtcaacggcaaagaggtgcacagcggcgtgtctaccgacccccagccactgaaagaacagcccgccctgaacgacagccggtactgcctgagcagcagactgagagtgtccgccaccttctggcagaacccccggaaccacttcagatgccaggtgcagttctacggcctgagcgagaacgacgagtggacccaggacagagccaagcccgtgacccagatcgtgtctgccgaagcctggggcagagccgattgcggatcccagagcttcggcctgctggaccccaagctgtgctacctgctggatggcatcctgttcatctacggcgtgatcctgaccgccctgttcctgaaacggggcagaaagaaactcctgtatatattcaaacaaccatttatgagaccagtacaaactactcaagaggaagatggctgtagctgccgatttccagaagaagaagaaggaggatgtgaactgagagtgaagttcagcagaagcgccgacgcccctgcctaccagcagggacagaaccaactgtacaacgagctgaacctgggcagacgggaagagtacgacgtgctggacaagcggagaggcagggaccctgagatgggcggaaagccccagcggagaaagaacccccaggaaggactgtataacgaactccagaaagacaagatggccgaagcctacagcgagatcggcatgaagggcgagcggagaagaggcaagggccacgatggcctgtaccagggcctgagcaccgccaccaaggacacctatgacgccctgcacatgcaggccctgcctccaagaagggccaagcgatctggatctggagcaacaaacttctcactactcaaacaagcaggtgacgtggaggagaatcccgggcctactagtatggactggatttggcgcatccttttccttgtcggcgctgctaccggcgcgcattccttcgaagaagtgcagctggttgaatcaggtggcggcgttgtgcagcctggcagaagtctgagactgagctgtagcgccagcggcttcgatttcaccacctactggatgagctgggtccgacaggcccctggcaaaggactggaatggatcggcgagattcaccccgacagcagcaccatcaattacgcccctagcctgaaggacagattcaccatcagccgggacaacgccaagaacaccctgttcctccagatggactccctgaggccagaggataccggcgtgtacttttgcgccagcctgtatttcggcttcccttggtttgcctactggggccagggaacccctgtgacagttagctctacgcgtgagcagaaactgatctcggaagaggatctggggagcggcatccagaaccctgatcctgccgtgtaccagctgcgggatagcaagagcagcgacaagagcgtgtgtctgttcaccgacttcgacagccagaccaacgtgtcccagagcaaggactccgacgtgtacatcaccgataagaccgtgctggacatgcggagcatggacttcaagagcaactccgccgtggcctggtccaacaagtccgatttcgcctgcgccaacgccttcaacaacagcattatccccgaggacacattcttcccaagccccgagagcagctgcggtacccagagttttgggttgttggaccctaaattgtgctatctgttggacggaatcctgttcatttacggagtgatcctgaccgcattgttcctgaagagaggccggaagaagctgctgtacatcttcaagcagcctttcatgcggcccgtgcagaccacccaggaagaggacggctgctcctgccggttccccgaggaagaagaaggcggctgcgagctgcgggttaagttttccagatccgcagacgcacccgcttaccaacaagggcagaaccaactctacaatgaacttaatttggggcggagggaagagtacgacgttctggacaaaaggaggggacgagatcccgagatgggcggaaagcctcagcgaaggaagaatccgcaagaggggctttataacgaactccagaaagataaaatggcagaagcctatagtgagattgggatgaagggagaaaggaggaggggtaaaggtcacgatgggttgtaccaaggattgagcacagccactaaagatacctatgatgcgctccacatgcaggccctgccgccaaga

SEQ ID NO: 8747 - DNA, 2460 bp, Artificial Sequence
  Synthetic Polynucloetide
atggccttaccagtgaccgccttgctcctgccgctggccttgctgctccacgccgccaggccggacatccagctgacacagagcccttctagcctgtctgccagcgtgggcgacagagtgaccatcacctgtaaagccagccaggacgtgggcacaagcgtggcatggtatcagcagaagcctggcaaggcccctaagctgctgatctactggaccagcaccagacacacaggcgtgcccagcagattttctggcagcggctctggcaccgacttcaccttcacaatatccagcctccagcctgaggacattgccacctactactgccagcagtacagcctgtaccgctctttcggccagggcaccaaggtggaaatcaaactcgagcagagcttcggcctgctggaccccaagctgtgctacctgctggatggcatcctgttcatctacggcgtgatcctgaccgccctgttcctgagagtgaagttcagcagaagcgccgacgcccctgcctaccagcagggacagaaccaactgtacaacgagctgaacctgggcagacgggaagagtacgacgtgctggacaagcggagaggcagggaccctgagatgggcggaaagccccagcggagaaagaacccccaggaaggactgtataacgaactccagaaagacaagatggccgaagcctacagcgagatcggcatgaagggcgagcggagaagaggcaagggccacgatggcctgtaccagggcctgagcaccgccaccaaggacacctatgacgccctgcacatgcaggccctgcctccaagaagggccaagcgatctggatctggagcaacaaacttctcactactcaaacaagcaggtgacgtggaggagaatcccgggcctactagtatggactggatttggcgcatccttttccttgtcggcgctgctaccggcgcgcattccttcgaagaagtgcagctggttgaatcaggtggcggcgttgtgcagcctggcagaagtctgagactgagctgtagcgccagcggcttcgatttcaccacctactggatgagctgggtccgacaggcccctggcaaaggactggaatggatcggcgagattcaccccgacagcagcaccatcaattacgcccctagcctgaaggacagattcaccatcagccgggacaacgccaagaacaccctgttcctccagatggactccctgaggccagaggataccggcgtgtacttttgcgccagcctgtatttcggcttcccttggtttgcctactggggccagggaacccctgtgacagttagctctacgcgtcagagttttgggttgttggaccctaaattgtgctatctgttggacggaatcctgttcatttacggagtgatcctgaccgcattgttcctgcgggttaagttttccagatccgcagacgcacccgcttaccaacaagggcagaaccaactctacaatgaacttaatttggggcggagggaagagtacgacgttctggacaaaaggaggggacgagatcccgagatgggcggaaagcctcagcgaaggaagaatccgcaagaggggctttataacgaactccagaaagataaaatggcagaagcctatagtgagattgggatgaagggagaaaggaggaggggtaaaggtcacgatgggttgtaccaaggattgagcacagccactaaagatacctatgatgcgctccacatgcaggccctgccgccaagacgcgccaagagaagcggatctggcgtgaagcagaccctgaatttcgacctgctgaagctggctggcgacgtggaatccaacccaggcccttctagaggccatatgaccgagtacaagcccacggtgcgcctcgccacccgcgacgacgtccccagggccgtacgcaccctcgccgccgcgttcgccgactaccccgccacgcgccacaccgtcgatccggaccgccacatcgagcgggtcaccgagctgcaagaactcttcctcacgcgcgtcgggctcgacatcggcaaggtgtgggtcgcggacgacggcgccgcggtggcggtctggaccacgccggagagcgtcgaagcgggggcggtgttcgccgagatcggcccgcgcatggccgagttgagcggttcccggctggccgcgcagcaacagatggaaggcctcctggcgccgcaccggcccaaggagcccgcgtggttcctggccaccgtcggcgtctcgcccgaccaccagggcaagggtctgggcagcgccgtcgtgctccccggagtggaggcggccgagcgcgccggggtgcccgccttcctggagacctccgcgccccgcaacctccccttctacgagcggctcggcttcaccgtcaccgccgacgtcgaggtgcccgaaggaccgcgcacctggtgcatgacccgcaagcccggtgcctga

SEQ ID NO: 8748 - DNA, 1932 bp, Artificial Sequence
  Synthetic Polynucloetide
atggccttaccagtgaccgccttgctcctgccgctggccttgctgctccacgccgccaggccggacatccagctgacacagagcccttctagcctgtctgccagcgtgggcgacagagtgaccatcacctgtaaagccagccaggacgtgggcacaagcgtggcatggtatcagcagaagcctggcaaggcccctaagctgctgatctactggaccagcaccagacacacaggcgtgcccagcagattttctggcagcggctctggcaccgacttcaccttcacaatatccagcctccagcctgaggacattgccacctactactgccagcagtacagcctgtaccgctctttcggccagggcaccaaggtggaaatcaaactcgagggacagcctaaggccaatcctaccgtgacactgttccctccaagcagcgaagaactccaggccaacaaggccacacttgtgtgcctgatctccgacttctaccctggggctgtgacagtggcttggaaggccgatggatctcctgtgaaagccggcgtggaaaccaccaagccatccaagcagagcaacaacaaatacgccgccagctcctacctgagcctgacacctgagcagtggaagtcccacagatcctacagctgccaagtgacccacgaaggcagcaccgtggaaaagacagtggcccctacagagtgcagccccatcaagaccgatgtgattacaatggaccccaaggacaactgctccaaggacgccaacgataccctgctgctccagctgaccaacaccagcgcctactacatgtacttgttgctgctgctgaagtccgtggtgtacttcgccatcatcacatgctgcctgctgcggagaaccgccttctgctgcaacggcgagaagtctagggccaagcgatctggatctggagcaacaaacttctcactactcaaacaagcaggtgacgtggaggagaatcccgggcctactagtatggactggatttggcgcatccttttccttgtcggcgctgctaccggcgcgcattccttcgaagaagtgcagctggttgaatcaggtggcggcgttgtgcagcctggcagaagtctgagactgagctgtagcgccagcggcttcgatttcaccacctactggatgagctgggtccgacaggcccctggcaaaggactggaatggatcggcgagattcaccccgacagcagcaccatcaattacgcccctagcctgaaggacagattcaccatcagccgggacaacgccaagaacaccctgttcctccagatggactccctgaggccagaggataccggcgtgtacttttgcgccagcctgtatttcggcttcccttggtttgcctactggggccagggaacccctgtgacagttagctctacgcgtgcctctacaaagggaccctccgtgtttcctctggctcccagcagcaagtctacaagcggaggaacagccgctctgggctgcctggtcaaggattactttcccgagcctgtgaccgtgtcctggaatagcggagcactgacaagcggcgtgcacacctttccagccgtgctgcaaagcagcggcctgtactctctgagcagcgtggtcacagtgcctagctctagcctgggcacccagacctacatctgcaatgtgaaccacaagcctagcaacaccaaggtggacaagagagtggaacccaagagctgtgaagtgaaaaccgactccaccgaccacgtgaagcccaaagagacagagaacaccaagcagcccagcaagagctgccacaagcccaaggccatcgtgcacaccgagaaagtgaacatgatgagcctgaccgtgctgggcctgcggatgctgttcgccaaaaccgtggccgtgaacttcctgctgaccgccaagctgttcttcctc

SEQ ID NO: 8749 - DNA, 1866 bp, Artificial Sequence
  Synthetic Polynucloetide
atggccttaccagtgaccgccttgctcctgccgctggccttgctgctccacgccgccaggccggacatccagctgacacagagcccttctagcctgtctgccagcgtgggcgacagagtgaccatcacctgtaaagccagccaggacgtgggcacaagcgtggcatggtatcagcagaagcctggcaaggcccctaagctgctgatctactggaccagcaccagacacacaggcgtgcccagcagattttctggcagcggctctggcaccgacttcaccttcacaatatccagcctccagcctgaggacattgccacctactactgccagcagtacagcctgtaccgctctttcggccagggcaccaaggtggaaatcaaactcgagggacagcctaaggccaatcctaccgtgacactgttccctccaagcagcgaagaactccaggccaacaaggccacacttgtgtgcctgatctccgacttctaccctggggctgtgacagtggcttggaaggccgatggatctcctgtgaaagccggcgtggaaaccaccaagccatccaagcagagcaacaacaaatacgccgccagctcctacctgagcctgacacctgagcagtggaagtcccacagatcctacagctgccaagtgacccacgaaggcagcaccgtggaaaagacagtggcccctacagagtgcagcggcagagccgattgcggcatcaccagcgccagctaccaccagggcgtgctgagcgccaccatcctgtacgagatcctgctgggcaaggccaccctgtacgccgtgctggtgtctgccctggtgctgatggctatggtcaagcggaaggacagccggggaagggccaagcgatctggatctggagcaacaaacttctcactactcaaacaagcaggtgacgtggaggagaatcccgggcctactagtatggactggatttggcgcatccttttccttgtcggcgctgctaccggcgcgcattccttcgaagaagtgcagctggttgaatcaggtggcggcgttgtgcagcctggcagaagtctgagactgagctgtagcgccagcggcttcgatttcaccacctactggatgagctgggtccgacaggcccctggcaaaggactggaatggatcggcgagattcaccccgacagcagcaccatcaattacgcccctagcctgaaggacagattcaccatcagccgggacaacgccaagaacaccctgttcctccagatggactccctgaggccagaggataccggcgtgtacttttgcgccagcctgtatttcggcttcccttggtttgcctactggggccagggaacccctgtgacagttagctctacgcgtgcctctacaaagggaccctccgtgtttcctctggctcccagcagcaagtctacaagcggaggaacagccgctctgggctgcctggtcaaggattactttcccgagcctgtgaccgtgtcctggaatagcggagcactgacaagcggcgtgcacacctttccagccgtgctgcaaagcagcggcctgtactctctgagcagcgtggtcacagtgcctagctctagcctgggcacccagacctacatctgcaatgtgaaccacaagcctagcaacaccaaggtggacaagagagtggaacccaagagctgtatccccgaggacacattcttcccaagcagcgacgtgccctgcgacgtgaagctggtggaaaagagcttcgagacagacaccaacctgaacttccagaacctgagcgtgatcggcttcagaatcctgctgctgaaagtggccggctttaacctgctgatgaccctgcggctgtggtccagc

SEQ ID NO: 8750 - DNA, 1866 bp, Artificial Sequence
  Synthetic Polynucloetide
atggccttaccagtgaccgccttgctcctgccgctggccttgctgctccacgccgccaggccggacatccagctgacacagagcccttctagcctgtctgccagcgtgggcgacagagtgaccatcacctgtaaagccagccaggacgtgggcacaagcgtggcatggtatcagcagaagcctggcaaggcccctaagctgctgatctactggaccagcaccagacacacaggcgtgcccagcagattttctggcagcggctctggcaccgacttcaccttcacaatatccagcctccagcctgaggacattgccacctactactgccagcagtacagcctgtaccgctctttcggccagggcaccaaggtggaaatcaaactcgagggacagcctaaggccaatcctaccgtgacactgttccctccaagcagcgaagaactccaggccaacaaggccacacttgtgtgcctgatctccgacttctaccctggggctgtgacagtggcttggaaggccgatggatctcctgtgaaagccggcgtggaaaccaccaagccatccaagcagagcaacaacaaatacgccgccagctcctacctgagcctgacacctgagcagtggaagtcccacagatcctacagctgccaagtgacccacgaaggcagcaccgtggaaaagacagtggcccctacagagtgcagcggcagagccgattgcggctttaccagcgagagctaccagcagggcgtgctgagcgccaccatcctgtacgagatcctgctgggcaaggccaccctgtacgccgtgctggtgtctgccctggtgctgatggctatggtcaagcggaaggacagccggggaagggccaagcgatctggatctggagcaacaaacttctcactactcaaacaagcaggtgacgtggaggagaatcccgggcctactagtatggactggatttggcgcatccttttccttgtcggcgctgctaccggcgcgcattccttcgaagaagtgcagctggttgaatcaggtggcggcgttgtgcagcctggcagaagtctgagactgagctgtagcgccagcggcttcgatttcaccacctactggatgagctgggtccgacaggcccctggcaaaggactggaatggatcggcgagattcaccccgacagcagcaccatcaattacgcccctagcctgaaggacagattcaccatcagccgggacaacgccaagaacaccctgttcctccagatggactccctgaggccagaggataccggcgtgtacttttgcgccagcctgtatttcggcttcccttggtttgcctactggggccagggaacccctgtgacagttagctctacgcgtgcctctacaaagggaccctccgtgtttcctctggctcccagcagcaagtctacaagcggaggaacagccgctctgggctgcctggtcaaggattactttcccgagcctgtgaccgtgtcctggaatagcggagcactgacaagcggcgtgcacacctttccagccgtgctgcaaagcagcggcctgtactctctgagcagcgtggtcacagtgcctagctctagcctgggcacccagacctacatctgcaatgtgaaccacaagcctagcaacaccaaggtggacaagagagtggaacccaagagctgtatccccgaggacacattcttcccaagccccgagagcagctgcgacgtgaagctggtggaaaagagcttcgagacagacaccaacctgaacttccagaacctgagcgtgatcggcttcagaatcctgctgctgaaagtggccggctttaacctgctgatgaccctgcggctgtggtccagc

SEQ ID NO: 8751 - DNA, 1344 bp, Artificial Sequence
  Synthetic Polynucloetide
atggccttaccagtgaccgccttgctcctgccgctggccttgctgctccacgccgccaggccggacatccagctgacacagagcccttctagcctgtctgccagcgtgggcgacagagtgaccatcacctgtaaagccagccaggacgtgggcacaagcgtggcatggtatcagcagaagcctggcaaggcccctaagctgctgatctactggaccagcaccagacacacaggcgtgcccagcagattttctggcagcggctctggcaccgacttcaccttcacaatatccagcctccagcctgaggacattgccacctactactgccagcagtacagcctgtaccgctctttcggccagggcaccaaggtggaaatcaaaggcggaggcggaagtggaggcggaggatctggcggcggaggctctgaagtgcagctggttgaatcaggtggcggcgttgtgcagcctggcagaagtctgagactgagctgtagcgccagcggcttcgatttcaccacctactggatgagctgggtccgacaggcccctggcaaaggactggaatggatcggcgagattcaccccgacagcagcaccatcaattacgcccctagcctgaaggacagattcaccatcagccgggacaacgccaagaacaccctgttcctccagatggactccctgaggccagaggataccggcgtgtacttttgcgccagcctgtatttcggcttcccttggtttgcctactggggccagggaacccctgtgacagttagctctacgcgtgacggtaacgaggagatgggaggaatcactcaaaccccttacaaagtctcaatttcaggaacaactgttatccttacatgtccccagtatcctggcagcgagatcctttggcagcataacgacaagaatatagggggagatgaagacgataagaatatcggatctgacgaggatcacttgagcctgaaagagttctccgagcttgaacaaagcggatattatgtgtgctatccgcgcgggtcaaagccggaagacgctaacttttacctttatctccgagccagagtgtgcgaaaattgcatggaaatggacgttatgtccgttgctacaatagttatcgtagatatatgcatcacgggtggactgcttctgctggtttattattggtccaagaatagaaaggccaaagctaaacccgtgaccagaggcgctggcgcaggcggaaggcaaaggggacaaaacaaagaacggccaccaccagtgccaaatccagattatgagcctattcggaaaggacagagggacctgtactctggcctgaatcagagaagaatc

SEQ ID NO: 8752 - DNA, 1239 bp, Artificial Sequence
  Synthetic Polynucloetide
atggccttaccagtgaccgccttgctcctgccgctggccttgctgctccacgccgccaggccggacatccagctgacacagagcccttctagcctgtctgccagcgtgggcgacagagtgaccatcacctgtaaagccagccaggacgtgggcacaagcgtggcatggtatcagcagaagcctggcaaggcccctaagctgctgatctactggaccagcaccagacacacaggcgtgcccagcagattttctggcagcggctctggcaccgacttcaccttcacaatatccagcctccagcctgaggacattgccacctactactgccagcagtacagcctgtaccgctctttcggccagggcaccaaggtggaaatcaaaggcggaggcggaagtggaggcggaggatctggcggcggaggctctgaagtgcagctggttgaatcaggtggcggcgttgtgcagcctggcagaagtctgagactgagctgtagcgccagcggcttcgatttcaccacctactggatgagctgggtccgacaggcccctggcaaaggactggaatggatcggcgagattcaccccgacagcagcaccatcaattacgcccctagcctgaaggacagattcaccatcagccgggacaacgccaagaacaccctgttcctccagatggactccctgaggccagaggataccggcgtgtacttttgcgccagcctgtatttcggcttcccttggtttgcctactggggccagggaacccctgtgacagttagctctacgcgtttcaagatccccatcgaggaactggaagatcgggtgttcgtgaactgcaacacctctatcacctgggtggaaggcaccgtgggaacactgctgagcgacatcaccagactggacctcggcaagcggattctggaccctcggggcatctacagatgcaacggcaccgacatctacaaggacaaagaaagcaccgtgcaggtccactacagaatgtgccagtcctgcgtggaactggaccctgctacagtggccggcatcatcgtgaccgatgtgatcgctactctgctgctggctctgggagtgttctgcttcgccggacacgaaacaggcagactgtctggcgctgccgatacacaggccctgctgagaaacgaccaagtgtatcagcccctgcgcgacagagatgatgcccagtattctcacctcggcggcaactgggctagaaacaag

SEQ ID NO: 8753 - DNA, 1269 bp, Artificial Sequence
  Synthetic Polynucloetide
atggccttaccagtgaccgccttgctcctgccgctggccttgctgctccacgccgccaggccggacatccagctgacacagagcccttctagcctgtctgccagcgtgggcgacagagtgaccatcacctgtaaagccagccaggacgtgggcacaagcgtggcatggtatcagcagaagcctggcaaggcccctaagctgctgatctactggaccagcaccagacacacaggcgtgcccagcagattttctggcagcggctctggcaccgacttcaccttcacaatatccagcctccagcctgaggacattgccacctactactgccagcagtacagcctgtaccgctctttcggccagggcaccaaggtggaaatcaaaggcggaggcggaagtggaggcggaggatctggcggcggaggctctgaagtgcagctggttgaatcaggtggcggcgttgtgcagcctggcagaagtctgagactgagctgtagcgccagcggcttcgatttcaccacctactggatgagctgggtccgacaggcccctggcaaaggactggaatggatcggcgagattcaccccgacagcagcaccatcaattacgcccctagcctgaaggacagattcaccatcagccgggacaacgccaagaacaccctgttcctccagatggactccctgaggccagaggataccggcgtgtacttttgcgccagcctgtatttcggcttcccttggtttgcctactggggccagggaacccctgtgacagttagctctacgcgtcagagcatcaagggcaaccacctggtcaaggtgtacgactaccaagaggacggcagcgtgctgctgacatgtgatgccgaggccaagaacatcacctggtttaaggacggcaagatgatcggcttcctgaccgaggacaagaagaagtggaacctgggcagcaacgctaaggaccccagaggcatgtatcagtgcaagggcagccagaacaagagcaagcccctccaggtgtactaccggatgtgccagaactgcatcgagctgaacgccgctaccatcagcggctttctgttcgccgagatcgtgtccatcttcgtgctggccgtgggcgtgtactttatcgctggacaggatggcgtgcggcagagcagagcttccgataagcaaaccctgctgcctaacgaccagctgtaccagcctctgaaggacagagaggacgaccagtacagccacctccagggcaatcagctgagaagaaac

SEQ ID NO: 8754 - DNA, 1218 bp, Artificial Sequence
  Synthetic Polynucloetide
atggccttaccagtgaccgccttgctcctgccgctggccttgctgctccacgccgccaggccggacatccagctgacacagagcccttctagcctgtctgccagcgtgggcgacagagtgaccatcacctgtaaagccagccaggacgtgggcacaagcgtggcatggtatcagcagaagcctggcaaggcccctaagctgctgatctactggaccagcaccagacacacaggcgtgcccagcagattttctggcagcggctctggcaccgacttcaccttcacaatatccagcctccagcctgaggacattgccacctactactgccagcagtacagcctgtaccgctctttcggccagggcaccaaggtggaaatcaaaggcggaggcggaagtggaggcggaggatctggcggcggaggctctgaagtgcagctggttgaatcaggtggcggcgttgtgcagcctggcagaagtctgagactgagctgtagcgccagcggcttcgatttcaccacctactggatgagctgggtccgacaggcccctggcaaaggactggaatggatcggcgagattcaccccgacagcagcaccatcaattacgcccctagcctgaaggacagattcaccatcagccgggacaacgccaagaacaccctgttcctccagatggactccctgaggccagaggataccggcgtgtacttttgcgccagcctgtatttcggcttcccttggtttgcctactggggccagggaacccctgtgacagttagctctacgcgtcagagttttgggttgttggaccctaaattgtgctatctgttggacggaatcctgttcatttacggagtgatcctgaccgcattgttcctgcgggttaagttttccagatccgcagacgcacccgcttaccaacaagggcagaaccaactctacaatgaacttaatttggggcggagggaagagtacgacgttctggacaaaaggaggggacgagatcccgagatgggcggaaagcctcagcgaaggaagaatccgcaagaggggctttataacgaactccagaaagataaaatggcagaagcctatagtgagattgggatgaagggagaaaggaggaggggtaaaggtcacgatgggttgtaccaaggattgagcacagccactaaagatacctatgatgcgctccacatgcaggccctgccgccaaga

SEQ ID NO: 8755 - DNA, 1344 bp, Artificial Sequence
  Synthetic Polynucloetide
atggccttaccagtgaccgccttgctcctgccgctggccttgctgctccacgccgccaggccggaagtgcagctggttgaatcaggtggcggcgttgtgcagcctggcagaagtctgagactgagctgtagcgccagcggcttcgatttcaccacctactggatgagctgggtccgacaggcccctggcaaaggactggaatggatcggcgagattcaccccgacagcagcaccatcaattacgcccctagcctgaaggacagattcaccatcagccgggacaacgccaagaacaccctgttcctccagatggactccctgaggccagaggataccggcgtgtacttttgcgccagcctgtatttcggcttcccttggtttgcctactggggccagggaacccctgtgacagttagctctggcggaggcggaagtggaggcggaggatctggcggcggaggctctgacatccagctgacacagagcccttctagcctgtctgccagcgtgggcgacagagtgaccatcacctgtaaagccagccaggacgtgggcacaagcgtggcatggtatcagcagaagcctggcaaggcccctaagctgctgatctactggaccagcaccagacacacaggcgtgcccagcagattttctggcagcggctctggcaccgacttcaccttcacaatatccagcctccagcctgaggacattgccacctactactgccagcagtacagcctgtaccgctctttcggccagggcaccaaggtggaaatcaaaacgcgtgacggtaacgaggagatgggaggaatcactcaaaccccttacaaagtctcaatttcaggaacaactgttatccttacatgtccccagtatcctggcagcgagatcctttggcagcataacgacaagaatatagggggagatgaagacgataagaatatcggatctgacgaggatcacttgagcctgaaagagttctccgagcttgaacaaagcggatattatgtgtgctatccgcgcgggtcaaagccggaagacgctaacttttacctttatctccgagccagagtgtgcgaaaattgcatggaaatggacgttatgtccgttgctacaatagttatcgtagatatatgcatcacgggtggactgcttctgctggtttattattggtccaagaatagaaaggccaaagctaaacccgtgaccagaggcgctggcgcaggcggaaggcaaaggggacaaaacaaagaacggccaccaccagtgccaaatccagattatgagcctattcggaaaggacagagggacctgtactctggcctgaatcagagaagaatc

SEQ ID NO: 8756 - DNA, 1239 bp, Artificial Sequence
  Synthetic Polynucloetide
atggccttaccagtgaccgccttgctcctgccgctggccttgctgctccacgccgccaggccggaagtgcagctggttgaatcaggtggcggcgttgtgcagcctggcagaagtctgagactgagctgtagcgccagcggcttcgatttcaccacctactggatgagctgggtccgacaggcccctggcaaaggactggaatggatcggcgagattcaccccgacagcagcaccatcaattacgcccctagcctgaaggacagattcaccatcagccgggacaacgccaagaacaccctgttcctccagatggactccctgaggccagaggataccggcgtgtacttttgcgccagcctgtatttcggcttcccttggtttgcctactggggccagggaacccctgtgacagttagctctggcggaggcggaagtggaggcggaggatctggcggcggaggctctgacatccagctgacacagagcccttctagcctgtctgccagcgtgggcgacagagtgaccatcacctgtaaagccagccaggacgtgggcacaagcgtggcatggtatcagcagaagcctggcaaggcccctaagctgctgatctactggaccagcaccagacacacaggcgtgcccagcagattttctggcagcggctctggcaccgacttcaccttcacaatatccagcctccagcctgaggacattgccacctactactgccagcagtacagcctgtaccgctctttcggccagggcaccaaggtggaaatcaaaacgcgtttcaagatccccatcgaggaactggaagatcgggtgttcgtgaactgcaacacctctatcacctgggtggaaggcaccgtgggaacactgctgagcgacatcaccagactggacctcggcaagcggattctggaccctcggggcatctacagatgcaacggcaccgacatctacaaggacaaagaaagcaccgtgcaggtccactacagaatgtgccagtcctgcgtggaactggaccctgctacagtggccggcatcatcgtgaccgatgtgatcgctactctgctgctggctctgggagtgttctgcttcgccggacacgaaacaggcagactgtctggcgctgccgatacacaggccctgctgagaaacgaccaagtgtatcagcccctgcgcgacagagatgatgcccagtattctcacctcggcggcaactgggctagaaacaag

SEQ ID NO: 8757 - DNA, 1269 bp, Artificial Sequence
  Synthetic Polynucloetide
atggccttaccagtgaccgccttgctcctgccgctggccttgctgctccacgccgccaggccggaagtgcagctggttgaatcaggtggcggcgttgtgcagcctggcagaagtctgagactgagctgtagcgccagcggcttcgatttcaccacctactggatgagctgggtccgacaggcccctggcaaaggactggaatggatcggcgagattcaccccgacagcagcaccatcaattacgcccctagcctgaaggacagattcaccatcagccgggacaacgccaagaacaccctgttcctccagatggactccctgaggccagaggataccggcgtgtacttttgcgccagcctgtatttcggcttcccttggtttgcctactggggccagggaacccctgtgacagttagctctggcggaggcggaagtggaggcggaggatctggcggcggaggctctgacatccagctgacacagagcccttctagcctgtctgccagcgtgggcgacagagtgaccatcacctgtaaagccagccaggacgtgggcacaagcgtggcatggtatcagcagaagcctggcaaggcccctaagctgctgatctactggaccagcaccagacacacaggcgtgcccagcagattttctggcagcggctctggcaccgacttcaccttcacaatatccagcctccagcctgaggacattgccacctactactgccagcagtacagcctgtaccgctctttcggccagggcaccaaggtggaaatcaaaacgcgtcagagcatcaagggcaaccacctggtcaaggtgtacgactaccaagaggacggcagcgtgctgctgacatgtgatgccgaggccaagaacatcacctggtttaaggacggcaagatgatcggcttcctgaccgaggacaagaagaagtggaacctgggcagcaacgctaaggaccccagaggcatgtatcagtgcaagggcagccagaacaagagcaagcccctccaggtgtactaccggatgtgccagaactgcatcgagctgaacgccgctaccatcagcggctttctgttcgccgagatcgtgtccatcttcgtgctggccgtgggcgtgtactttatcgctggacaggatggcgtgcggcagagcagagcttccgataagcaaaccctgctgcctaacgaccagctgtaccagcctctgaaggacagagaggacgaccagtacagccacctccagggcaatcagctgagaagaaac

SEQ ID NO: 8758 - DNA, 1218 bp, Artificial Sequence
  Synthetic Polynucloetide
atggccttaccagtgaccgccttgctcctgccgctggccttgctgctccacgccgccaggccggaagtgcagctggttgaatcaggtggcggcgttgtgcagcctggcagaagtctgagactgagctgtagcgccagcggcttcgatttcaccacctactggatgagctgggtccgacaggcccctggcaaaggactggaatggatcggcgagattcaccccgacagcagcaccatcaattacgcccctagcctgaaggacagattcaccatcagccgggacaacgccaagaacaccctgttcctccagatggactccctgaggccagaggataccggcgtgtacttttgcgccagcctgtatttcggcttcccttggtttgcctactggggccagggaacccctgtgacagttagctctggcggaggcggaagtggaggcggaggatctggcggcggaggctctgacatccagctgacacagagcccttctagcctgtctgccagcgtgggcgacagagtgaccatcacctgtaaagccagccaggacgtgggcacaagcgtggcatggtatcagcagaagcctggcaaggcccctaagctgctgatctactggaccagcaccagacacacaggcgtgcccagcagattttctggcagcggctctggcaccgacttcaccttcacaatatccagcctccagcctgaggacattgccacctactactgccagcagtacagcctgtaccgctctttcggccagggcaccaaggtggaaatcaaaacgcgtcagagttttgggttgttggaccctaaattgtgctatctgttggacggaatcctgttcatttacggagtgatcctgaccgcattgttcctgcgggttaagttttccagatccgcagacgcacccgcttaccaacaagggcagaaccaactctacaatgaacttaatttggggcggagggaagagtacgacgttctggacaaaaggaggggacgagatcccgagatgggcggaaagcctcagcgaaggaagaatccgcaagaggggctttataacgaactccagaaagataaaatggcagaagcctatagtgagattgggatgaagggagaaaggaggaggggtaaaggtcacgatgggttgtaccaaggattgagcacagccactaaagatacctatgatgcgctccacatgcaggccctgccgccaaga

SEQ ID NO: 8759 - DNA, 1920 bp, Artificial Sequence
  Synthetic Polynucloetide
atggccttaccagtgaccgccttgctcctgccgctggccttgctgctccacgccgccaggccggacatccagctgacacagagcccttctagcctgtctgccagcgtgggcgacagagtgaccatcacctgtaaagccagccaggacgtgggcacaagcgtggcatggtatcagcagaagcctggcaaggcccctaagctgctgatctactggaccagcaccagacacacaggcgtgcccagcagattttctggcagcggctctggcaccgacttcaccttcacaatatccagcctccagcctgaggacattgccacctactactgccagcagtacagcctgtaccgctctttcggccagggcaccaaggtggaaatcaaaggcggaggcggaagtggaggcggaggatctggcggcggaggctctgaagtgcagctggttgaatcaggtggcggcgttgtgcagcctggcagaagtctgagactgagctgtagcgccagcggcttcgatttcaccacctactggatgagctgggtccgacaggcccctggcaaaggactggaatggatcggcgagattcaccccgacagcagcaccatcaattacgcccctagcctgaaggacagattcaccatcagccgggacaacgccaagaacaccctgttcctccagatggactccctgaggccagaggataccggcgtgtacttttgcgccagcctgtatttcggcttcccttggtttgcctactggggccagggaacccctgtgacagttagctctacgcgtgggagcggcatccagaaccctgatcctgccgtgtaccagctgcgggatagcaagagcagcgacaagagcgtgtgtctgttcaccgacttcgacagccagaccaacgtgtcccagagcaaggactccgacgtgtacatcaccgataagaccgtgctggacatgcggagcatggacttcaagagcaactccgccgtggcctggtccaacaagtccgatttcgcctgcgccaacgccttcaacaacagcattatccccgaggacacattcttcccaagccccgagagcagctgcgacgtgaagctggtggaaaagagcttcgagacagacaccaacctgaacttccagaacctgagcgtgatcggcttcagaatcctgctgctgaaagtggccggctttaacctgctgatgaccctgcggctgtggtccagccgcgccaagagaagcggatctggcgtgaagcagaccctgaatttcgacctgctgaagctggctggcgacgtggaatccaacccaggcccttctagaggccatatgaccgagtacaagcccacggtgcgcctcgccacccgcgacgacgtccccagggccgtacgcaccctcgccgccgcgttcgccgactaccccgccacgcgccacaccgtcgatccggaccgccacatcgagcgggtcaccgagctgcaagaactcttcctcacgcgcgtcgggctcgacatcggcaaggtgtgggtcgcggacgacggcgccgcggtggcggtctggaccacgccggagagcgtcgaagcgggggcggtgttcgccgagatcggcccgcgcatggccgagttgagcggttcccggctggccgcgcagcaacagatggaaggcctcctggcgccgcaccggcccaaggagcccgcgtggttcctggccaccgtcggcgtctcgcccgaccaccagggcaagggtctgggcagcgccgtcgtgctccccggagtggaggcggccgagcgcgccggggtgcccgccttcctggagacctccgcgccccgcaacctccccttctacgagcggctcggcttcaccgtcaccgccgacgtcgaggtgcccgaaggaccgcgcacctggtgcatgacccgcaagcccggtgcctga

SEQ ID NO: 8760 - DNA, 2016 bp, Artificial Sequence
  Synthetic Polynucloetide
atggccttaccagtgaccgccttgctcctgccgctggccttgctgctccacgccgccaggccggacatccagctgacacagagcccttctagcctgtctgccagcgtgggcgacagagtgaccatcacctgtaaagccagccaggacgtgggcacaagcgtggcatggtatcagcagaagcctggcaaggcccctaagctgctgatctactggaccagcaccagacacacaggcgtgcccagcagattttctggcagcggctctggcaccgacttcaccttcacaatatccagcctccagcctgaggacattgccacctactactgccagcagtacagcctgtaccgctctttcggccagggcaccaaggtggaaatcaaaggcggaggcggaagtggaggcggaggatctggcggcggaggctctgaagtgcagctggttgaatcaggtggcggcgttgtgcagcctggcagaagtctgagactgagctgtagcgccagcggcttcgatttcaccacctactggatgagctgggtccgacaggcccctggcaaaggactggaatggatcggcgagattcaccccgacagcagcaccatcaattacgcccctagcctgaaggacagattcaccatcagccgggacaacgccaagaacaccctgttcctccagatggactccctgaggccagaggataccggcgtgtacttttgcgccagcctgtatttcggcttcccttggtttgcctactggggccagggaacccctgtgacagttagctctctcgaggacctgaagaacgtgttcccacctgaggtggccgtgttcgagcctagcgaggccgagatcagccacacccagaaagccaccctcgtgtgcctggctaccggcttctaccccgaccatgtggaactgtcttggtgggtcaacggcaaagaggtgcacagcggcgtgtctaccgacccccagccactgaaagaacagcccgccctgaacgacagccggtactgcctgagcagcagactgagagtgtccgccaccttctggcagaacccccggaaccacttcagatgccaggtgcagttctacggcctgagcgagaacgacgagtggacccaggacagagccaagcccgtgacccagatcgtgtctgccgaagcctggggcagagccgattgcggctttaccagcgagagctaccagcagggcgtgctgagcgccaccatcctgtacgagatcctgctgggcaaggccaccctgtacgccgtgctggtgtctgccctggtgctgatggctatggtcaagcggaaggacagccggggaagggccaagcgatctggatctggagcaacaaacttctcactactcaaacaagcaggtgacgtggaggagaatcccgggcctactagaggccatatgaccgagtacaagcccacggtgcgcctcgccacccgcgacgacgtccccagggccgtacgcaccctcgccgccgcgttcgccgactaccccgccacgcgccacaccgtcgatccggaccgccacatcgagcgggtcaccgagctgcaagaactcttcctcacgcgcgtcgggctcgacatcggcaaggtgtgggtcgcggacgacggcgccgcggtggcggtctggaccacgccggagagcgtcgaagcgggggcggtgttcgccgagatcggcccgcgcatggccgagttgagcggttcccggctggccgcgcagcaacagatggaaggcctcctggcgccgcaccggcccaaggagcccgcgtggttcctggccaccgtcggcgtctcgcccgaccaccagggcaagggtctgggcagcgccgtcgtgctccccggagtggaggcggccgagcgcgccggggtgcccgccttcctggagacctccgcgccccgcaacctccccttctacgagcggctcggcttcaccgtcaccgccgacgtcgaggtgcccgaaggaccgcgcacctggtgcatgacccgcaagcccggtgcctga

SEQ ID NO: 8761 - DNA, 2166 bp, Artificial Sequence
  Synthetic Polynucloetide
atggccttaccagtgaccgccttgctcctgccgctggccttgctgctccacgccgccaggccggacatccagctgacacagagcccttctagcctgtctgccagcgtgggcgacagagtgaccatcacctgtaaagccagccaggacgtgggcacaagcgtggcatggtatcagcagaagcctggcaaggcccctaagctgctgatctactggaccagcaccagacacacaggcgtgcccagcagattttctggcagcggctctggcaccgacttcaccttcacaatatccagcctccagcctgaggacattgccacctactactgccagcagtacagcctgtaccgctctttcggccagggcaccaaggtggaaatcaaaggcggaggcggaagtggaggcggaggatctggcggcggaggctctgaagtgcagctggttgaatcaggtggcggcgttgtgcagcctggcagaagtctgagactgagctgtagcgccagcggcttcgatttcaccacctactggatgagctgggtccgacaggcccctggcaaaggactggaatggatcggcgagattcaccccgacagcagcaccatcaattacgcccctagcctgaaggacagattcaccatcagccgggacaacgccaagaacaccctgttcctccagatggactccctgaggccagaggataccggcgtgtacttttgcgccagcctgtatttcggcttcccttggtttgcctactggggccagggaacccctgtgacagttagctctacgcgtgagcagaaactgatctcggaagaggatctggggagcggcaccccattcccttctctggcccctcccatcatgctgctggtggacggcaagcagcagatggtggtcgtgtgcctggtgctggatgtggccccacctggactggacagccccatctggtttagcgccggcaatggctctgccctggacgcctttacctacggcccaagccctgccaccgatggcacctggacaaatctggcccacctgagcctgcccagcgaggaactggcttcttgggagcctctcgtgtgccacacaggacctggcgctgagggacacagcagatccacccagcctatgcacctgtctggcgaggccagcaccgccagaacctgtcctcaggaacctctgagaggcacccctggcggagcactgtggctgggagtgctgagactgctgctgttcaagctgctgctgtttgacctgctgctgacctgctcctgtctgtgcgatcctgccggccctctgccttctcctgccaccaccacaagactgagagccctgggcagccacagactgcaccctgccacagagacaggcggcagagaggccacaagcagccctagaccccagcccagagacagaagatggggcgataccccccctggcagaaagcctggatctccagtccgcgccaagagaagcggatctggcgtgaagcagaccctgaatttcgacctgctgaagctggctggcgacgtggaatccaacccaggcccttctagatctagaggccatatgaccgagtacaagcccacggtgcgcctcgccacccgcgacgacgtccccagggccgtacgcaccctcgccgccgcgttcgccgactaccccgccacgcgccacaccgtcgatccggaccgccacatcgagcgggtcaccgagctgcaagaactcttcctcacgcgcgtcgggctcgacatcggcaaggtgtgggtcgcggacgacggcgccgcggtggcggtctggaccacgccggagagcgtcgaagcgggggcggtgttcgccgagatcggcccgcgcatggccgagttgagcggttcccggctggccgcgcagcaacagatggaaggcctcctggcgccgcaccggcccaaggagcccgcgtggttcctggccaccgtcggcgtctcgcccgaccaccagggcaagggtctgggcagcgccgtcgtgctccccggagtggaggcggccgagcgcgccggggtgcccgccttcctggagacctccgcgccccgcaacctccccttctacgagcggctcggcttcaccgtcaccgccgacgtcgaggtgcccgaaggaccgcgcacctggtgcatgacccgcaagcccggtgcctga

SEQ ID NO: 8762 - DNA, 1614 bp, Artificial Sequence
  Synthetic Polynucloetide
atggccttaccagtgaccgccttgctcctgccgctggccttgctgctccacgccgccaggccggacatccagctgacacagagcccttctagcctgtctgccagcgtgggcgacagagtgaccatcacctgtaaagccagccaggacgtgggcacaagcgtggcatggtatcagcagaagcctggcaaggcccctaagctgctgatctactggaccagcaccagacacacaggcgtgcccagcagattttctggcagcggctctggcaccgacttcaccttcacaatatccagcctccagcctgaggacattgccacctactactgccagcagtacagcctgtaccgctctttcggccagggcaccaaggtggaaatcaaactcgaggacctgaagaacgtgttcccacctgaggtggccgtgttcgagcctagcgaggccgagatcagccacacccagaaagccaccctcgtgtgcctggctaccggcttctaccccgaccatgtggaactgtcttggtgggtcaacggcaaagaggtgcacagcggcgtgtctaccgacccccagccactgaaagaacagcccgccctgaacgacagccggtactgcctgagcagcagactgagagtgtccgccaccttctggcagaacccccggaaccacttcagatgccaggtgcagttctacggcctgagcgagaacgacgagtggacccaggacagagccaagcccgtgacccagatcgtgtctgccgaagcctggggcagagccgattgcggctttaccagcgagagctaccagcagggcgtgctgagcgccaccatcctgtacgagatcctgctgggcaaggccaccctgtacgccgtgctggtgtctgccctggtgctgatggctatggtcaagcggaaggacagccggggaagggccaagcgatctggatctggagcaacaaacttctcactactcaaacaagcaggtgacgtggaggagaatcccgggcctactagaggccatatgaccgagtacaagcccacggtgcgcctcgccacccgcgacgacgtccccagggccgtacgcaccctcgccgccgcgttcgccgactaccccgccacgcgccacaccgtcgatccggaccgccacatcgagcgggtcaccgagctgcaagaactcttcctcacgcgcgtcgggctcgacatcggcaaggtgtgggtcgcggacgacggcgccgcggtggcggtctggaccacgccggagagcgtcgaagcgggggcggtgttcgccgagatcggcccgcgcatggccgagttgagcggttcccggctggccgcgcagcaacagatggaaggcctcctggcgccgcaccggcccaaggagcccgcgtggttcctggccaccgtcggcgtctcgcccgaccaccagggcaagggtctgggcagcgccgtcgtgctccccggagtggaggcggccgagcgcgccggggtgcccgccttcctggagacctccgcgccccgcaacctccccttctacgagcggctcggcttcaccgtcaccgccgacgtcgaggtgcccgaaggaccgcgcacctggtgcatgacccgcaagcccggtgcctga

SEQ ID NO: 8763 - DNA, 921 bp, Artificial Sequence
  Synthetic Polynucloetide
atggccttaccagtgaccgccttgctcctgccgctggccttgctgctccacgccgccaggccggacatccagctgacacagagcccttctagcctgtctgccagcgtgggcgacagagtgaccatcacctgtaaagccagccaggacgtgggcacaagcgtggcatggtatcagcagaagcctggcaaggcccctaagctgctgatctactggaccagcaccagacacacaggcgtgcccagcagattttctggcagcggctctggcaccgacttcaccttcacaatatccagcctccagcctgaggacattgccacctactactgccagcagtacagcctgtaccgctctttcggccagggcaccaaggtggaaatcaaactcgaggacctgaagaacgtgttcccacctgaggtggccgtgttcgagcctagcgaggccgagatcagccacacccagaaagccaccctcgtgtgcctggctaccggcttctaccccgaccatgtggaactgtcttggtgggtcaacggcaaagaggtgcacagcggcgtgtctaccgacccccagccactgaaagaacagcccgccctgaacgacagccggtactgcctgagcagcagactgagagtgtccgccaccttctggcagaacccccggaaccacttcagatgccaggtgcagttctacggcctgagcgagaacgacgagtggacccaggacagagccaagcccgtgacccagatcgtgtctgccgaagcctggggcagagccgattgcggctttaccagcgagagctaccagcagggcgtgctgagcgccaccatcctgtacgagatcctgctgggcaaggccaccctgtacgccgtgctggtgtctgccctggtgctgatggctatggtcaagcggaaggacagccgggga

SEQ ID NO: 8764 - DNA, 1347 bp, Artificial Sequence
  Synthetic Polynucloetide
atggactggatttggcgcatccttttccttgtcggcgctgctaccggcgcgcattccttcgaagaagtgcagctggttgaatcaggtggcggcgttgtgcagcctggcagaagtctgagactgagctgtagcgccagcggcttcgatttcaccacctactggatgagctgggtccgacaggcccctggcaaaggactggaatggatcggcgagattcaccccgacagcagcaccatcaattacgcccctagcctgaaggacagattcaccatcagccgggacaacgccaagaacaccctgttcctccagatggactccctgaggccagaggataccggcgtgtacttttgcgccagcctgtatttcggcttcccttggtttgcctactggggccagggaacccctgtgacagttagctctacgcgtatccagaaccctgatcctgccgtgtaccagctgcgggatagcaagagcagcgacaagagcgtgtgtctgttcaccgacttcgacagccagaccaacgtgtcccagagcaaggactccgacgtgtacatcaccgataagaccgtgctggacatgcggagcatggacttcaagagcaactccgccgtggcctggtccaacaagtccgatttcgcctgcgccaacgccttcaacaacagcattatccccgaggacacattcttcccaagccccgagagcagctgcgacgtgaagctggtggaaaagagcttcgagacagacaccaacctgaacttccagaacctgagcgtgatcggcttcagaatcctgctgctgaaagtggccggctttaacctgctgatgaccctgcggctgtggtccagccgcgccaagagaagcggatctggcgtgaagcagaccctgaatttcgacctgctgaagctggctggcgacgtggaatccaacccaggcccttctagaggccatatggccaagcctttgtctcaagaagaatccaccctcattgaaagagcaacggctacaatcaacagcatccccatctctgaagactacagcgtcgccagcgcagctctctctagcgacggccgcatcttcactggtgtcaatgtatatcattttactgggggaccttgtgcagaactcgtggtgctgggcactgctgctgctgcggcagctggcaacctgacttgtatcgtcgcgatcggaaatgagaacaggggcatcttgagcccctgcggacggtgccgacaggtgcttctcgatctgcatcctgggatcaaagccatagtgaaggacagtgatggacagccgacggcagttgggattcgtgaattgctgccctctggttatgtgtgggagggctga

SEQ ID NO: 8765 - DNA, 846 bp, Artificial Sequence
  Synthetic Polynucloetide
atggactggatttggcgcatccttttccttgtcggcgctgctaccggcgcgcattccttcgaagaagtgcagctggttgaatcaggtggcggcgttgtgcagcctggcagaagtctgagactgagctgtagcgccagcggcttcgatttcaccacctactggatgagctgggtccgacaggcccctggcaaaggactggaatggatcggcgagattcaccccgacagcagcaccatcaattacgcccctagcctgaaggacagattcaccatcagccgggacaacgccaagaacaccctgttcctccagatggactccctgaggccagaggataccggcgtgtacttttgcgccagcctgtatttcggcttcccttggtttgcctactggggccagggaacccctgtgacagttagctctacgcgtatccagaaccctgatcctgccgtgtaccagctgcgggatagcaagagcagcgacaagagcgtgtgtctgttcaccgacttcgacagccagaccaacgtgtcccagagcaaggactccgacgtgtacatcaccgataagaccgtgctggacatgcggagcatggacttcaagagcaactccgccgtggcctggtccaacaagtccgatttcgcctgcgccaacgccttcaacaacagcattatccccgaggacacattcttcccaagccccgagagcagctgcgacgtgaagctggtggaaaagagcttcgagacagacaccaacctgaacttccagaacctgagcgtgatcggcttcagaatcctgctgctgaaagtggccggctttaacctgctgatgaccctgcggctgtggtccagc

SEQ ID NO: 8766 - DNA, 1668 bp, Artificial Sequence
  Synthetic Polynucloetide
atggccttaccagtgaccgccttgctcctgccgctggccttgctgctccacgccgccaggccggacatccagctgacacagagcccttctagcctgtctgccagcgtgggcgacagagtgaccatcacctgtaaagccagccaggacgtgggcacaagcgtggcatggtatcagcagaagcctggcaaggcccctaagctgctgatctactggaccagcaccagacacacaggcgtgcccagcagattttctggcagcggctctggcaccgacttcaccttcacaatatccagcctccagcctgaggacattgccacctactactgccagcagtacagcctgtaccgctctttcggccagggcaccaaggtggaaatcaaactcgaggggaaaccaattcccaaccctcttctgggactggattcaaccggcagcggcgaggacctgaagaacgtgttcccacctgaggtggccgtgttcgagcctagcgaggccgagatcagccacacccagaaagccaccctcgtgtgcctggctaccggcttctaccccgaccatgtggaactgtcttggtgggtcaacggcaaagaggtgcacagcggcgtgtgtaccgacccccagccactgaaagaacagcccgccctgaacgacagccggtactgcctgagcagcagactgagagtgtccgccaccttctggcagaacccccggaaccacttcagatgccaggtgcagttctacggcctgagcgagaacgacgagtggacccaggacagagccaagcccgtgacccagatcgtgtctgccgaagcctggggcagagccgattgcggctttaccagcgagagctaccagcagggcgtgctgagcgccaccatcctgtacgagatcctgctgggcaaggccaccctgtacgccgtgctggtgtctgccctggtgctgatggctatggtcaagcggaaggacagccggggaagggccaagcgatctggatctggagcaacaaacttctcactactcaaacaagcaggtgacgtggaggagaatcccgggcctactagaggccatatgaccgagtacaagcccacggtgcgcctcgccacccgcgacgacgtccccagggccgtacgcaccctcgccgccgcgttcgccgactaccccgccacgcgccacaccgtcgatccggaccgccacatcgagcgggtcaccgagctgcaagaactcttcctcacgcgcgtcgggctcgacatcggcaaggtgtgggtcgcggacgacggcgccgcggtggcggtctggaccacgccggagagcgtcgaagcgggggcggtgttcgccgagatcggcccgcgcatggccgagttgagcggttcccggctggccgcgcagcaacagatggaaggcctcctggcgccgcaccggcccaaggagcccgcgtggttcctggccaccgtcggcgtctcgcccgaccaccagggcaagggtctgggcagcgccgtcgtgctccccggagtggaggcggccgagcgcgccggggtgcccgccttcctggagacctccgcgccccgcaacctccccttctacgagcggctcggcttcaccgtcaccgccgacgtcgaggtgcccgaaggaccgcgcacctggtgcatgacccgcaagcccggtgcctga

SEQ ID NO: 8767 - DNA, 978 bp, Artificial Sequence
  Synthetic Polynucloetide
atggccttaccagtgaccgccttgctcctgccgctggccttgctgctccacgccgccaggccggacatccagctgacacagagcccttctagcctgtctgccagcgtgggcgacagagtgaccatcacctgtaaagccagccaggacgtgggcacaagcgtggcatggtatcagcagaagcctggcaaggcccctaagctgctgatctactggaccagcaccagacacacaggcgtgcccagcagattttctggcagcggctctggcaccgacttcaccttcacaatatccagcctccagcctgaggacattgccacctactactgccagcagtacagcctgtaccgctctttcggccagggcaccaaggtggaaatcaaactcgaggggaaaccaattcccaaccctcttctgggactggattcaaccggcagcggcgaggacctgaagaacgtgttcccacctgaggtggccgtgttcgagcctagcgaggccgagatcagccacacccagaaagccaccctcgtgtgcctggctaccggcttctaccccgaccatgtggaactgtcttggtgggtcaacggcaaagaggtgcacagcggcgtgtgtaccgacccccagccactgaaagaacagcccgccctgaacgacagccggtactgcctgagcagcagactgagagtgtccgccaccttctggcagaacccccggaaccacttcagatgccaggtgcagttctacggcctgagcgagaacgacgagtggacccaggacagagccaagcccgtgacccagatcgtgtctgccgaagcctggggcagagccgattgcggctttaccagcgagagctaccagcagggcgtgctgagcgccaccatcctgtacgagatcctgctgggcaaggccaccctgtacgccgtgctggtgtctgccctggtgctgatggctatggtcaagcggaaggacagccggggatga

SEQ ID NO: 8768 - DNA, 1383 bp, Artificial Sequence
  Synthetic Polynucloetide
atggactggatttggcgcatccttttccttgtcggcgctgctaccggcgcgcattccttcgaagaagtgcagctggttgaatcaggtggcggcgttgtgcagcctggcagaagtctgagactgagctgtagcgccagcggcttcgatttcaccacctactggatgagctgggtccgacaggcccctggcaaaggactggaatggatcggcgagattcaccccgacagcagcaccatcaattacgcccctagcctgaaggacagattcaccatcagccgggacaacgccaagaacaccctgttcctccagatggactccctgaggccagaggataccggcgtgtacttttgcgccagcctgtatttcggcttcccttggtttgcctactggggccagggaacccctgtgacagttagctctacgcgtgagcagaaactgatctcggaagaggatgggagcggcatccagaaccctgatcctgccgtgtaccagctgcgggatagcaagagcagcgacaagagcgtgtgtctgttcaccgacttcgacagccagaccaacgtgtcccagagcaaggactccgacgtgtacatcaccgataagtgcgtgctggacatgcggagcatggacttcaagagcaactccgccgtggcctggtccaacaagtccgatttcgcctgcgccaacgccttcaacaacagcattatccccgaggacacattcttcccaagccccgagagcagctgcgacgtgaagctggtggaaaagagcttcgagacagacaccaacctgaacttccagaacctgagcgtgatcggcttcagaatcctgctgctgaaagtggccggctttaacctgctgatgaccctgcggctgtggtccagccgcgccaagagaagcggatctggcgtgaagcagaccctgaatttcgacctgctgaagctggctggcgacgtggaatccaacccaggcccttctagaggccatatggccaagcctttgtctcaagaagaatccaccctcattgaaagagcaacggctacaatcaacagcatccccatctctgaagactacagcgtcgccagcgcagctctctctagcgacggccgcatcttcactggtgtcaatgtatatcattttactgggggaccttgtgcagaactcgtggtgctgggcactgctgctgctgcggcagctggcaacctgacttgtatcgtcgcgatcggaaatgagaacaggggcatcttgagcccctgcggacggtgccgacaggtgcttctcgatctgcatcctgggatcaaagccatagtgaaggacagtgatggacagccgacggcagttgggattcgtgaattgctgccctctggttatgtgtgggagggctga

SEQ ID NO: 8769 - DNA, 885 bp, Artificial Sequence
  Synthetic Polynucloetide
atggactggatttggcgcatccttttccttgtcggcgctgctaccggcgcgcattccttcgaagaagtgcagctggttgaatcaggtggcggcgttgtgcagcctggcagaagtctgagactgagctgtagcgccagcggcttcgatttcaccacctactggatgagctgggtccgacaggcccctggcaaaggactggaatggatcggcgagattcaccccgacagcagcaccatcaattacgcccctagcctgaaggacagattcaccatcagccgggacaacgccaagaacaccctgttcctccagatggactccctgaggccagaggataccggcgtgtacttttgcgccagcctgtatttcggcttcccttggtttgcctactggggccagggaacccctgtgacagttagctctacgcgtgagcagaaactgatctcggaagaggatgggagcggcatccagaaccctgatcctgccgtgtaccagctgcgggatagcaagagcagcgacaagagcgtgtgtctgttcaccgacttcgacagccagaccaacgtgtcccagagcaaggactccgacgtgtacatcaccgataagtgcgtgctggacatgcggagcatggacttcaagagcaactccgccgtggcctggtccaacaagtccgatttcgcctgcgccaacgccttcaacaacagcattatccccgaggacacattcttcccaagccccgagagcagctgcgacgtgaagctggtggaaaagagcttcgagacagacaccaacctgaacttccagaacctgagcgtgatcggcttcagaatcctgctgctgaaagtggccggctttaacctgctgatgaccctgcggctgtggtccagctga

SEQ ID NO: 8770 - DNA, 1920 bp, Artificial Sequence
  Synthetic Polynucloetide
atggccttaccagtgaccgccttgctcctgccgctggccttgctgctccacgccgccaggccggacatccagctgacacagagcccttctagcctgtctgccagcgtgggcgacagagtgaccatcacctgtaaagccagccaggacgtgggcacaagcgtggcatggtatcagcagaagcctggcaaggcccctaagctgctgatctactggaccagcaccagacacacaggcgtgcccagcagattttctggcagcggctctggcaccgacttcaccttcacaatatccagcctccagcctgaggacattgccacctactactgccagcagtacagcctgtaccgctctttcggccagggcaccaaggtggaaatcaaaggcggaggcggaagtggaggcggaggatctggcggcggaggctctgaagtgcagctggttgaatcaggtggcggcgttgtgcagcctggcagaagtctgagactgagctgtagcgccagcggcttcgatttcaccacctactggatgagctgggtccgacaggcccctggcaaaggactggaatggatcggcgagattcaccccgacagcagcaccatcaattacgcccctagcctgaaggacagattcaccatcagccgggacaacgccaagaacaccctgttcctccagatggactccctgaggccagaggataccggcgtgtacttttgcgccagcctgtatttcggcttcccttggtttgcctactggggccagggaacccctgtgacagttagctctacgcgtgggagcggcatccagaaccctgatcctgccgtgtaccagctgcgggatagcaagagcagcgacaagagcgtgtgtctgttcaccgacttcgacagccagaccaacgtgtcccagagcaaggactccgacgtgtacatcaccgataagaccgtgctggacatgcggagcatggacttcaagagcaactccgccgtggcctggtccaacaagtccgatttcgcctgcgccaacgccttcaacaacagcattatccccgaggacacattcttcccaagcagcgacgtgccctgcgacgtgaagctggtggaaaagagcttcgagacagacaccaacctgaacttccagaacctgagcgtgatcggcttcagaatcctgctgctgaaagtggccggctttaacctgctgatgaccctgcggctgtggtccagccgcgccaagagaagcggatctggcgtgaagcagaccctgaatttcgacctgctgaagctggctggcgacgtggaatccaacccaggcccttctagaggccatatgaccgagtacaagcccacggtgcgcctcgccacccgcgacgacgtccccagggccgtacgcaccctcgccgccgcgttcgccgactaccccgccacgcgccacaccgtcgatccggaccgccacatcgagcgggtcaccgagctgcaagaactcttcctcacgcgcgtcgggctcgacatcggcaaggtgtgggtcgcggacgacggcgccgcggtggcggtctggaccacgccggagagcgtcgaagcgggggcggtgttcgccgagatcggcccgcgcatggccgagttgagcggttcccggctggccgcgcagcaacagatggaaggcctcctggcgccgcaccggcccaaggagcccgcgtggttcctggccaccgtcggcgtctcgcccgaccaccagggcaagggtctgggcagcgccgtcgtgctccccggagtggaggcggccgagcgcgccggggtgcccgccttcctggagacctccgcgccccgcaacctccccttctacgagcggctcggcttcaccgtcaccgccgacgtcgaggtgcccgaaggaccgcgcacctggtgcatgacccgcaagcccggtgcctga

SEQ ID NO: 8771 - DNA, 2016 bp, Artificial Sequence
  Synthetic Polynucloetide
atggccttaccagtgaccgccttgctcctgccgctggccttgctgctccacgccgccaggccggacatccagctgacacagagcccttctagcctgtctgccagcgtgggcgacagagtgaccatcacctgtaaagccagccaggacgtgggcacaagcgtggcatggtatcagcagaagcctggcaaggcccctaagctgctgatctactggaccagcaccagacacacaggcgtgcccagcagattttctggcagcggctctggcaccgacttcaccttcacaatatccagcctccagcctgaggacattgccacctactactgccagcagtacagcctgtaccgctctttcggccagggcaccaaggtggaaatcaaaggcggaggcggaagtggaggcggaggatctggcggcggaggctctgaagtgcagctggttgaatcaggtggcggcgttgtgcagcctggcagaagtctgagactgagctgtagcgccagcggcttcgatttcaccacctactggatgagctgggtccgacaggcccctggcaaaggactggaatggatcggcgagattcaccccgacagcagcaccatcaattacgcccctagcctgaaggacagattcaccatcagccgggacaacgccaagaacaccctgttcctccagatggactccctgaggccagaggataccggcgtgtacttttgcgccagcctgtatttcggcttcccttggtttgcctactggggccagggaacccctgtgacagttagctctctcgaggacctgaagaacgtgttcccacctgaggtggccgtgttcgagcctagcaaggccgagatcgcccacacccagaaagccaccctcgtgtgcctggctaccggcttctaccccgaccatgtggaactgtcttggtgggtcaacggcaaagaggtgcacagcggcgtgtctaccgacccccagccactgaaagaacagcccgccctgaacgacagccggtactgcctgagcagcagactgagagtgtccgccaccttctggcagaacccccggaaccacttcagatgccaggtgcagttctacggcctgagcgagaacgacgagtggacccaggacagagccaagcccgtgacccagatcgtgtctgccgaagcctggggcagagccgattgcggcatcaccagcgccagctaccaccagggcgtgctgagcgccaccatcctgtacgagatcctgctgggcaaggccaccctgtacgccgtgctggtgtctgccctggtgctgatggctatggtcaagcggaaggacagccggggaagggccaagcgatctggatctggagcaacaaacttctcactactcaaacaagcaggtgacgtggaggagaatcccgggcctactagaggccatatgaccgagtacaagcccacggtgcgcctcgccacccgcgacgacgtccccagggccgtacgcaccctcgccgccgcgttcgccgactaccccgccacgcgccacaccgtcgatccggaccgccacatcgagcgggtcaccgagctgcaagaactcttcctcacgcgcgtcgggctcgacatcggcaaggtgtgggtcgcggacgacggcgccgcggtggcggtctggaccacgccggagagcgtcgaagcgggggcggtgttcgccgagatcggcccgcgcatggccgagttgagcggttcccggctggccgcgcagcaacagatggaaggcctcctggcgccgcaccggcccaaggagcccgcgtggttcctggccaccgtcggcgtctcgcccgaccaccagggcaagggtctgggcagcgccgtcgtgctccccggagtggaggcggccgagcgcgccggggtgcccgccttcctggagacctccgcgccccgcaacctccccttctacgagcggctcggcttcaccgtcaccgccgacgtcgaggtgcccgaaggaccgcgcacctggtgcatgacccgcaagcccggtgcctga

SEQ ID NO: 8772 - DNA, 2085 bp, Artificial Sequence
  Synthetic Polynucloetide
atggccttaccagtgaccgccttgctcctgccgctggccttgctgctccacgccgccaggccggacatccagctgacacagagcccttctagcctgtctgccagcgtgggcgacagagtgaccatcacctgtaaagccagccaggacgtgggcacaagcgtggcatggtatcagcagaagcctggcaaggcccctaagctgctgatctactggaccagcaccagacacacaggcgtgcccagcagattttctggcagcggctctggcaccgacttcaccttcacaatatccagcctccagcctgaggacattgccacctactactgccagcagtacagcctgtaccgctctttcggccagggcaccaaggtggaaatcaaaggcggaggcggaagtggaggcggaggatctggcggcggaggctctgaagtgcagctggttgaatcaggtggcggcgttgtgcagcctggcagaagtctgagactgagctgtagcgccagcggcttcgatttcaccacctactggatgagctgggtccgacaggcccctggcaaaggactggaatggatcggcgagattcaccccgacagcagcaccatcaattacgcccctagcctgaaggacagattcaccatcagccgggacaacgccaagaacaccctgttcctccagatggactccctgaggccagaggataccggcgtgtacttttgcgccagcctgtatttcggcttcccttggtttgcctactggggccagggaacccctgtgacagttagctctacgcgtgggtctggaggcggaggcagcggcggaggcgggagcggcgacggtaacgaggagatgggaggaatcactcaaaccccttacaaagtctcaatttcaggaacaactgttatccttacatgtccccagtatcctggcagcgagatcctttggcagcataacgacaagaatatagggggagatgaagacgataagaatatcggatctgacgaggatcacttgagcctgaaagagttctccgagcttgaacaaagcggatattatgtgtgctatccgcgcgggtcaaagccggaagacgctaacttttacctttatctccgagccagagtgtgcgaaaattgcatggaaatggacgttatgtccgttgctacaatagttatcgtagatatatgcatcacgggtggactgcttctgctggtttattattggtccaagaatagaaaggccaaagctaaacccgtgaccagaggcgctggcgcaggcggaaggcaaaggggacaaaacaaagaacggccaccaccagtgccaaatccagattatgagcctattcggaaaggacagagggacctgtactctggcctgaatcagagaagaatccgcgccaagagaagcggatctggcgtgaagcagaccctgaatttcgacctgctgaagctggctggcgacgtggaatccaacccaggcccttctagaggccatatgaccgagtacaagcccacggtgcgcctcgccacccgcgacgacgtccccagggccgtacgcaccctcgccgccgcgttcgccgactaccccgccacgcgccacaccgtcgatccggaccgccacatcgagcgggtcaccgagctgcaagaactcttcctcacgcgcgtcgggctcgacatcggcaaggtgtgggtcgcggacgacggcgccgcggtggcggtctggaccacgccggagagcgtcgaagcgggggcggtgttcgccgagatcggcccgcgcatggccgagttgagcggttcccggctggccgcgcagcaacagatggaaggcctcctggcgccgcaccggcccaaggagcccgcgtggttcctggccaccgtcggcgtctcgcccgaccaccagggcaagggtctgggcagcgccgtcgtgctccccggagtggaggcggccgagcgcgccggggtgcccgccttcctggagacctccgcgccccgcaacctccccttctacgagcggctcggcttcaccgtcaccgccgacgtcgaggtgcccgaaggaccgcgcacctggtgcatgacccgcaagcccggtgcctga

SEQ ID NO: 8773 - DNA, 1980 bp, Artificial Sequence
  Synthetic Polynucloetide
atggccttaccagtgaccgccttgctcctgccgctggccttgctgctccacgccgccaggccggacatccagctgacacagagcccttctagcctgtctgccagcgtgggcgacagagtgaccatcacctgtaaagccagccaggacgtgggcacaagcgtggcatggtatcagcagaagcctggcaaggcccctaagctgctgatctactggaccagcaccagacacacaggcgtgcccagcagattttctggcagcggctctggcaccgacttcaccttcacaatatccagcctccagcctgaggacattgccacctactactgccagcagtacagcctgtaccgctctttcggccagggcaccaaggtggaaatcaaaggcggaggcggaagtggaggcggaggatctggcggcggaggctctgaagtgcagctggttgaatcaggtggcggcgttgtgcagcctggcagaagtctgagactgagctgtagcgccagcggcttcgatttcaccacctactggatgagctgggtccgacaggcccctggcaaaggactggaatggatcggcgagattcaccccgacagcagcaccatcaattacgcccctagcctgaaggacagattcaccatcagccgggacaacgccaagaacaccctgttcctccagatggactccctgaggccagaggataccggcgtgtacttttgcgccagcctgtatttcggcttcccttggtttgcctactggggccagggaacccctgtgacagttagctctacgcgtgggtctggaggcggaggcagcggcggaggcgggagcggcttcaagatccccatcgaggaactggaagatcgggtgttcgtgaactgcaacacctctatcacctgggtggaaggcaccgtgggaacactgctgagcgacatcaccagactggacctcggcaagcggattctggaccctcggggcatctacagatgcaacggcaccgacatctacaaggacaaagaaagcaccgtgcaggtccactacagaatgtgccagtcctgcgtggaactggaccctgctacagtggccggcatcatcgtgaccgatgtgatcgctactctgctgctggctctgggagtgttctgcttcgccggacacgaaacaggcagactgtctggcgctgccgatacacaggccctgctgagaaacgaccaagtgtatcagcccctgcgcgacagagatgatgcccagtattctcacctcggcggcaactgggctagaaacaagcgcgccaagagaagcggatctggcgtgaagcagaccctgaatttcgacctgctgaagctggctggcgacgtggaatccaacccaggcccttctagaggccatatgaccgagtacaagcccacggtgcgcctcgccacccgcgacgacgtccccagggccgtacgcaccctcgccgccgcgttcgccgactaccccgccacgcgccacaccgtcgatccggaccgccacatcgagcgggtcaccgagctgcaagaactcttcctcacgcgcgtcgggctcgacatcggcaaggtgtgggtcgcggacgacggcgccgcggtggcggtctggaccacgccggagagcgtcgaagcgggggcggtgttcgccgagatcggcccgcgcatggccgagttgagcggttcccggctggccgcgcagcaacagatggaaggcctcctggcgccgcaccggcccaaggagcccgcgtggttcctggccaccgtcggcgtctcgcccgaccaccagggcaagggtctgggcagcgccgtcgtgctccccggagtggaggcggccgagcgcgccggggtgcccgccttcctggagacctccgcgccccgcaacctccccttctacgagcggctcggcttcaccgtcaccgccgacgtcgaggtgcccgaaggaccgcgcacctggtgcatgacccgcaagcccggtgcctga

SEQ ID NO: 8774 - DNA, 2010 bp, Artificial Sequence
  Synthetic Polynucloetide
atggccttaccagtgaccgccttgctcctgccgctggccttgctgctccacgccgccaggccggacatccagctgacacagagcccttctagcctgtctgccagcgtgggcgacagagtgaccatcacctgtaaagccagccaggacgtgggcacaagcgtggcatggtatcagcagaagcctggcaaggcccctaagctgctgatctactggaccagcaccagacacacaggcgtgcccagcagattttctggcagcggctctggcaccgacttcaccttcacaatatccagcctccagcctgaggacattgccacctactactgccagcagtacagcctgtaccgctctttcggccagggcaccaaggtggaaatcaaaggcggaggcggaagtggaggcggaggatctggcggcggaggctctgaagtgcagctggttgaatcaggtggcggcgttgtgcagcctggcagaagtctgagactgagctgtagcgccagcggcttcgatttcaccacctactggatgagctgggtccgacaggcccctggcaaaggactggaatggatcggcgagattcaccccgacagcagcaccatcaattacgcccctagcctgaaggacagattcaccatcagccgggacaacgccaagaacaccctgttcctccagatggactccctgaggccagaggataccggcgtgtacttttgcgccagcctgtatttcggcttcccttggtttgcctactggggccagggaacccctgtgacagttagctctacgcgtgggtctggaggcggaggcagcggcggaggcgggagcggccagagcatcaagggcaaccacctggtcaaggtgtacgactaccaagaggacggcagcgtgctgctgacatgtgatgccgaggccaagaacatcacctggtttaaggacggcaagatgatcggcttcctgaccgaggacaagaagaagtggaacctgggcagcaacgctaaggaccccagaggcatgtatcagtgcaagggcagccagaacaagagcaagcccctccaggtgtactaccggatgtgccagaactgcatcgagctgaacgccgctaccatcagcggctttctgttcgccgagatcgtgtccatcttcgtgctggccgtgggcgtgtactttatcgctggacaggatggcgtgcggcagagcagagcttccgataagcaaaccctgctgcctaacgaccagctgtaccagcctctgaaggacagagaggacgaccagtacagccacctccagggcaatcagctgagaagaaaccgcgccaagagaagcggatctggcgtgaagcagaccctgaatttcgacctgctgaagctggctggcgacgtggaatccaacccaggcccttctagaggccatatgaccgagtacaagcccacggtgcgcctcgccacccgcgacgacgtccccagggccgtacgcaccctcgccgccgcgttcgccgactaccccgccacgcgccacaccgtcgatccggaccgccacatcgagcgggtcaccgagctgcaagaactcttcctcacgcgcgtcgggctcgacatcggcaaggtgtgggtcgcggacgacggcgccgcggtggcggtctggaccacgccggagagcgtcgaagcgggggcggtgttcgccgagatcggcccgcgcatggccgagttgagcggttcccggctggccgcgcagcaacagatggaaggcctcctggcgccgcaccggcccaaggagcccgcgtggttcctggccaccgtcggcgtctcgcccgaccaccagggcaagggtctgggcagcgccgtcgtgctccccggagtggaggcggccgagcgcgccggggtgcccgccttcctggagacctccgcgccccgcaacctccccttctacgagcggctcggcttcaccgtcaccgccgacgtcgaggtgcccgaaggaccgcgcacctggtgcatgacccgcaagcccggtgcctga

SEQ ID NO: 8775 - DNA, 1959 bp, Artificial Sequence
  Synthetic Polynucloetide
atggccttaccagtgaccgccttgctcctgccgctggccttgctgctccacgccgccaggccggacatccagctgacacagagcccttctagcctgtctgccagcgtgggcgacagagtgaccatcacctgtaaagccagccaggacgtgggcacaagcgtggcatggtatcagcagaagcctggcaaggcccctaagctgctgatctactggaccagcaccagacacacaggcgtgcccagcagattttctggcagcggctctggcaccgacttcaccttcacaatatccagcctccagcctgaggacattgccacctactactgccagcagtacagcctgtaccgctctttcggccagggcaccaaggtggaaatcaaaggcggaggcggaagtggaggcggaggatctggcggcggaggctctgaagtgcagctggttgaatcaggtggcggcgttgtgcagcctggcagaagtctgagactgagctgtagcgccagcggcttcgatttcaccacctactggatgagctgggtccgacaggcccctggcaaaggactggaatggatcggcgagattcaccccgacagcagcaccatcaattacgcccctagcctgaaggacagattcaccatcagccgggacaacgccaagaacaccctgttcctccagatggactccctgaggccagaggataccggcgtgtacttttgcgccagcctgtatttcggcttcccttggtttgcctactggggccagggaacccctgtgacagttagctctacgcgtgggtctggaggcggaggcagcggcggaggcgggagcggccagagttttgggttgttggaccctaaattgtgctatctgttggacggaatcctgttcatttacggagtgatcctgaccgcattgttcctgcgggttaagttttccagatccgcagacgcacccgcttaccaacaagggcagaaccaactctacaatgaacttaatttggggcggagggaagagtacgacgttctggacaaaaggaggggacgagatcccgagatgggcggaaagcctcagcgaaggaagaatccgcaagaggggctttataacgaactccagaaagataaaatggcagaagcctatagtgagattgggatgaagggagaaaggaggaggggtaaaggtcacgatgggttgtaccaaggattgagcacagccactaaagatacctatgatgcgctccacatgcaggccctgccgccaagacgcgccaagagaagcggatctggcgtgaagcagaccctgaatttcgacctgctgaagctggctggcgacgtggaatccaacccaggcccttctagaggccatatgaccgagtacaagcccacggtgcgcctcgccacccgcgacgacgtccccagggccgtacgcaccctcgccgccgcgttcgccgactaccccgccacgcgccacaccgtcgatccggaccgccacatcgagcgggtcaccgagctgcaagaactcttcctcacgcgcgtcgggctcgacatcggcaaggtgtgggtcgcggacgacggcgccgcggtggcggtctggaccacgccggagagcgtcgaagcgggggcggtgttcgccgagatcggcccgcgcatggccgagttgagcggttcccggctggccgcgcagcaacagatggaaggcctcctggcgccgcaccggcccaaggagcccgcgtggttcctggccaccgtcggcgtctcgcccgaccaccagggcaagggtctgggcagcgccgtcgtgctccccggagtggaggcggccgagcgcgccggggtgcccgccttcctggagacctccgcgccccgcaacctccccttctacgagcggctcggcttcaccgtcaccgccgacgtcgaggtgcccgaaggaccgcgcacctggtgcatgacccgcaagcccggtgcctga

SEQ ID NO: 8776 - DNA, 2259 bp, Artificial Sequence
  Synthetic Polynucloetide
atggccttaccagtgaccgccttgctcctgccgctggccttgctgctccacgccgccaggccggaagtgcagctggttgaatctggcggaggactggttcagcctggcggatctctgagactgtcttgtgccgccagcggcttcagcttcagcgacttttggatgagctgggtccgacaggcccctggcaaaggacttgaatgggtcgccacaatcagccaggccggcagcgagaaggactacgtggactctgtgaagggcagattcaccatcagccgggacaacgccaagaagtccctgtacctccagatgaacagcctgagagccgaggacaccgccgtgtactattgtgcctctggcgtgtacagcttcgactacagaggccagggcaccctggtcacagtctcttctggtaccggcggaggcggatctggcggcggaggtagcggtggcggaggatctgaattcgacatccagctgacacagagcccttctagcctgtctgccagcgtgggcgacagagtgaccatcacctgtaaagccagccaggacgtgggcacaagcgtggcatggtatcagcagaagcctggcaaggcccctaagctgctgatctactggaccagcaccagacacacaggcgtgcccagcagattttctggcagcggctctggcaccgacttcaccttcacaatatccagcctccagcctgaggacattgccacctactactgccagcagtacagcctgtaccgctctttcggccagggcaccaaggtggaaatcaaactcgaggacctgaagaacgtgttcccacctgaggtggccgtgttcgagcctagcgaggccgagatcagccacacccagaaagccaccctcgtgtgcctggctaccggcttctaccccgaccatgtggaactgtcttggtgggtcaacggcaaagaggtgcacagcggcgtgtgtaccgacccccagccactgaaagaacagcccgccctgaacgacagccggtactgcctgagcagcagactgagagtgtccgccaccttctggcagaacccccggaaccacttcagatgccaggtgcagttctacggcctgagcgagaacgacgagtggacccaggacagagccaagcccgtgacccagatcgtgtctgccgaagcctggggcagagccgattgcggctttaccagcgagagctaccagcagggcgtgctgagcgccaccatcctgtacgagatcctgctgggcaaggccaccctgtacgccgtgctggtgtctgccctggtgctgatggctatggtcaagcggaaggacagccggggaagggccaagcgatctggatctggagcaacaaacttctcactactcaaacaagcaggtgacgtggaggagaatcccgggcctactagtatggactggatttggcgcatccttttccttgtcggcgctgctaccggcgcgcattccttcgaagaagtgcagctggttgaatcaggtggcggcgttgtgcagcctggcagaagtctgagactgagctgtagcgccagcggcttcgatttcaccacctactggatgagctgggtccgacaggcccctggcaaaggactggaatggatcggcgagattcaccccgacagcagcaccatcaattacgcccctagcctgaaggacagattcaccatcagccgggacaacgccaagaacaccctgttcctccagatggactccctgaggccagaggataccggcgtgtacttttgcgccagcctgtatttcggcttcccttggtttgcctactggggccagggaacccctgtgacagttagctctacgcgtatccagaaccctgatcctgccgtgtaccagctgcgggatagcaagagcagcgacaagagcgtgtgtctgttcaccgacttcgacagccagaccaacgtgtcccagagcaaggactccgacgtgtacatcaccgataagtgcgtgctggacatgcggagcatggacttcaagagcaactccgccgtggcctggtccaacaagtccgatttcgcctgcgccaacgccttcaacaacagcattatccccgaggacacattcttcccaagccccgagagcagctgcgacgtgaagctggtggaaaagagcttcgagacagacaccaacctgaacttccagaacctgagcgtgatcggcttcagaatcctgctgctgaaagtggccggctttaacctgctgatgaccctgcggctgtggtccagc

SEQ ID NO: 8777 - DNA, 2271 bp, Artificial Sequence
  Synthetic Polynucloetide
atggccttaccagtgaccgccttgctcctgccgctggccttgctgctccacgccgccaggccggaagtgcagctggttgaatctggcggaggactggttcagcctggcggatctctgagactgtcttgtgccgccagcggcttcagcttcagcgacttttggatgagctgggtccgacaggcccctggcaaaggacttgaatgggtcgccacaatcagccaggccggcagcgagaaggactacgtggactctgtgaagggcagattcaccatcagccgggacaacgccaagaagtccctgtacctccagatgaacagcctgagagccgaggacaccgccgtgtactattgtgcctctggcgtgtacagcttcgactacagaggccagggcaccctggtcacagtctcttctggtaccggcggaggcggatctggcggcggaggtagcggtggcggaggatctgaattcgacatccagctgacacagagcccttctagcctgtctgccagcgtgggcgacagagtgaccatcacctgtaaagccagccaggacgtgggcacaagcgtggcatggtatcagcagaagcctggcaaggcccctaagctgctgatctactggaccagcaccagacacacaggcgtgcccagcagattttctggcagcggctctggcaccgacttcaccttcacaatatccagcctccagcctgaggacattgccacctactactgccagcagtacagcctgtaccgctctttcggccagggcaccaaggtggaaatcaaactcgagatccagaaccctgatcctgccgtgtaccagctgcgggatagcaagagcagcgacaagagcgtgtgtctgttcaccgacttcgacagccagaccaacgtgtcccagagcaaggactccgacgtgtacatcaccgataagtgcgtgctggacatgcggagcatggacttcaagagcaactccgccgtggcctggtccaacaagtccgatttcgcctgcgccaacgccttcaacaacagcattatccccgaggacacattcttcccaagccccgagagcagctgcgacgtgaagctggtggaaaagagcttcgagacagacaccaacctgaacttccagaacctgagcgtgatcggcttcagaatcctgctgctgaaagtggccggctttaacctgctgatgaccctgcggctgtggtccagccgcgccaagagaagcggatctggcgtgaagcagaccctgaatttcgacctgctgaagctggctggcgacgtggaatccaacccaggccctactagtatggactggatttggcgcatccttttccttgtcggcgctgctaccggcgcgcattccttcgaagaagtgcagctggttgaatcaggtggcggcgttgtgcagcctggcagaagtctgagactgagctgtagcgccagcggcttcgatttcaccacctactggatgagctgggtccgacaggcccctggcaaaggactggaatggatcggcgagattcaccccgacagcagcaccatcaattacgcccctagcctgaaggacagattcaccatcagccgggacaacgccaagaacaccctgttcctccagatggactccctgaggccagaggataccggcgtgtacttttgcgccagcctgtatttcggcttcccttggtttgcctactggggccagggaacccctgtgacagttagctctacgcgtgaggacctgaagaacgtgttcccacctgaggtggccgtgttcgagcctagcgaggccgagatcagccacacccagaaagccaccctcgtgtgcctggctaccggcttctaccccgaccatgtggaactgtcttggtgggtcaacggcaaagaggtgcacagcggcgtgtgtaccgacccccagccactgaaagaacagcccgccctgaacgacagccggtactgcctgagcagcagactgagagtgtccgccaccttctggcagaacccccggaaccacttcagatgccaggtgcagttctacggcctgagcgagaacgacgagtggacccaggacagagccaagcccgtgacccagatcgtgtctgccgaagcctggggcagagccgattgcggctttaccagcgagagctaccagcagggcgtgctgagcgccaccatcctgtacgagatcctgctgggcaaggccaccctgtacgccgtgctggtgtctgccctggtgctgatggctatggtcaagcggaaggacagccgggga

SEQ ID NO: 8778 - DNA, 2847 bp, Artificial Sequence
  Synthetic Polynucloetide
atggccttaccagtgaccgccttgctcctgccgctggccttgctgctccacgccgccaggccggaagtgcagctggttgaatctggcggaggactggttcagcctggcggatctctgagactgtcttgtgccgccagcggcttcagcttcagcgacttttggatgagctgggtccgacaggcccctggcaaaggacttgaatgggtcgccacaatcagccaggccggcagcgagaaggactacgtggactctgtgaagggcagattcaccatcagccgggacaacgccaagaagtccctgtacctccagatgaacagcctgagagccgaggacaccgccgtgtactattgtgcctctggcgtgtacagcttcgactacagaggccagggcaccctggtcacagtctcttctggtaccggcggaggcggatctggcggcggaggtagcggtggcggaggatctgaattcgacatccagctgacacagagcccttctagcctgtctgccagcgtgggcgacagagtgaccatcacctgtaaagccagccaggacgtgggcacaagcgtggcatggtatcagcagaagcctggcaaggcccctaagctgctgatctactggaccagcaccagacacacaggcgtgcccagcagattttctggcagcggctctggcaccgacttcaccttcacaatatccagcctccagcctgaggacattgccacctactactgccagcagtacagcctgtaccgctctttcggccagggcaccaaggtggaaatcaaactcgaggacctgaagaacgtgttcccacctgaggtggccgtgttcgagcctagcgaggccgagatcagccacacccagaaagccaccctcgtgtgcctggctaccggcttctaccccgaccatgtggaactgtcttggtgggtcaacggcaaagaggtgcacagcggcgtgtctaccgacccccagccactgaaagaacagcccgccctgaacgacagccggtactgcctgagcagcagactgagagtgtccgccaccttctggcagaacccccggaaccacttcagatgccaggtgcagttctacggcctgagcgagaacgacgagtggacccaggacagagccaagcccgtgacccagatcgtgtctgccgaagcctggggcagagccgattgcggatcccagagcttcggcctgctggaccccaagctgtgctacctgctggatggcatcctgttcatctacggcgtgatcctgaccgccctgttcctgagagtgaagttcagcagaagcgccgacgcccctgcctaccagcagggacagaaccaactgtacaacgagctgaacctgggcagacgggaagagtacgacgtgctggacaagcggagaggcagggaccctgagatgggcggaaagccccagcggagaaagaacccccaggaaggactgtataacgaactccagaaagacaagatggccgaagcctacagcgagatcggcatgaagggcgagcggagaagaggcaagggccacgatggcctgtaccagggcctgagcaccgccaccaaggacacctatgacgccctgcacatgcaggccctgcctccaagaagggccaagcgatctggatctggagcaacaaacttctcactactcaaacaagcaggtgacgtggaggagaatcccgggcctactagtatggactggatttggcgcatccttttccttgtcggcgctgctaccggcgcgcattccttcgaagaagtgcagctggttgaatcaggtggcggcgttgtgcagcctggcagaagtctgagactgagctgtagcgccagcggcttcgatttcaccacctactggatgagctgggtccgacaggcccctggcaaaggactggaatggatcggcgagattcaccccgacagcagcaccatcaattacgcccctagcctgaaggacagattcaccatcagccgggacaacgccaagaacaccctgttcctccagatggactccctgaggccagaggataccggcgtgtacttttgcgccagcctgtatttcggcttcccttggtttgcctactggggccagggaacccctgtgacagttagctctacgcgtatccagaaccctgatcctgccgtgtaccagctgcgggatagcaagagcagcgacaagagcgtgtgtctgttcaccgacttcgacagccagaccaacgtgtcccagagcaaggactccgacgtgtacatcaccgataagaccgtgctggacatgcggagcatggacttcaagagcaactccgccgtggcctggtccaacaagtccgatttcgcctgcgccaacgccttcaacaacagcattatccccgaggacacattcttcccaagccccgagagcagctgcggtacccagagttttgggttgttggaccctaaattgtgctatctgttggacggaatcctgttcatttacggagtgatcctgaccgcattgttcctgcgggttaagttttccagatccgcagacgcacccgcttaccaacaagggcagaaccaactctacaatgaacttaatttggggcggagggaagagtacgacgttctggacaaaaggaggggacgagatcccgagatgggcggaaagcctcagcgaaggaagaatccgcaagaggggctttataacgaactccagaaagataaaatggcagaagcctatagtgagattgggatgaagggagaaaggaggaggggtaaaggtcacgatgggttgtaccaaggattgagcacagccactaaagatacctatgatgcgctccacatgcaggccctgccgccaaga

SEQ ID NO: 8779 - DNA, 2337 bp, Artificial Sequence
  Synthetic Polynucloetide
atggccttaccagtgaccgccttgctcctgccgctggccttgctgctccacgccgccaggccggaagtgcagctggttgaatctggcggaggactggttcagcctggcggatctctgagactgtcttgtgccgccagcggcttcagcttcagcgacttttggatgagctgggtccgacaggcccctggcaaaggacttgaatgggtcgccacaatcagccaggccggcagcgagaaggactacgtggactctgtgaagggcagattcaccatcagccgggacaacgccaagaagtccctgtacctccagatgaacagcctgagagccgaggacaccgccgtgtactattgtgcctctggcgtgtacagcttcgactacagaggccagggcaccctggtcacagtctcttctggtaccggcggaggcggatctggcggcggaggtagcggtggcggaggatctgaattcgacatccagctgacacagagcccttctagcctgtctgccagcgtgggcgacagagtgaccatcacctgtaaagccagccaggacgtgggcacaagcgtggcatggtatcagcagaagcctggcaaggcccctaagctgctgatctactggaccagcaccagacacacaggcgtgcccagcagattttctggcagcggctctggcaccgacttcaccttcacaatatccagcctccagcctgaggacattgccacctactactgccagcagtacagcctgtaccgctctttcggccagggcaccaaggtggaaatcaaactcgagggacagcctaaggccaatcctaccgtgacactgttccctccaagcagcgaagaactccaggccaacaaggccacacttgtgtgcctgatctccgacttctaccctggggctgtgacagtggcttggaaggccgatggatctcctgtgaaagccggcgtggaaaccaccaagccatccaagcagagcaacaacaaatacgccgccagctcctacctgagcctgacacctgagcagtggaagtcccacagatcctacagctgccaagtgacccacgaaggcagcaccgtggaaaagacagtggcccctacagagtgcagccccatcaagaccgatgtgattacaatggaccccaaggacaactgctccaaggacgccaacgataccctgctgctccagctgaccaacaccagcgcctactacatgtacttgttgctgctgctgaagtccgtggtgtacttcgccatcatcacatgctgcctgctgcggagaaccgccttctgctgcaacggcgagaagtctagggccaagcgatctggatctggagcaacaaacttctcactactcaaacaagcaggtgacgtggaggagaatcccgggcctactagtatggactggatttggcgcatccttttccttgtcggcgctgctaccggcgcgcattccttcgaagaagtgcagctggttgaatcaggtggcggcgttgtgcagcctggcagaagtctgagactgagctgtagcgccagcggcttcgatttcaccacctactggatgagctgggtccgacaggcccctggcaaaggactggaatggatcggcgagattcaccccgacagcagcaccatcaattacgcccctagcctgaaggacagattcaccatcagccgggacaacgccaagaacaccctgttcctccagatggactccctgaggccagaggataccggcgtgtacttttgcgccagcctgtatttcggcttcccttggtttgcctactggggccagggaacccctgtgacagttagctctacgcgtgcctctacaaagggaccctccgtgtttcctctggctcccagcagcaagtctacaagcggaggaacagccgctctgggctgcctggtcaaggattactttcccgagcctgtgaccgtgtcctggaatagcggagcactgacaagcggcgtgcacacctttccagccgtgctgcaaagcagcggcctgtactctctgagcagcgtggtcacagtgcctagctctagcctgggcacccagacctacatctgcaatgtgaaccacaagcctagcaacaccaaggtggacaagagagtggaacccaagagctgtgaagtgaaaaccgactccaccgaccacgtgaagcccaaagagacagagaacaccaagcagcccagcaagagctgccacaagcccaaggccatcgtgcacaccgagaaagtgaacatgatgagcctgaccgtgctgggcctgcggatgctgttcgccaaaaccgtggccgtgaacttcctgctgaccgccaagctgttcttcctc

SEQ ID NO: 8780 - DNA, 2280 bp, Artificial Sequence
  Synthetic Polynucloetide
atggccttaccagtgaccgccttgctcctgccgctggccttgctgctccacgccgccaggccggaagtgcagctggttgaatctggcggaggactggttcagcctggcggatctctgagactgtcttgtgccgccagcggcttcagcttcagcgacttttggatgagctgggtccgacaggcccctggcaaaggacttgaatgggtcgccacaatcagccaggccggcagcgagaaggactacgtggactctgtgaagggcagattcaccatcagccgggacaacgccaagaagtccctgtacctccagatgaacagcctgagagccgaggacaccgccgtgtactattgtgcctctggcgtgtacagcttcgactacagaggccagggcaccctggtcacagtctcttctggtaccggcggaggcggatctggcggcggaggtagcggtggcggaggatctgaattcgacatccagctgacacagagcccttctagcctgtctgccagcgtgggcgacagagtgaccatcacctgtaaagccagccaggacgtgggcacaagcgtggcatggtatcagcagaagcctggcaaggcccctaagctgctgatctactggaccagcaccagacacacaggcgtgcccagcagattttctggcagcggctctggcaccgacttcaccttcacaatatccagcctccagcctgaggacattgccacctactactgccagcagtacagcctgtaccgctctttcggccagggcaccaaggtggaaatcaaactcgagggacagcctaaggccaatcctaccgtgacactgttccctccaagcagcgaagaactccaggccaacaaggccacacttgtgtgcctgatctccgacttctaccctggggctgtgacagtggcttggaaggccgatggatctcctgtgaaagccggcgtggaaaccaccaagccatccaagcagagcaacaacaaatacgccgccagctcctacctgagcctgacacctgagcagtggaagtcccacagatcctacagctgccaagtgacccacgaaggcagcaccgtggaaaagacagtggcccctacagagtgcagcggcagagccgattgcggctttaccagcgagagctaccagcagggcgtgctgagcgccaccatcctgtacgagatcctgctgggcaaggccaccctgtacgccgtgctggtgtctgccctggtgctgatggctatggtcaagcggaaggacagccggggacgcgccaagagaagcggatctggcgtgaagcagaccctgaatttcgacctgctgaagctggctggcgacgtggaatccaacccaggccctactagtatggactggatttggcgcatccttttccttgtcggcgctgctaccggcgcgcattccttcgaagaagtgcagctggttgaatcaggtggcggcgttgtgcagcctggcagaagtctgagactgagctgtagcgccagcggcttcgatttcaccacctactggatgagctgggtccgacaggcccctggcaaaggactggaatggatcggcgagattcaccccgacagcagcaccatcaattacgcccctagcctgaaggacagattcaccatcagccgggacaacgccaagaacaccctgttcctccagatggactccctgaggccagaggataccggcgtgtacttttgcgccagcctgtatttcggcttcccttggtttgcctactggggccagggaacccctgtgacagttagctctacgcgtgcctctacaaagggaccctccgtgtttcctctggctcccagcagcaagtctacaagcggaggaacagccgctctgggctgcctggtcaaggattactttcccgagcctgtgaccgtgtcctggaatagcggagcactgacaagcggcgtgcacacctttccagccgtgctgcaaagcagcggcctgtactctctgagcagcgtggtcacagtgcctagctctagcctgggcacccagacctacatctgcaatgtgaaccacaagcctagcaacaccaaggtggacaagagagtggaacccaagagctgtatccccgaggacacattcttcccaagccccgagagcagctgcgacgtgaagctggtggaaaagagcttcgagacagacaccaacctgaacttccagaacctgagcgtgatcggcttcagaatcctgctgctgaaagtggccggctttaacctgctgatgaccctgcggctgtggtccagc

SEQ ID NO: 8781 - DNA, 2682 bp, Artificial Sequence
  Synthetic Polynucloetide
atggccttaccagtgaccgccttgctcctgccgctggccttgctgctccacgccgccaggccggaagtgcagctggttgaatctggcggaggactggttcagcctggcggatctctgagactgtcttgtgccgccagcggcttcagcttcagcgacttttggatgagctgggtccgacaggcccctggcaaaggacttgaatgggtcgccacaatcagccaggccggcagcgagaaggactacgtggactctgtgaagggcagattcaccatcagccgggacaacgccaagaagtccctgtacctccagatgaacagcctgagagccgaggacaccgccgtgtactattgtgcctctggcgtgtacagcttcgactacagaggccagggcaccctggtcacagtctcttctggtaccggcggaggcggatctggcggcggaggtagcggtggcggaggatctgaattcgacatccagctgacacagagcccttctagcctgtctgccagcgtgggcgacagagtgaccatcacctgtaaagccagccaggacgtgggcacaagcgtggcatggtatcagcagaagcctggcaaggcccctaagctgctgatctactggaccagcaccagacacacaggcgtgcccagcagattttctggcagcggctctggcaccgacttcaccttcacaatatccagcctccagcctgaggacattgccacctactactgccagcagtacagcctgtaccgctctttcggccagggcaccaaggtggaaatcaaactcgagatccagaaccctgatcctgccgtgtaccagctgcgggatagcaagagcagcgacaagagcgtgtgtctgttcaccgacttcgacagccagaccaacgtgtcccagagcaaggactccgacgtgtacatcaccgataagtgcgtgctggacatgcggagcatggacttcaagagcaactccgccgtggcctggtccaacaagtccgatttcgcctgcgccaacgccttcaacaacagcattatccccgaggacacattcttcccaagccccgagagcagctgcgacgtgaagctggtggaaaagagcttcgagacagacaccaacctgaacttccagaacctgagcgtgatcggcttcagaatcctgctgctgaaagtggccggctttaacctgctgatgaccctgcggctgtggtccagccgcgccaagagaagcggatctggcgtgaagcagaccctgaatttcgacctgctgaagctggctggcgacgtggaatccaacccaggccctactagtatggactggatttggcgcatccttttccttgtcggcgctgctaccggcgcgcattccgggccccagctccagctgcaagagtctggacctggcctggtcaagcctagcgagacactgagcctgacctgtaccgtgtccggcgatagcatcagcagcggcgattactactggggctggatcagacagcctcctggcaaaggactggaatggatcggccacatctactacagcggcgtgacctactacaaccccagcctgaagtccagagtgaccatcagcgtggacaccagccggaaccagttctccctgaagctgtctagcgtgacagccgccgataccgccgtgtactactgcaccagagaggacagcagcaactggcggagtagaggccagggaacactggtcacagttagctctggatccggcggaggcggaagtggaggcggaggatctggcggcggaggctctttcgaagaagtgcagctggttgaatcaggtggcggcgttgtgcagcctggcagaagtctgagactgagctgtagcgccagcggcttcgatttcaccacctactggatgagctgggtccgacaggcccctggcaaaggactggaatggatcggcgagattcaccccgacagcagcaccatcaattacgcccctagcctgaaggacagattcaccatcagccgggacaacgccaagaacaccctgttcctccagatggactccctgaggccagaggataccggcgtgtacttttgcgccagcctgtatttcggcttcccttggtttgcctactggggccagggaacccctgtgacagttagctctacgcgtgaggacctgaagaacgtgttcccacctgaggtggccgtgttcgagcctagcgaggccgagatcagccacacccagaaagccaccctcgtgtgcctggctaccggcttctaccccgaccatgtggaactgtcttggtgggtcaacggcaaagaggtgcacagcggcgtgtgtaccgacccccagccactgaaagaacagcccgccctgaacgacagccggtactgcctgagcagcagactgagagtgtccgccaccttctggcagaacccccggaaccacttcagatgccaggtgcagttctacggcctgagcgagaacgacgagtggacccaggacagagccaagcccgtgacccagatcgtgtctgccgaagcctggggcagagccgattgcggctttaccagcgagagctaccagcagggcgtgctgagcgccaccatcctgtacgagatcctgctgggcaaggccaccctgtacgccgtgctggtgtctgccctggtgctgatggctatggtcaagcggaaggacagccgggga

SEQ ID NO: 8782 - DNA, 3258 bp, Artificial Sequence
  Synthetic Polynucloetide
atggccttaccagtgaccgccttgctcctgccgctggccttgctgctccacgccgccaggccggaagtgcagctggttgaatctggcggaggactggttcagcctggcggatctctgagactgtcttgtgccgccagcggcttcagcttcagcgacttttggatgagctgggtccgacaggcccctggcaaaggacttgaatgggtcgccacaatcagccaggccggcagcgagaaggactacgtggactctgtgaagggcagattcaccatcagccgggacaacgccaagaagtccctgtacctccagatgaacagcctgagagccgaggacaccgccgtgtactattgtgcctctggcgtgtacagcttcgactacagaggccagggcaccctggtcacagtctcttctggtaccggcggaggcggatctggcggcggaggtagcggtggcggaggatctgaattcgacatccagctgacacagagcccttctagcctgtctgccagcgtgggcgacagagtgaccatcacctgtaaagccagccaggacgtgggcacaagcgtggcatggtatcagcagaagcctggcaaggcccctaagctgctgatctactggaccagcaccagacacacaggcgtgcccagcagattttctggcagcggctctggcaccgacttcaccttcacaatatccagcctccagcctgaggacattgccacctactactgccagcagtacagcctgtaccgctctttcggccagggcaccaaggtggaaatcaaactcgaggacctgaagaacgtgttcccacctgaggtggccgtgttcgagcctagcgaggccgagatcagccacacccagaaagccaccctcgtgtgcctggctaccggcttctaccccgaccatgtggaactgtcttggtgggtcaacggcaaagaggtgcacagcggcgtgtctaccgacccccagccactgaaagaacagcccgccctgaacgacagccggtactgcctgagcagcagactgagagtgtccgccaccttctggcagaacccccggaaccacttcagatgccaggtgcagttctacggcctgagcgagaacgacgagtggacccaggacagagccaagcccgtgacccagatcgtgtctgccgaagcctggggcagagccgattgcggatcccagagcttcggcctgctggaccccaagctgtgctacctgctggatggcatcctgttcatctacggcgtgatcctgaccgccctgttcctgagagtgaagttcagcagaagcgccgacgcccctgcctaccagcagggacagaaccaactgtacaacgagctgaacctgggcagacgggaagagtacgacgtgctggacaagcggagaggcagggaccctgagatgggcggaaagccccagcggagaaagaacccccaggaaggactgtataacgaactccagaaagacaagatggccgaagcctacagcgagatcggcatgaagggcgagcggagaagaggcaagggccacgatggcctgtaccagggcctgagcaccgccaccaaggacacctatgacgccctgcacatgcaggccctgcctccaagaagggccaagcgatctggatctggagcaacaaacttctcactactcaaacaagcaggtgacgtggaggagaatcccgggcctactagtatggactggatttggcgcatccttttccttgtcggcgctgctaccggcgcgcattccgggccccagctccagctgcaagagtctggacctggcctggtcaagcctagcgagacactgagcctgacctgtaccgtgtccggcgatagcatcagcagcggcgattactactggggctggatcagacagcctcctggcaaaggactggaatggatcggccacatctactacagcggcgtgacctactacaaccccagcctgaagtccagagtgaccatcagcgtggacaccagccggaaccagttctccctgaagctgtctagcgtgacagccgccgataccgccgtgtactactgcaccagagaggacagcagcaactggcggagtagaggccagggaacactggtcacagttagctctggatccggcggaggcggaagtggaggcggaggatctggcggcggaggctctttcgaagaagtgcagctggttgaatcaggtggcggcgttgtgcagcctggcagaagtctgagactgagctgtagcgccagcggcttcgatttcaccacctactggatgagctgggtccgacaggcccctggcaaaggactggaatggatcggcgagattcaccccgacagcagcaccatcaattacgcccctagcctgaaggacagattcaccatcagccgggacaacgccaagaacaccctgttcctccagatggactccctgaggccagaggataccggcgtgtacttttgcgccagcctgtatttcggcttcccttggtttgcctactggggccagggaacccctgtgacagttagctctacgcgtatccagaaccctgatcctgccgtgtaccagctgcgggatagcaagagcagcgacaagagcgtgtgtctgttcaccgacttcgacagccagaccaacgtgtcccagagcaaggactccgacgtgtacatcaccgataagaccgtgctggacatgcggagcatggacttcaagagcaactccgccgtggcctggtccaacaagtccgatttcgcctgcgccaacgccttcaacaacagcattatccccgaggacacattcttcccaagccccgagagcagctgcggtacccagagttttgggttgttggaccctaaattgtgctatctgttggacggaatcctgttcatttacggagtgatcctgaccgcattgttcctgcgggttaagttttccagatccgcagacgcacccgcttaccaacaagggcagaaccaactctacaatgaacttaatttggggcggagggaagagtacgacgttctggacaaaaggaggggacgagatcccgagatgggcggaaagcctcagcgaaggaagaatccgcaagaggggctttataacgaactccagaaagataaaatggcagaagcctatagtgagattgggatgaagggagaaaggaggaggggtaaaggtcacgatgggttgtaccaaggattgagcacagccactaaagatacctatgatgcgctccacatgcaggccctgccgccaaga

SEQ ID NO: 8783 - DNA, 2748 bp, Artificial Sequence
  Synthetic Polynucloetide
atggccttaccagtgaccgccttgctcctgccgctggccttgctgctccacgccgccaggccggaagtgcagctggttgaatctggcggaggactggttcagcctggcggatctctgagactgtcttgtgccgccagcggcttcagcttcagcgacttttggatgagctgggtccgacaggcccctggcaaaggacttgaatgggtcgccacaatcagccaggccggcagcgagaaggactacgtggactctgtgaagggcagattcaccatcagccgggacaacgccaagaagtccctgtacctccagatgaacagcctgagagccgaggacaccgccgtgtactattgtgcctctggcgtgtacagcttcgactacagaggccagggcaccctggtcacagtctcttctggtaccggcggaggcggatctggcggcggaggtagcggtggcggaggatctgaattcgacatccagctgacacagagcccttctagcctgtctgccagcgtgggcgacagagtgaccatcacctgtaaagccagccaggacgtgggcacaagcgtggcatggtatcagcagaagcctggcaaggcccctaagctgctgatctactggaccagcaccagacacacaggcgtgcccagcagattttctggcagcggctctggcaccgacttcaccttcacaatatccagcctccagcctgaggacattgccacctactactgccagcagtacagcctgtaccgctctttcggccagggcaccaaggtggaaatcaaactcgagggacagcctaaggccaatcctaccgtgacactgttccctccaagcagcgaagaactccaggccaacaaggccacacttgtgtgcctgatctccgacttctaccctggggctgtgacagtggcttggaaggccgatggatctcctgtgaaagccggcgtggaaaccaccaagccatccaagcagagcaacaacaaatacgccgccagctcctacctgagcctgacacctgagcagtggaagtcccacagatcctacagctgccaagtgacccacgaaggcagcaccgtggaaaagacagtggcccctacagagtgcagccccatcaagaccgatgtgattacaatggaccccaaggacaactgctccaaggacgccaacgataccctgctgctccagctgaccaacaccagcgcctactacatgtacttgttgctgctgctgaagtccgtggtgtacttcgccatcatcacatgctgcctgctgcggagaaccgccttctgctgcaacggcgagaagtctagggccaagcgatctggatctggagcaacaaacttctcactactcaaacaagcaggtgacgtggaggagaatcccgggcctactagtatggactggatttggcgcatccttttccttgtcggcgctgctaccggcgcgcattccgggccccagctccagctgcaagagtctggacctggcctggtcaagcctagcgagacactgagcctgacctgtaccgtgtccggcgatagcatcagcagcggcgattactactggggctggatcagacagcctcctggcaaaggactggaatggatcggccacatctactacagcggcgtgacctactacaaccccagcctgaagtccagagtgaccatcagcgtggacaccagccggaaccagttctccctgaagctgtctagcgtgacagccgccgataccgccgtgtactactgcaccagagaggacagcagcaactggcggagtagaggccagggaacactggtcacagttagctctggatccggcggaggcggaagtggaggcggaggatctggcggcggaggctctttcgaagaagtgcagctggttgaatcaggtggcggcgttgtgcagcctggcagaagtctgagactgagctgtagcgccagcggcttcgatttcaccacctactggatgagctgggtccgacaggcccctggcaaaggactggaatggatcggcgagattcaccccgacagcagcaccatcaattacgcccctagcctgaaggacagattcaccatcagccgggacaacgccaagaacaccctgttcctccagatggactccctgaggccagaggataccggcgtgtacttttgcgccagcctgtatttcggcttcccttggtttgcctactggggccagggaacccctgtgacagttagctctacgcgtgcctctacaaagggaccctccgtgtttcctctggctcccagcagcaagtctacaagcggaggaacagccgctctgggctgcctggtcaaggattactttcccgagcctgtgaccgtgtcctggaatagcggagcactgacaagcggcgtgcacacctttccagccgtgctgcaaagcagcggcctgtactctctgagcagcgtggtcacagtgcctagctctagcctgggcacccagacctacatctgcaatgtgaaccacaagcctagcaacaccaaggtggacaagagagtggaacccaagagctgtgaagtgaaaaccgactccaccgaccacgtgaagcccaaagagacagagaacaccaagcagcccagcaagagctgccacaagcccaaggccatcgtgcacaccgagaaagtgaacatgatgagcctgaccgtgctgggcctgcggatgctgttcgccaaaaccgtggccgtgaacttcctgctgaccgccaagctgttcttcctc

SEQ ID NO: 8784 - DNA, 2691 bp, Artificial Sequence
  Synthetic Polynucloetide
atggccttaccagtgaccgccttgctcctgccgctggccttgctgctccacgccgccaggccggaagtgcagctggttgaatctggcggaggactggttcagcctggcggatctctgagactgtcttgtgccgccagcggcttcagcttcagcgacttttggatgagctgggtccgacaggcccctggcaaaggacttgaatgggtcgccacaatcagccaggccggcagcgagaaggactacgtggactctgtgaagggcagattcaccatcagccgggacaacgccaagaagtccctgtacctccagatgaacagcctgagagccgaggacaccgccgtgtactattgtgcctctggcgtgtacagcttcgactacagaggccagggcaccctggtcacagtctcttctggtaccggcggaggcggatctggcggcggaggtagcggtggcggaggatctgaattcgacatccagctgacacagagcccttctagcctgtctgccagcgtgggcgacagagtgaccatcacctgtaaagccagccaggacgtgggcacaagcgtggcatggtatcagcagaagcctggcaaggcccctaagctgctgatctactggaccagcaccagacacacaggcgtgcccagcagattttctggcagcggctctggcaccgacttcaccttcacaatatccagcctccagcctgaggacattgccacctactactgccagcagtacagcctgtaccgctctttcggccagggcaccaaggtggaaatcaaactcgagggacagcctaaggccaatcctaccgtgacactgttccctccaagcagcgaagaactccaggccaacaaggccacacttgtgtgcctgatctccgacttctaccctggggctgtgacagtggcttggaaggccgatggatctcctgtgaaagccggcgtggaaaccaccaagccatccaagcagagcaacaacaaatacgccgccagctcctacctgagcctgacacctgagcagtggaagtcccacagatcctacagctgccaagtgacccacgaaggcagcaccgtggaaaagacagtggcccctacagagtgcagcggcagagccgattgcggctttaccagcgagagctaccagcagggcgtgctgagcgccaccatcctgtacgagatcctgctgggcaaggccaccctgtacgccgtgctggtgtctgccctggtgctgatggctatggtcaagcggaaggacagccggggacgcgccaagagaagcggatctggcgtgaagcagaccctgaatttcgacctgctgaagctggctggcgacgtggaatccaacccaggccctactagtatggactggatttggcgcatccttttccttgtcggcgctgctaccggcgcgcattccgggccccagctccagctgcaagagtctggacctggcctggtcaagcctagcgagacactgagcctgacctgtaccgtgtccggcgatagcatcagcagcggcgattactactggggctggatcagacagcctcctggcaaaggactggaatggatcggccacatctactacagcggcgtgacctactacaaccccagcctgaagtccagagtgaccatcagcgtggacaccagccggaaccagttctccctgaagctgtctagcgtgacagccgccgataccgccgtgtactactgcaccagagaggacagcagcaactggcggagtagaggccagggaacactggtcacagttagctctggatccggcggaggcggaagtggaggcggaggatctggcggcggaggctctttcgaagaagtgcagctggttgaatcaggtggcggcgttgtgcagcctggcagaagtctgagactgagctgtagcgccagcggcttcgatttcaccacctactggatgagctgggtccgacaggcccctggcaaaggactggaatggatcggcgagattcaccccgacagcagcaccatcaattacgcccctagcctgaaggacagattcaccatcagccgggacaacgccaagaacaccctgttcctccagatggactccctgaggccagaggataccggcgtgtacttttgcgccagcctgtatttcggcttcccttggtttgcctactggggccagggaacccctgtgacagttagctctacgcgtgcctctacaaagggaccctccgtgtttcctctggctcccagcagcaagtctacaagcggaggaacagccgctctgggctgcctggtcaaggattactttcccgagcctgtgaccgtgtcctggaatagcggagcactgacaagcggcgtgcacacctttccagccgtgctgcaaagcagcggcctgtactctctgagcagcgtggtcacagtgcctagctctagcctgggcacccagacctacatctgcaatgtgaaccacaagcctagcaacaccaaggtggacaagagagtggaacccaagagctgtatccccgaggacacattcttcccaagccccgagagcagctgcgacgtgaagctggtggaaaagagcttcgagacagacaccaacctgaacttccagaacctgagcgtgatcggcttcagaatcctgctgctgaaagtggccggctttaacctgctgatgaccctgcggctgtggtccagc

SEQ ID NO: 8785 - DNA, 2262 bp, Artificial Sequence
  Synthetic Polynucloetide
atggccttaccagtgaccgccttgctcctgccgctggccttgctgctccacgccgccaggccggaagtgcaggttttggagtctggcggaggactggttcagcctggcggatctctgagactgtcttgtgccgccagcggcttcaccttcagcaactttgccatgagctgggtccgacaggcccctggcaaaggacttgaatgggtgtccacaatcagcggcagcgccggcacaacagattacgccgattctgtgaagggcagattcaccatcagccgggacaacagcaagaaaaccctgtacctccagatgaacagcctgcgcgtggaagataccgccgtgtactactgtgccgatggcagaggccccttcttcgattatcgcggccagggcacactggtcaccgtttcttctggtaccggcggaggcggatctggcggcggaggtagcggtggcggaggatctgaattcgacatccagctgacacagagcccttctagcctgtctgccagcgtgggcgacagagtgaccatcacctgtaaagccagccaggacgtgggcacaagcgtggcatggtatcagcagaagcctggcaaggcccctaagctgctgatctactggaccagcaccagacacacaggcgtgcccagcagattttctggcagcggctctggcaccgacttcaccttcacaatatccagcctccagcctgaggacattgccacctactactgccagcagtacagcctgtaccgctctttcggccagggcaccaaggtggaaatcaaactcgaggacctgaagaacgtgttcccacctgaggtggccgtgttcgagcctagcgaggccgagatcagccacacccagaaagccaccctcgtgtgcctggctaccggcttctaccccgaccatgtggaactgtcttggtgggtcaacggcaaagaggtgcacagcggcgtgtgtaccgacccccagccactgaaagaacagcccgccctgaacgacagccggtactgcctgagcagcagactgagagtgtccgccaccttctggcagaacccccggaaccacttcagatgccaggtgcagttctacggcctgagcgagaacgacgagtggacccaggacagagccaagcccgtgacccagatcgtgtctgccgaagcctggggcagagccgattgcggctttaccagcgagagctaccagcagggcgtgctgagcgccaccatcctgtacgagatcctgctgggcaaggccaccctgtacgccgtgctggtgtctgccctggtgctgatggctatggtcaagcggaaggacagccggggaagggccaagcgatctggatctggagcaacaaacttctcactactcaaacaagcaggtgacgtggaggagaatcccgggcctactagtatggactggatttggcgcatccttttccttgtcggcgctgctaccggcgcgcattccttcgaagaagtgcagctggttgaatcaggtggcggcgttgtgcagcctggcagaagtctgagactgagctgtagcgccagcggcttcgatttcaccacctactggatgagctgggtccgacaggcccctggcaaaggactggaatggatcggcgagattcaccccgacagcagcaccatcaattacgcccctagcctgaaggacagattcaccatcagccgggacaacgccaagaacaccctgttcctccagatggactccctgaggccagaggataccggcgtgtacttttgcgccagcctgtatttcggcttcccttggtttgcctactggggccagggaacccctgtgacagttagctctacgcgtatccagaaccctgatcctgccgtgtaccagctgcgggatagcaagagcagcgacaagagcgtgtgtctgttcaccgacttcgacagccagaccaacgtgtcccagagcaaggactccgacgtgtacatcaccgataagtgcgtgctggacatgcggagcatggacttcaagagcaactccgccgtggcctggtccaacaagtccgatttcgcctgcgccaacgccttcaacaacagcattatccccgaggacacattcttcccaagccccgagagcagctgcgacgtgaagctggtggaaaagagcttcgagacagacaccaacctgaacttccagaacctgagcgtgatcggcttcagaatcctgctgctgaaagtggccggctttaacctgctgatgaccctgcggctgtggtccagc

SEQ ID NO: 8786 - DNA, 2265 bp, Artificial Sequence
  Synthetic Polynucloetide
atggccttaccagtgaccgccttgctcctgccgctggccttgctgctccacgccgccaggccggacatccagctgacacagagcccttctagcctgtctgccagcgtgggcgacagagtgaccatcacctgtaaagccagccaggacgtgggcacaagcgtggcatggtatcagcagaagcctggcaaggcccctaagctgctgatctactggaccagcaccagacacacaggcgtgcccagcagattttctggcagcggctctggcaccgacttcaccttcacaatatccagcctccagcctgaggacattgccacctactactgccagcagtacagcctgtaccgctctttcggccagggcaccaaggtggaaatcaaactcgaggacctgaagaacgtgttcccacctgaggtggccgtgttcgagcctagcgaggccgagatcagccacacccagaaagccaccctcgtgtgcctggctaccggcttctaccccgaccatgtggaactgtcttggtgggtcaacggcaaagaggtgcacagcggcgtgtgtaccgacccccagccactgaaagaacagcccgccctgaacgacagccggtactgcctgagcagcagactgagagtgtccgccaccttctggcagaacccccggaaccacttcagatgccaggtgcagttctacggcctgagcgagaacgacgagtggacccaggacagagccaagcccgtgacccagatcgtgtctgccgaagcctggggcagagccgattgcggctttaccagcgagagctaccagcagggcgtgctgagcgccaccatcctgtacgagatcctgctgggcaaggccaccctgtacgccgtgctggtgtctgccctggtgctgatggctatggtcaagcggaaggacagccggggaagggccaagcgatctggatctggagcaacaaacttctcactactcaaacaagcaggtgacgtggaggagaatcccgggcctactagtatggactggatttggcgcatccttttccttgtcggcgctgctaccggcgcccattccgggcccgaagtgcagctggttgaatctggcggaggactggttcaggctggcggatctctgagactgtcttgtgccgccagcggcagaacctttagcatgggctggtttagacaggcccctggcaaagagagagagttcgtcgccgccatcacatactctggcggcagcccttactacgccgactctgtgaagggcagattcaccatcagccgggacaacgccaagaacaccgtgtacctccagatgaacagcctgaagcctgaggacaccgccgtgtactactgcgccgccaatccaacatacggcagcgactggaacgccgagaattggggccagggaacccaagtgacagtgtctagcggatccggcggcggaggatctggcggaggcggatctgggggcggaggctctttcgaagaagtgcagctggttgaatcaggtggcggcgttgtgcagcctggcagaagtctgagactgagctgtagcgccagcggcttcgatttcaccacctactggatgagctgggtccgacaggcccctggcaaaggactggaatggatcggcgagattcaccccgacagcagcaccatcaattacgcccctagcctgaaggacagattcaccatcagccgggacaacgccaagaacaccctgttcctccagatggactccctgaggccagaggataccggcgtgtacttttgcgccagcctgtatttcggcttcccttggtttgcctactggggccagggaacccctgtgacagttagctctacgcgtatccagaaccctgatcctgccgtgtaccagctgcgggatagcaagagcagcgacaagagcgtgtgtctgttcaccgacttcgacagccagaccaacgtgtcccagagcaaggactccgacgtgtacatcaccgataagtgcgtgctggacatgcggagcatggacttcaagagcaactccgccgtggcctggtccaacaagtccgatttcgcctgcgccaacgccttcaacaacagcattatccccgaggacacattcttcccaagccccgagagcagctgcgacgtgaagctggtggaaaagagcttcgagacagacaccaacctgaacttccagaacctgagcgtgatcggcttcagaatcctgctgctgaaagtggccggctttaacctgctgatgaccctgcggctgtggtccagc

SEQ ID NO: 8787 - DNA, 2646 bp, Artificial Sequence
  Synthetic Polynucloetide
atggccttaccagtgaccgccttgctcctgccgctggccttgctgctccacgccgccaggccggacatccagctgacacagagcccttctagcctgtctgccagcgtgggcgacagagtgaccatcacctgtaaagccagccaggacgtgggcacaagcgtggcatggtatcagcagaagcctggcaaggcccctaagctgctgatctactggaccagcaccagacacacaggcgtgcccagcagattttctggcagcggctctggcaccgacttcaccttcacaatatccagcctccagcctgaggacattgccacctactactgccagcagtacagcctgtaccgctctttcggccagggcaccaaggtggaaatcaaactcgaggacctgaagaacgtgttcccacctgaggtggccgtgttcgagcctagcgaggccgagatcagccacacccagaaagccaccctcgtgtgcctggctaccggcttctaccccgaccatgtggaactgtcttggtgggtcaacggcaaagaggtgcacagcggcgtgtgtaccgacccccagccactgaaagaacagcccgccctgaacgacagccggtactgcctgagcagcagactgagagtgtccgccaccttctggcagaacccccggaaccacttcagatgccaggtgcagttctacggcctgagcgagaacgacgagtggacccaggacagagccaagcccgtgacccagatcgtgtctgccgaagcctggggcagagccgattgcggctttaccagcgagagctaccagcagggcgtgctgagcgccaccatcctgtacgagatcctgctgggcaaggccaccctgtacgccgtgctggtgtctgccctggtgctgatggctatggtcaagcggaaggacagccggggaagggccaagcgatctggatctggagcaacaaacttctcactactcaaacaagcaggtgacgtggaggagaatcccgggcctactagtatggactggatttggcgcatccttttccttgtcggcgctgctaccggcgcccattcccaactgcaactgcaagagtctggccctggcctggtcaagccttctgaaaccctgagcctgacctgtaccgtgtccggcggctctatcagcagcggcgattactactggggctggatcagacagcctccaggcaagggactcgaatggatcggcagcatcagctacagcggctccacctactacaacccaagcctgaagtccagagtgaccatcagcgtggacaccagcagaaaccagttctccctgaagctgagcagcgtgacagccgccgatacagccgtgtattattgcaccagagaggacagcagcaactggcggagtagaggacagggcacactggtcacagtgtcctcttctggaggcggtggaagcggtggaggaggatctgaagtgcagctggttgaatctggcggaggactggttcaggctggcggatctctgagactgtcttgtgccgccagcggcagaacctttagcatgggctggtttagacaggcccctggcaaagagagagagttcgtcgccgccatcacatactctggcggcagcccttactacgccgactctgtgaagggcagattcaccatcagccgggacaacgccaagaacaccgtgtacctccagatgaacagcctgaagcctgaggacaccgccgtgtactactgcgccgccaatccaacatacggcagcgactggaacgccgagaattggggccagggaacccaagtgacagtgtctagcggatccggcggcggaggatctggcggaggcggatctgggggcggaggctctttcgaagaagtgcagctggttgaatcaggtggcggcgttgtgcagcctggcagaagtctgagactgagctgtagcgccagcggcttcgatttcaccacctactggatgagctgggtccgacaggcccctggcaaaggactggaatggatcggcgagattcaccccgacagcagcaccatcaattacgcccctagcctgaaggacagattcaccatcagccgggacaacgccaagaacaccctgttcctccagatggactccctgaggccagaggataccggcgtgtacttttgcgccagcctgtatttcggcttcccttggtttgcctactggggccagggaacccctgtgacagttagctctacgcgtatccagaaccctgatcctgccgtgtaccagctgcgggatagcaagagcagcgacaagagcgtgtgtctgttcaccgacttcgacagccagaccaacgtgtcccagagcaaggactccgacgtgtacatcaccgataagtgcgtgctggacatgcggagcatggacttcaagagcaactccgccgtggcctggtccaacaagtccgatttcgcctgcgccaacgccttcaacaacagcattatccccgaggacacattcttcccaagccccgagagcagctgcgacgtgaagctggtggaaaagagcttcgagacagacaccaacctgaacttccagaacctgagcgtgatcggcttcagaatcctgctgctgaaagtggccggctttaacctgctgatgaccctgcggctgtggtccagc

SEQ ID NO: 8788 - DNA, 2673 bp, Artificial Sequence
  Synthetic Polynucloetide
atggccttaccagtgaccgccttgctcctgccgctggccttgctgctccacgccgccaggccggaagtgcaggttttggagtctggcggaggactggttcagcctggcggatctctgagactgtcttgtgccgccagcggcttcaccttcagcaactttgccatgagctgggtccgacaggcccctggcaaaggacttgaatgggtgtccacaatcagcggcagcgccggcacaacagattacgccgattctgtgaagggcagattcaccatcagccgggacaacagcaagaaaaccctgtacctccagatgaacagcctgcgcgtggaagataccgccgtgtactactgtgccgatggcagaggccccttcttcgattatcgcggccagggcacactggtcaccgtttcttctggtaccggcggaggcggatctggcggcggaggtagcggtggcggaggatctgaattcgacatccagctgacacagagcccttctagcctgtctgccagcgtgggcgacagagtgaccatcacctgtaaagccagccaggacgtgggcacaagcgtggcatggtatcagcagaagcctggcaaggcccctaagctgctgatctactggaccagcaccagacacacaggcgtgcccagcagattttctggcagcggctctggcaccgacttcaccttcacaatatccagcctccagcctgaggacattgccacctactactgccagcagtacagcctgtaccgctctttcggccagggcaccaaggtggaaatcaaactcgaggacctgaagaacgtgttcccacctgaggtggccgtgttcgagcctagcgaggccgagatcagccacacccagaaagccaccctcgtgtgcctggctaccggcttctaccccgaccatgtggaactgtcttggtgggtcaacggcaaagaggtgcacagcggcgtgtgtaccgacccccagccactgaaagaacagcccgccctgaacgacagccggtactgcctgagcagcagactgagagtgtccgccaccttctggcagaacccccggaaccacttcagatgccaggtgcagttctacggcctgagcgagaacgacgagtggacccaggacagagccaagcccgtgacccagatcgtgtctgccgaagcctggggcagagccgattgcggctttaccagcgagagctaccagcagggcgtgctgagcgccaccatcctgtacgagatcctgctgggcaaggccaccctgtacgccgtgctggtgtctgccctggtgctgatggctatggtcaagcggaaggacagccggggaagggccaagcgatctggatctggagcaacaaacttctcactactcaaacaagcaggtgacgtggaggagaatcccgggcctactagtatggactggatttggcgcatccttttccttgtcggcgctgctaccggcgcccattccgggcccgaagtgcagctggttgaatctggcggaggactggttcaggctggcggatctctgagactgtcttgtgccgccagcggcagaacctttagcatgggctggtttagacaggcccctggcaaagagagagagttcgtcgccgccatcacatacagcggcggcagcccttactacgcctcttctgtcagaggccggttcaccatcagccgggacaacgccaagaacaccgtgtacctccagatgaacagcctgaagccagaggacaccgccgtgtactactgtgccgccaatccaacctacggcagcgactggaatgccgagaattggggccagggcacccaagtgacagtgtctagtggatccggcggcggaggatctggcggaggcggatctgggggcggaggctctttcgaagaagtgcagctggttgaatcaggtggcggcgttgtgcagcctggcagaagtctgagactgagctgtagcgccagcggcttcgatttcaccacctactggatgagctgggtccgacaggcccctggcaaaggactggaatggatcggcgagattcaccccgacagcagcaccatcaattacgcccctagcctgaaggacagattcaccatcagccgggacaacgccaagaacaccctgttcctccagatggactccctgaggccagaggataccggcgtgtacttttgcgccagcctgtatttcggcttcccttggtttgcctactggggccagggaacccctgtgacagttagctctacgcgtatccagaaccctgatcctgccgtgtaccagctgcgggatagcaagagcagcgacaagagcgtgtgtctgttcaccgacttcgacagccagaccaacgtgtcccagagcaaggactccgacgtgtacatcaccgataagtgcgtgctggacatgcggagcatggacttcaagagcaactccgccgtggcctggtccaacaagtccgatttcgcctgcgccaacgccttcaacaacagcattatccccgaggacacattcttcccaagccccgagagcagctgcgacgtgaagctggtggaaaagagcttcgagacagacaccaacctgaacttccagaacctgagcgtgatcggcttcagaatcctgctgctgaaagtggccggctttaacctgctgatgaccctgcggctgtggtccagc

SEQ ID NO: 8789 - DNA, 2181 bp, Artificial Sequence
  Synthetic Polynucloetide
atggccttaccagtgaccgccttgctcctgccgctggccttgctgctccacgccgccaggccggacatccagctgacacagagcccttctagcctgtctgccagcgtgggcgacagagtgaccatcacctgtagcacaagcagcagcgtgtcctacatgcactggtatcagcagaagcccggcaaggcccctaagctgctgatctacagcaccagcaatctggcctctggcgtgcccagcagattttctggctctggcagcggcaccgacttcaccttcacaatatccagcctccagcctgaggacattgccacctactactgccaccagtggtctagctaccccacattcggccagggcaccaaggtggaaatcaaaggcggaggcggaagtggaggcggaggatctggcggcggaggctctggagtgcattctcaggttcagctgcaagagtctggccctggacttgtgcggcctagccaaacactgagcctgacctgtaccgtgtccggcttcacaatcagctccggctacagctggcactgggtccgacaaccacctggcagaggactggaatggatcggctacatccagtacagcggcatcaccaactacaaccccagcctgaagtcccgcgtgaccatgctggtggacacctccaagaaccagttcagcctgagactgagcagcgtgacagccgccgatacagccgtgtactactgcgccagagaggactacgactaccactggtacttcgacgtgtggggccagggaaccaccgtgacagtttcttctacgcgtgagcagaaactgatctcggaagaggatctggcgaagcccaccacgacgccagcgccgcgaccaccaacaccggcgcccaccatcgcgtcgcagcccctgtccctgcgcccagaggcgtgccggccagcggcggggggcgcagtgcacacgagggggctggacttcgcctgtgacatctacatctgggcgcccttggccgggacttgtggggtccttctcctgtcactggttatcaccctttactgcaaacggggcagaaagaaactcctgtatatattcaaacaaccatttatgagaccagtacaaactactcaagaggaagatggctgtagctgccgatttccagaagaagaagaaggaggatgtgaactgagagtgaagttcagcaggagcgcagacgcccccgcgtaccagcagggccagaaccagctctataacgagctgaatctaggacgaagagaggagtacgatgttttggacaagagacgtggccgggaccctgagatggggggaaagccgagaaggaagaaccctcaggaaggcctgtacaatgaactgcagaaagataagatggcggaggcctacagtgagattgggatgaaaggcgagcgccggaggggcaaggggcacgatggcctttaccagggtctcagtacagccaccaaggacacctacgacgcccttcacatgcaggccctgccccctcgctctagtggctccggcgagggcagaggaagtctactaacctgcggagatgtggaagaaaatcctggcccacatatgaccgagtacaagcccacggtgcgcctcgccacccgcgacgacgtccccagggccgtacgcaccctcgccgccgcgttcgccgactaccccgccacgcgccacaccgtcgatccggaccgccacatcgagcgggtcaccgagctgcaagaactcttcctcacgcgcgtcgggctcgacatcggcaaggtgtgggtcgcggacgacggcgccgcggtggcggtctggaccacgccggagagcgtcgaagcgggggcggtgttcgccgagatcggcccgcgcatggccgagttgagcggttcccggctggccgcgcagcaacagatggaaggcctcctggcgccgcaccggcccaaggagcccgcgtggttcctggccaccgtcggcgtctcgcccgaccaccagggcaagggtctgggcagcgccgtcgtgctccccggagtggaggcggccgagcgcgccggggtgcccgccttcctggagacctccgcgccccgcaacctccccttctacgagcggctcggcttcaccgtcaccgccgacgtcgaggtgcccgaaggaccgcgcacctggtgcatgacccgcaagcccggtgcctga

SEQ ID NO: 8790 - DNA, 2163 bp, Artificial Sequence
  Synthetic Polynucloetide
atggccttaccagtgaccgccttgctcctgccgctggccttgctgctccacgccgccaggccggacatccagctgacacagagcccttctagcctgtctgccagcgtgggcgacagagtgaccatcacctgtagcacaagcagcagcgtgtcctacatgcactggtatcagcagaagcccggcaaggcccctaagctgctgatctacagcaccagcaatctggcctctggcgtgcccagcagattttctggctctggcagcggcaccgacttcaccttcacaatatccagcctccagcctgaggacattgccacctactactgccaccagtggtctagctaccccacattcggccagggcaccaaggtggaaatcaaaggcggaggcggaagtggaggcggaggatctggcggcggaggctctggagtgcattctcaggttcagctgcaagagtctggccctggacttgtgcggcctagccaaacactgagcctgacctgtaccgtgtccggcttcacaatcagctccggctacagctggcactgggtccgacaaccacctggcagaggactggaatggatcggctacatccagtacagcggcatcaccaactacaaccccagcctgaagtcccgcgtgaccatgctggtggacacctccaagaaccagttcagcctgagactgagcagcgtgacagccgccgatacagccgtgtactactgcgccagagaggactacgactaccactggtacttcgacgtgtggggccagggaaccaccgtgacagtttcttctacgcgtgagcagaaactgatctcggaagaggatctgaaaattgaagttatgtatcctcctccttacctagacaatgagaagagcaatggaaccattatccatgtgaaagggaaacacctttgtccaagtcccctatttcccggaccttctaagcccttttgggtgctggtggtggttgggggagtcctggcttgctatagcttgctagtaacagtggcctttattattttctgggtgaggagtaagaggagcaggctcctgcacagtgactacatgaacatgactccacgccgccccggacccacccgcaagcattaccagccctatgccccaccacgcgacttcgcagcctatcgctccagagtgaagttcagcaggagcgcagacgcccccgcgtaccagcagggccagaaccagctctataacgagctcaatctaggacgaagagaggagtacgatgttttggacaagagacgtggccgggaccctgagatggggggaaagccgagaaggaagaaccctcaggaaggcctgtacaatgaactgcagaaagataagatggcggaggcctacagtgagattgggatgaaaggcgagcgccggaggggcaaggggcacgatggcctttaccagggtctcagtacagccaccaaggacacctacgacgcccttcacatgcaggccctgccccctcgctctagtggctccggcgagggcagaggaagtctactaacctgcggagatgtggaagaaaatcctggcccacatatgaccgagtacaagcccacggtgcgcctcgccacccgcgacgacgtccccagggccgtacgcaccctcgccgccgcgttcgccgactaccccgccacgcgccacaccgtcgatccggaccgccacatcgagcgggtcaccgagctgcaagaactcttcctcacgcgcgtcgggctcgacatcggcaaggtgtgggtcgcggacgacggcgccgcggtggcggtctggaccacgccggagagcgtcgaagcgggggcggtgttcgccgagatcggcccgcgcatggccgagttgagcggttcccggctggccgcgcagcaacagatggaaggcctcctggcgccgcaccggcccaaggagcccgcgtggttcctggccaccgtcggcgtctcgcccgaccaccagggcaagggtctgggcagcgccgtcgtgctccccggagtggaggcggccgagcgcgccggggtgcccgccttcctggagacctccgcgccccgcaacctccccttctacgagcggctcggcttcaccgtcaccgccgacgtcgaggtgcccgaaggaccgcgcacctggtgcatgacccgcaagcccggtgcctga

SEQ ID NO: 8791 - DNA, 1491 bp, Artificial Sequence
  Synthetic Polynucloetide
atggccttaccagtgaccgccttgctcctgccgctggccttgctgctccacgccgccaggccggacatccagctgacacagagcccttctagcctgtctgccagcgtgggcgacagagtgaccatcacctgtagcacaagcagcagcgtgtcctacatgcactggtatcagcagaagcccggcaaggcccctaagctgctgatctacagcaccagcaatctggcctctggcgtgcccagcagattttctggctctggcagcggcaccgacttcaccttcacaatatccagcctccagcctgaggacattgccacctactactgccaccagtggtctagctaccccacattcggccagggcaccaaggtggaaatcaaaggcggaggcggaagtggaggcggaggatctggcggcggaggctctggagtgcattctcaggttcagctgcaagagtctggccctggacttgtgcggcctagccaaacactgagcctgacctgtaccgtgtccggcttcacaatcagctccggctacagctggcactgggtccgacaaccacctggcagaggactggaatggatcggctacatccagtacagcggcatcaccaactacaaccccagcctgaagtcccgcgtgaccatgctggtggacacctccaagaaccagttcagcctgagactgagcagcgtgacagccgccgatacagccgtgtactactgcgccagagaggactacgactaccactggtacttcgacgtgtggggccagggaaccaccgtgacagtttcttctacgcgtgagcagaaactgatctcggaagaggatctgaaaattgaagttatgtatcctcctccttacctagacaatgagaagagcaatggaaccattatccatgtgaaagggaaacacctttgtccaagtcccctatttcccggaccttctaagcccttttgggtgctggtggtggttgggggagtcctggcttgctatagcttgctagtaacagtggcctttattattttctgggtgaggagtaagaggagcaggctcctgcacagtgactacatgaacatgactccacgccgccccggacccacccgcaagcattaccagccctatgccccaccacgcgacttcgcagcctatcgctccagagtgaagttcagcaggagcgcagacgcccccgcgtaccagcagggccagaaccagctctataacgagctcaatctaggacgaagagaggagtacgatgttttggacaagagacgtggccgggaccctgagatggggggaaagccgagaaggaagaaccctcaggaaggcctgtacaatgaactgcagaaagataagatggcggaggcctacagtgagattgggatgaaaggcgagcgccggaggggcaaggggcacgatggcctttaccagggtctcagtacagccaccaaggacacctacgacgcccttcacatgcaggccctgccccctcgc

SEQ ID NO: 8792 - DNA, 1512 bp, Artificial Sequence
  Synthetic Polynucloetide
atggccttaccagtgaccgccttgctcctgccgctggccttgctgctccacgccgccaggccggacatccagctgacacagagcccttctagcctgtctgccagcgtgggcgacagagtgaccatcacctgtagcacaagcagcagcgtgtcctacatgcactggtatcagcagaagcccggcaaggcccctaagctgctgatctacagcaccagcaatctggcctctggcgtgcccagcagattttctggctctggcagcggcaccgacttcaccttcacaatatccagcctccagcctgaggacattgccacctactactgccaccagtggtctagctaccccacattcggccagggcaccaaggtggaaatcaaaggcggaggcggaagtggaggcggaggatctggcggcggaggctctggagtgcattctcaggttcagctgcaagagtctggccctggacttgtgcggcctagccaaacactgagcctgacctgtaccgtgtccggcttcacaatcagctccggctacagctggcactgggtccgacaaccacctggcagaggactggaatggatcggctacatccagtacagcggcatcaccaactacaaccccagcctgaagtcccgcgtgaccatgctggtggacacctccaagaaccagttcagcctgagactgagcagcgtgacagccgccgatacagccgtgtactactgcgccagagaggactacgactaccactggtacttcgacgtgtggggccagggaaccaccgtgacagtttcttctacgcgtgagcagaaactgatctcggaagaggatctggcgaagcccaccacgacgccagcgccgcgaccaccaacaccggcgcccaccatcgcgtcgcagcccctgtccctgcgcccagaggcgtgccggccagcggcggggggcgcagtgcacacgagggggctggacttcgcctgtgacatctacatctgggcgcccttggccgggacttgtggggtccttctcctgtcactggttatcaccctttactgcaaacggggcagaaagaaactcctgtatatattcaaacaaccatttatgagaccagtacaaactactcaagaggaagatggctgtagctgccgatttccagaagaagaagaaggaggatgtgaactgagagtgaagttcagcaggagcgcagacgcccccgcgtaccagcagggccagaaccagctctataacgagctgaatctaggacgaagagaggagtacgatgttttggacaagagacgtggccgggaccctgagatggggggaaagccgagaaggaagaaccctcaggaaggcctgtacaatgaactgcagaaagataagatggcggaggcctacagtgagattgggatgaaaggcgagcgccggaggggcaaggggcacgatggcctttaccagggtctcagtacagccaccaaggacacctacgacgcccttcacatgcaggccctgccccctcgctga

SEQ ID NO: 8793 - DNA, 1512 bp, Artificial Sequence
  Synthetic Polynucloetide
atggccttaccagtgaccgccttgctcctgccgctggccttgctgctccacgccgccaggccgggagtgcattctcaggttcagctgcaagagtctggccctggacttgtgcggcctagccaaacactgagcctgacctgtaccgtgtccggcttcacaatcagctccggctacagctggcactgggtccgacaaccacctggcagaggactggaatggatcggctacatccagtacagcggcatcaccaactacaaccccagcctgaagtcccgcgtgaccatgctggtggacacctccaagaaccagttcagcctgagactgagcagcgtgacagccgccgatacagccgtgtactactgcgccagagaggactacgactaccactggtacttcgacgtgtggggccagggaaccaccgtgacagtttcttctggcggaggcggaagtggaggcggaggatctggcggcggaggctctgacatccagctgacacagagcccttctagcctgtctgccagcgtgggcgacagagtgaccatcacctgtagcacaagcagcagcgtgtcctacatgcactggtatcagcagaagcccggcaaggcccctaagctgctgatctacagcaccagcaatctggcctctggcgtgcccagcagattttctggctctggcagcggcaccgacttcaccttcacaatatccagcctccagcctgaggacattgccacctactactgccaccagtggtctagctaccccacattcggccagggcaccaaggtggaaatcaaaacgcgtgagcagaaactgatctcggaagaggatctggcgaagcccaccacgacgccagcgccgcgaccaccaacaccggcgcccaccatcgcgtcgcagcccctgtccctgcgcccagaggcgtgccggccagcggcggggggcgcagtgcacacgagggggctggacttcgcctgtgacatctacatctgggcgcccttggccgggacttgtggggtccttctcctgtcactggttatcaccctttactgcaaacggggcagaaagaaactcctgtatatattcaaacaaccatttatgagaccagtacaaactactcaagaggaagatggctgtagctgccgatttccagaagaagaagaaggaggatgtgaactgagagtgaagttcagcaggagcgcagacgcccccgcgtaccagcagggccagaaccagctctataacgagctgaatctaggacgaagagaggagtacgatgttttggacaagagacgtggccgggaccctgagatggggggaaagccgagaaggaagaaccctcaggaaggcctgtacaatgaactgcagaaagataagatggcggaggcctacagtgagattgggatgaaaggcgagcgccggaggggcaaggggcacgatggcctttaccagggtctcagtacagccaccaaggacacctacgacgcccttcacatgcaggccctgccccctcgctga

SEQ ID NO: 8794 - DNA, 2751 bp, Artificial Sequence
  Synthetic Polynucloetide
atggccttaccagtgaccgccttgctcctgccgctggccttgctgctccacgccgccaggccggacatccagctgacacagagcccttctagcctgtctgccagcgtgggcgacagagtgaccatcacctgtagcacaagcagcagcgtgtcctacatgcactggtatcagcagaagcccggcaaggcccctaagctgctgatctacagcaccagcaatctggcctctggcgtgcccagcagattttctggctctggcagcggcaccgacttcaccttcacaatatccagcctccagcctgaggacattgccacctactactgccaccagtggtctagctaccccacattcggccagggcaccaaggtggaaatcaaaggcggaggcggaagtggaggcggaggatctggcggcggaggctctggagtgcattctcaggttcagctgcaagagtctggccctggacttgtgcggcctagccaaacactgagcctgacctgtaccgtgtccggcttcacaatcagctccggctacagctggcactgggtccgacaaccacctggcagaggactggaatggatcggctacatccagtacagcggcatcaccaactacaaccccagcctgaagtcccgcgtgaccatgctggtggacacctccaagaaccagttcagcctgagactgagcagcgtgacagccgccgatacagccgtgtactactgcgccagagaggactacgactaccactggtacttcgacgtgtggggccagggaaccaccgtgacagtttcttctacgcgtgagcagaaactgatctcggaagaggatctggcgaagcccaccacgacgccagcgccgcgaccaccaacaccggcgcccaccatcgcgtcgcagcccctgtccctgcgcccagaggcgtgccggccagcggcggggggcgcagtgcacacgagggggctggacttcgcctgtgacatctacatctgggcgcccttggccgggacttgtggggtccttctcctgtcactggttatcaccctttactgcgggcgcgccagagtgaagttcagcaggagcgcagacgcccccgcgtaccagcagggccagaaccagctctataacgagctgaatctaggacgaagagaggagtacgatgttttggacaagagacgtggccgggaccctgagatggggggaaagccgagaaggaagaaccctcaggaaggcctgtacaatgaactgcagaaagataagatggcggaggcctacagtgagattgggatgaaaggcgagcgccggaggggcaaggggcacgatggcctttaccagggtctcagtacagccaccaaggacacctacgacgcccttcacatgcaggccctgccccctcgctctagaggatctggagcaacaaacttctcactactcaaacaagcaggtgacgtggaggagaatcccgggcctgggatccacatggccacttacgaggttctctgtgaggtggcgcggaaactgggcacggatgacagggaagtggtattgttcctcctaaacgtgttcatacctcaacccacactggcccaattaattggagctcttagagctttaaaggaggagggcaggttaacgtttcccctgttagcggaatgtctgtttcgtgcaggtcgcagagacctcttgcgcgacctgcttcacttagacccgcgttttttagagcgccacctagcgggcacaatgagttatttcagcccttatcagctcactgttctccacgtagacggggagctgtgtgcgagggatattaggtctttgatatttttaagcaaggacactatagggtctcgcagcacaccacagacattcttacactgggtgtactgtatggaaaacttagacctactgggtcccactgacgtggatgccctaatgtcaatgcttagatctttgtcaagagtagacctacagcgccaagtgcaaaccctaatgggccttcacctttccggcccatcacactcccaacactatcgccatacaccactcgagaccgatttctacgactacaaggacgacgatgacaagactagtggctccggcgagggcagaggaagtctactaacctgcggagatgtggaagaaaatcctggcccacatatgaccgagtacaagcccacggtgcgcctcgccacccgcgacgacgtccccagggccgtacgcaccctcgccgccgcgttcgccgactaccccgccacgcgccacaccgtcgatccggaccgccacatcgagcgggtcaccgagctgcaagaactcttcctcacgcgcgtcgggctcgacatcggcaaggtgtgggtcgcggacgacggcgccgcggtggcggtctggaccacgccggagagcgtcgaagcgggggcggtgttcgccgagatcggcccgcgcatggccgagttgagcggttcccggctggccgcgcagcaacagatggaaggcctcctggcgccgcaccggcccaaggagcccgcgtggttcctggccaccgtcggcgtctcgcccgaccaccagggcaagggtctgggcagcgccgtcgtgctccccggagtggaggcggccgagcgcgccggggtgcccgccttcctggagacctccgcgccccgcaacctccccttctacgagcggctcggcttcaccgtcaccgccgacgtcgaggtgcccgaaggaccgcgcacctggtgcatgacccgcaagcccggtgcctga

SEQ ID NO: 8795 - DNA, 2571 bp, Artificial Sequence
  Synthetic Polynucloetide
atggccttaccagtgaccgccttgctcctgccgctggccttgctgctccacgccgccaggccggacatccagctgacacagagcccttctagcctgtctgccagcgtgggcgacagagtgaccatcacctgtagcacaagcagcagcgtgtcctacatgcactggtatcagcagaagcccggcaaggcccctaagctgctgatctacagcaccagcaatctggcctctggcgtgcccagcagattttctggctctggcagcggcaccgacttcaccttcacaatatccagcctccagcctgaggacattgccacctactactgccaccagtggtctagctaccccacattcggccagggcaccaaggtggaaatcaaactcgagatccagaaccctgatcctgccgtgtaccagctgcgggatagcaagagcagcgacaagagcgtgtgtctgttcaccgacttcgacagccagaccaacgtgtcccagagcaaggactccgacgtgtacatcaccgataagtgcgtgctggacatgcggagcatggacttcaagagcaactccgccgtggcctggtccaacaagtccgatttcgcctgcgccaacgccttcaacaacagcattatccccgaggacacattcttcccaagcagcgacgtgccctgcgacgtgaagctggtggaaaagagcttcgagacagacaccaacctgaacttccagaacctgagcgtgatcggcttcagaatcctgctgctgaaagtggccggctttaacctgctgatgaccctgcggctgtggtccagccgcgccaagagaagcggatctggcgtgaagcagaccctgaatttcgacctgctgaagctggctggcgacgtggaatccaacccaggccctactagtatggactggatttggcgcatccttttccttgtcggcgctgctaccggcgcgcattccttcgaaggagtgcattctcaggttcagctgcaagagtctggccctggacttgtgcggcctagccaaacactgagcctgacctgtaccgtgtccggcttcacaatcagctccggctacagctggcactgggtccgacaaccacctggcagaggactggaatggatcggctacatccagtacagcggcatcaccaactacaaccccagcctgaagtcccgcgtgaccatgctggtggacacctccaagaaccagttcagcctgagactgagcagcgtgacagccgccgatacagccgtgtactactgcgccagagaggactacgactaccactggtacttcgacgtgtggggccagggaaccaccgtgacagtttcttctacgcgtgaggacctgaagaacgtgttcccacctgaggtggccgtgttcgagcctagcaaggccgagatcgcccacacccagaaagccaccctcgtgtgcctggctaccggcttctaccccgaccatgtggaactgtcttggtgggtcaacggcaaagaggtgcacagcggcgtgtgtaccgacccccagccactgaaagaacagcccgccctgaacgacagccggtactgcctgagcagcagactgagagtgtccgccaccttctggcagaacccccggaaccacttcagatgccaggtgcagttctacggcctgagcgagaacgacgagtggacccaggacagagccaagcccgtgacccagatcgtgtctgccgaagcctggggcagagccgattgcggcatcaccagcgccagctaccaccagggcgtgctgagcgccaccatcctgtacgagatcctgctgggcaaggccaccctgtacgccgtgctggtgtctgccctggtgctgatggctatggtcaagcggaaggacagccggggaagggccaagcgatctggatctggagcaacaaacttctcactactcaaacaagcaggtgacgtggaggagaatcccgggccttctagaggccatatgaccgagtacaagcccacggtgcgcctcgccacccgcgacgacgtccccagggccgtacgcaccctcgccgccgcgttcgccgactaccccgccacgcgccacaccgtcgatccggaccgccacatcgagcgggtcaccgagctgcaagaactcttcctcacgcgcgtcgggctcgacatcggcaaggtgtgggtcgcggacgacggcgccgcggtggcggtctggaccacgccggagagcgtcgaagcgggggcggtgttcgccgagatcggcccgcgcatggccgagttgagcggttcccggctggccgcgcagcaacagatggaaggcctcctggcgccgcaccggcccaaggagcccgcgtggttcctggccaccgtcggcgtctcgcccgaccaccagggcaagggtctgggcagcgccgtcgtgctccccggagtggaggcggccgagcgcgccggggtgcccgccttcctggagacctccgcgccccgcaacctccccttctacgagcggctcggcttcaccgtcaccgccgacgtcgaggtgcccgaaggaccgcgcacctggtgcatgacccgcaagcccggtgcctga

SEQ ID NO: 8796 - DNA, 2568 bp, Artificial Sequence
  Synthetic Polynucloetide
atggccttaccagtgaccgccttgctcctgccgctggccttgctgctccacgccgccaggccggacatccagctgacacagagcccttctagcctgtctgccagcgtgggcgacagagtgaccatcacctgtagcacaagcagcagcgtgtcctacatgcactggtatcagcagaagcccggcaaggcccctaagctgctgatctacagcaccagcaatctggcctctggcgtgcccagcagattttctggctctggcagcggcaccgacttcaccttcacaatatccagcctccagcctgaggacattgccacctactactgccaccagtggtctagctaccccacattcggccagggcaccaaggtggaaatcaaactcgaggacctgaagaacgtgttcccacctgaggtggccgtgttcgagcctagcaaggccgagatcgcccacacccagaaagccaccctcgtgtgcctggctaccggcttctaccccgaccatgtggaactgtcttggtgggtcaacggcaaagaggtgcacagcggcgtgtgtaccgacccccagccactgaaagaacagcccgccctgaacgacagccggtactgcctgagcagcagactgagagtgtccgccaccttctggcagaacccccggaaccacttcagatgccaggtgcagttctacggcctgagcgagaacgacgagtggacccaggacagagccaagcccgtgacccagatcgtgtctgccgaagcctggggcagagccgattgcggcatcaccagcgccagctaccaccagggcgtgctgagcgccaccatcctgtacgagatcctgctgggcaaggccaccctgtacgccgtgctggtgtctgccctggtgctgatggctatggtcaagcggaaggacagccggggaagggccaagcgatctggatctggagcaacaaacttctcactactcaaacaagcaggtgacgtggaggagaatcccgggcctactagtatggactggatttggcgcatccttttccttgtcggcgctgctaccggcgcgcattccttcgaaggagtgcattctcaggttcagctgcaagagtctggccctggacttgtgcggcctagccaaacactgagcctgacctgtaccgtgtccggcttcacaatcagctccggctacagctggcactgggtccgacaaccacctggcagaggactggaatggatcggctacatccagtacagcggcatcaccaactacaaccccagcctgaagtcccgcgtgaccatgctggtggacacctccaagaaccagttcagcctgagactgagcagcgtgacagccgccgatacagccgtgtactactgcgccagagaggactacgactaccactggtacttcgacgtgtggggccagggaaccaccgtgacagtttcttctacgcgtatccagaaccctgatcctgccgtgtaccagctgcgggatagcaagagcagcgacaagagcgtgtgtctgttcaccgacttcgacagccagaccaacgtgtcccagagcaaggactccgacgtgtacatcaccgataagtgcgtgctggacatgcggagcatggacttcaagagcaactccgccgtggcctggtccaacaagtccgatttcgcctgcgccaacgccttcaacaacagcattatccccgaggacacattcttcccaagcagcgacgtgccctgcgacgtgaagctggtggaaaagagcttcgagacagacaccaacctgaacttccagaacctgagcgtgatcggcttcagaatcctgctgctgaaagtggccggctttaacctgctgatgaccctgcggctgtggtccagccgcgccaagagaagcggatctggcgtgaagcagaccctgaatttcgacctgctgaagctggctggcgacgtggaatccaacccaggcccttctagaggccatatgaccgagtacaagcccacggtgcgcctcgccacccgcgacgacgtccccagggccgtacgcaccctcgccgccgcgttcgccgactaccccgccacgcgccacaccgtcgatccggaccgccacatcgagcgggtcaccgagctgcaagaactcttcctcacgcgcgtcgggctcgacatcggcaaggtgtgggtcgcggacgacggcgccgcggtggcggtctggaccacgccggagagcgtcgaagcgggggcggtgttcgccgagatcggcccgcgcatggccgagttgagcggttcccggctggccgcgcagcaacagatggaaggcctcctggcgccgcaccggcccaaggagcccgcgtggttcctggccaccgtcggcgtctcgcccgaccaccagggcaagggtctgggcagcgccgtcgtgctccccggagtggaggcggccgagcgcgccggggtgcccgccttcctggagacctccgcgccccgcaacctccccttctacgagcggctcggcttcaccgtcaccgccgacgtcgaggtgcccgaaggaccgcgcacctggtgcatgacccgcaagcccggtgcctga

SEQ ID NO: 8797 - DNA, 1866 bp, Artificial Sequence
  Synthetic Polynucloetide
atggccttaccagtgaccgccttgctcctgccgctggccttgctgctccacgccgccaggccggacatccagctgacacagagcccttctagcctgtctgccagcgtgggcgacagagtgaccatcacctgtagcacaagcagcagcgtgtcctacatgcactggtatcagcagaagcccggcaaggcccctaagctgctgatctacagcaccagcaatctggcctctggcgtgcccagcagattttctggctctggcagcggcaccgacttcaccttcacaatatccagcctccagcctgaggacattgccacctactactgccaccagtggtctagctaccccacattcggccagggcaccaaggtggaaatcaaactcgaggacctgaagaacgtgttcccacctgaggtggccgtgttcgagcctagcgaggccgagatcagccacacccagaaagccaccctcgtgtgcctggctaccggcttctaccccgaccatgtggaactgtcttggtgggtcaacggcaaagaggtgcacagcggcgtgtgtaccgacccccagccactgaaagaacagcccgccctgaacgacagccggtactgcctgagcagcagactgagagtgtccgccaccttctggcagaacccccggaaccacttcagatgccaggtgcagttctacggcctgagcgagaacgacgagtggacccaggacagagccaagcccgtgacccagatcgtgtctgccgaagcctggggcagagccgattgcggctttaccagcgagagctaccagcagggcgtgctgagcgccaccatcctgtacgagatcctgctgggcaaggccaccctgtacgccgtgctggtgtctgccctggtgctgatggctatggtcaagcggaaggacagccggggaagggccaagcgatctggatctggagcaacaaacttctcactactcaaacaagcaggtgacgtggaggagaatcccgggcctactagtatggactggatttggcgcatccttttccttgtcggcgctgctaccggcgcgcattccttcgaaggagtgcattctcaggttcagctgcaagagtctggccctggacttgtgcggcctagccaaacactgagcctgacctgtaccgtgtccggcttcacaatcagctccggctacagctggcactgggtccgacaaccacctggcagaggactggaatggatcggctacatccagtacagcggcatcaccaactacaaccccagcctgaagtcccgcgtgaccatgctggtggacacctccaagaaccagttcagcctgagactgagcagcgtgacagccgccgatacagccgtgtactactgcgccagagaggactacgactaccactggtacttcgacgtgtggggccagggaaccaccgtgacagtttcttctacgcgtatccagaaccctgatcctgccgtgtaccagctgcgggatagcaagagcagcgacaagagcgtgtgtctgttcaccgacttcgacagccagaccaacgtgtcccagagcaaggactccgacgtgtacatcaccgataagtgcgtgctggacatgcggagcatggacttcaagagcaactccgccgtggcctggtccaacaagtccgatttcgcctgcgccaacgccttcaacaacagcattatccccgaggacacattcttcccaagccccgagagcagctgcgacgtgaagctggtggaaaagagcttcgagacagacaccaacctgaacttccagaacctgagcgtgatcggcttcagaatcctgctgctgaaagtggccggctttaacctgctgatgaccctgcggctgtggtccagc

SEQ ID NO: 8798 - DNA, 2541 bp, Artificial Sequence
  Synthetic Polynucloetide
atggccttaccagtgaccgccttgctcctgccgctggccttgctgctccacgccgccaggccggacatccagctgacacagagcccttctagcctgtctgccagcgtgggcgacagagtgaccatcacctgtagcacaagcagcagcgtgtcctacatgcactggtatcagcagaagcccggcaaggcccctaagctgctgatctacagcaccagcaatctggcctctggcgtgcccagcagattttctggctctggcagcggcaccgacttcaccttcacaatatccagcctccagcctgaggacattgccacctactactgccaccagtggtctagctaccccacattcggccagggcaccaaggtggaaatcaaactcgaggacctgaagaacgtgttcccacctgaggtggccgtgttcgagcctagcgaggccgagatcagccacacccagaaagccaccctcgtgtgcctggctaccggcttctaccccgaccatgtggaactgtcttggtgggtcaacggcaaagaggtgcacagcggcgtgtgtaccgacccccagccactgaaagaacagcccgccctgaacgacagccggtactgcctgagcagcagactgagagtgtccgccaccttctggcagaacccccggaaccacttcagatgccaggtgcagttctacggcctgagcgagaacgacgagtggacccaggacagagccaagcccgtgacccagatcgtgtctgccgaagcctggggcagagccgattgcggctttaccagcgagagctaccagcagggcgtgctgagcgccaccatcctgtacgagatcctgctgggcaaggccaccctgtacgccgtgctggtgtctgccctggtgctgatggctatggtcaagcggaaggacagccggggaagggccaagcgatctggatctggagcaacaaacttctcactactcaaacaagcaggtgacgtggaggagaatcccgggcctactagtatggactggatttggcgcatccttttccttgtcggcgctgctaccggcgcgcattccttcgaaggagtgcattctcaggttcagctgcaagagtctggccctggacttgtgcggcctagccaaacactgagcctgacctgtaccgtgtccggcttcacaatcagctccggctacagctggcactgggtccgacaaccacctggcagaggactggaatggatcggctacatccagtacagcggcatcaccaactacaaccccagcctgaagtcccgcgtgaccatgctggtggacacctccaagaaccagttcagcctgagactgagcagcgtgacagccgccgatacagccgtgtactactgcgccagagaggactacgactaccactggtacttcgacgtgtggggccagggaaccaccgtgacagtttcttctacgcgtatccagaaccctgatcctgccgtgtaccagctgcgggatagcaagagcagcgacaagagcgtgtgtctgttcaccgacttcgacagccagaccaacgtgtcccagagcaaggactccgacgtgtacatcaccgataagtgcgtgctggacatgcggagcatggacttcaagagcaactccgccgtggcctggtccaacaagtccgatttcgcctgcgccaacgccttcaacaacagcattatccccgaggacacattcttcccaagccccgagagcagctgcgacgtgaagctggtggaaaagagcttcgagacagacaccaacctgaacttccagaacctgagcgtgatcggcttcagaatcctgctgctgaaagtggccggctttaacctgctgatgaccctgcggctgtggtccagccgcgccaagagaagcggatctggcgtgaagcagaccctgaatttcgacctgctgaagctggctggcgacgtggaatccaacccaggcccttctagaggcgggatccacaccatggctacctacgaggtgctgtgcgaggtggcaagaaagctgggcaccgacgacagagaagtggtgctgttcctgctgaacgtgttcatccctcagcctacactggcccagctgatcggtgcactgagagccctgaaagaggaaggccggctgacctttcctctgctggccgaatgcctgttcagagccggaagaagggatctgctgcgggacctgctgcatctggaccccagatttctggaaagacacctggccggcaccatgagctacttcagcccttaccagctgaccgtgctgcacgttgacggcgaactgtgcgccagagatattcggagcctgatcttcctgagcaaggacaccatcggcagccggtctacccctcagacatttctgcactgggtgtactgcatggaaaacctggacctgctcggccccacagatgtggatgccctgatgtccatgctgagaagcctgagcagagtggacctccagagacaggtgcagacactgatgggactgcacctgagcggacctagccacagccagcactacagacacacccct

SEQ ID NO: 8799 - DNA, 1878 bp, Artificial Sequence
  Synthetic Polynucloetide
atggccttaccagtgaccgccttgctcctgccgctggccttgctgctccacgccgccaggccggacatccagctgacacagagcccttctagcctgtctgccagcgtgggcgacagagtgaccatcacctgtagcacaagcagcagcgtgtcctacatgcactggtatcagcagaagcccggcaaggcccctaagctgctgatctacagcaccagcaatctggcctctggcgtgcccagcagattttctggctctggcagcggcaccgacttcaccttcacaatatccagcctccagcctgaggacattgccacctactactgccaccagtggtctagctaccccacattcggccagggcaccaaggtggaaatcaaactcgagatccagaaccctgatcctgccgtgtaccagctgcgggatagcaagagcagcgacaagagcgtgtgtctgttcaccgacttcgacagccagaccaacgtgtcccagagcaaggactccgacgtgtacatcaccgataagtgcgtgctggacatgcggagcatggacttcaagagcaactccgccgtggcctggtccaacaagtccgatttcgcctgcgccaacgccttcaacaacagcattatccccgaggacacattcttcccaagccccgagagcagctgcgacgtgaagctggtggaaaagagcttcgagacagacaccaacctgaacttccagaacctgagcgtgatcggcttcagaatcctgctgctgaaagtggccggctttaacctgctgatgaccctgcggctgtggtccagccgcgccaagagaagcggatctggcgtgaagcagaccctgaatttcgacctgctgaagctggctggcgacgtggaatccaacccaggccctactagtatggactggatttggcgcatccttttccttgtcggcgctgctaccggcgcgcattccttcgaaggagtgcattctcaggttcagctgcaagagtctggccctggacttgtgcggcctagccaaacactgagcctgacctgtaccgtgtccggcttcacaatcagctccggctacagctggcactgggtccgacaaccacctggcagaggactggaatggatcggctacatccagtacagcggcatcaccaactacaaccccagcctgaagtcccgcgtgaccatgctggtggacacctccaagaaccagttcagcctgagactgagcagcgtgacagccgccgatacagccgtgtactactgcgccagagaggactacgactaccactggtacttcgacgtgtggggccagggaaccaccgtgacagtttcttctacgcgtgaggacctgaagaacgtgttcccacctgaggtggccgtgttcgagcctagcgaggccgagatcagccacacccagaaagccaccctcgtgtgcctggctaccggcttctaccccgaccatgtggaactgtcttggtgggtcaacggcaaagaggtgcacagcggcgtgtgtaccgacccccagccactgaaagaacagcccgccctgaacgacagccggtactgcctgagcagcagactgagagtgtccgccaccttctggcagaacccccggaaccacttcagatgccaggtgcagttctacggcctgagcgagaacgacgagtggacccaggacagagccaagcccgtgacccagatcgtgtctgccgaagcctggggcagagccgattgcggctttaccagcgagagctaccagcagggcgtgctgagcgccaccatcctgtacgagatcctgctgggcaaggccaccctgtacgccgtgctggtgtctgccctggtgctgatggctatggtcaagcggaaggacagccgggga

SEQ ID NO: 8800 - DNA, 2544 bp, Artificial Sequence
  Synthetic Polynucloetide
atggccttaccagtgaccgccttgctcctgccgctggccttgctgctccacgccgccaggccggacatccagctgacacagagcccttctagcctgtctgccagcgtgggcgacagagtgaccatcacctgtagcacaagcagcagcgtgtcctacatgcactggtatcagcagaagcccggcaaggcccctaagctgctgatctacagcaccagcaatctggcctctggcgtgcccagcagattttctggctctggcagcggcaccgacttcaccttcacaatatccagcctccagcctgaggacattgccacctactactgccaccagtggtctagctaccccacattcggccagggcaccaaggtggaaatcaaactcgagatccagaaccctgatcctgccgtgtaccagctgcgggatagcaagagcagcgacaagagcgtgtgtctgttcaccgacttcgacagccagaccaacgtgtcccagagcaaggactccgacgtgtacatcaccgataagtgcgtgctggacatgcggagcatggacttcaagagcaactccgccgtggcctggtccaacaagtccgatttcgcctgcgccaacgccttcaacaacagcattatccccgaggacacattcttcccaagccccgagagcagctgcgacgtgaagctggtggaaaagagcttcgagacagacaccaacctgaacttccagaacctgagcgtgatcggcttcagaatcctgctgctgaaagtggccggctttaacctgctgatgaccctgcggctgtggtccagccgcgccaagagaagcggatctggcgtgaagcagaccctgaatttcgacctgctgaagctggctggcgacgtggaatccaacccaggccctactagtatggactggatttggcgcatccttttccttgtcggcgctgctaccggcgcgcattccttcgaaggagtgcattctcaggttcagctgcaagagtctggccctggacttgtgcggcctagccaaacactgagcctgacctgtaccgtgtccggcttcacaatcagctccggctacagctggcactgggtccgacaaccacctggcagaggactggaatggatcggctacatccagtacagcggcatcaccaactacaaccccagcctgaagtcccgcgtgaccatgctggtggacacctccaagaaccagttcagcctgagactgagcagcgtgacagccgccgatacagccgtgtactactgcgccagagaggactacgactaccactggtacttcgacgtgtggggccagggaaccaccgtgacagtttcttctacgcgtgaggacctgaagaacgtgttcccacctgaggtggccgtgttcgagcctagcgaggccgagatcagccacacccagaaagccaccctcgtgtgcctggctaccggcttctaccccgaccatgtggaactgtcttggtgggtcaacggcaaagaggtgcacagcggcgtgtgtaccgacccccagccactgaaagaacagcccgccctgaacgacagccggtactgcctgagcagcagactgagagtgtccgccaccttctggcagaacccccggaaccacttcagatgccaggtgcagttctacggcctgagcgagaacgacgagtggacccaggacagagccaagcccgtgacccagatcgtgtctgccgaagcctggggcagagccgattgcggctttaccagcgagagctaccagcagggcgtgctgagcgccaccatcctgtacgagatcctgctgggcaaggccaccctgtacgccgtgctggtgtctgccctggtgctgatggctatggtcaagcggaaggacagccggggaagggccaagcgatctggatctggagcaacaaacttctcactactcaaacaagcaggtgacgtggaggagaatcccgggccttctagaggcgggatccacaccatggctacctacgaggtgctgtgcgaggtggcaagaaagctgggcaccgacgacagagaagtggtgctgttcctgctgaacgtgttcatccctcagcctacactggcccagctgatcggtgcactgagagccctgaaagaggaaggccggctgacctttcctctgctggccgaatgcctgttcagagccggaagaagggatctgctgcgggacctgctgcatctggaccccagatttctggaaagacacctggccggcaccatgagctacttcagcccttaccagctgaccgtgctgcacgttgacggcgaactgtgcgccagagatattcggagcctgatcttcctgagcaaggacaccatcggcagccggtctacccctcagacatttctgcactgggtgtactgcatggaaaacctggacctgctcggccccacagatgtggatgccctgatgtccatgctgagaagcctgagcagagtggacctccagagacaggtgcagacactgatgggactgcacctgagcggacctagccacagccagcactacagacacacccct

SEQ ID NO: 8801 - DNA, 2703 bp, Artificial Sequence
  Synthetic Polynucloetide
atggccttaccagtgaccgccttgctcctgccgctggccttgctgctccacgccgccaggccgctcgaggggaaaccaattcccaaccctcttctgggactggattcaaccggcagcggcgaggacctgaagaacgtgttcccacctgaggtggccgtgttcgagcctagcaaggccgagatcgcccacacccagaaagccaccctcgtgtgcctggctaccggcttctaccccgaccatgtggaactgtcttggtgggtcaacggcaaagaggtgcacagcggcgtgtgtaccgacccccagccactgaaagaacagcccgccctgaacgacagccggtactgcctgagcagcagactgagagtgtccgccaccttctggcagaacccccggaaccacttcagatgccaggtgcagttctacggcctgagcgagaacgacgagtggacccaggacagagccaagcccgtgacccagatcgtgtctgccgaagcctggggcagagccgattgcggcatcaccagcgccagctaccaccagggcgtgctgagcgccaccatcctgtacgagatcctgctgggcaaggccaccctgtacgccgtgctggtgtctgccctggtgctgatggctatggtcaagcggaaggacagccggggaagggccaagcgatctggatctggagcaacaaacttctcactactcaaacaagcaggtgacgtggaggagaatcccgggcctactagcatggccttaccagtgaccgccttgctcctgccgctggccttgctgctccacgccgccaggccggacatccagctgacacagagcccttctagcctgtctgccagcgtgggcgacagagtgaccatcacctgtagcacaagcagcagcgtgtcctacatgcactggtatcagcagaagcccggcaaggcccctaagctgctgatctacagcaccagcaatctggcctctggcgtgcccagcagattttctggctctggcagcggcaccgacttcaccttcacaatatccagcctccagcctgaggacattgccacctactactgccaccagtggtctagctaccccacattcggccagggcaccaaggtggaaatcaaaggcggaggcggaagtggaggcggaggatctggcggcggaggctctggagtgcattctcaggttcagctgcaagagtctggccctggacttgtgcggcctagccaaacactgagcctgacctgtaccgtgtccggcttcacaatcagctccggctacagctggcactgggtccgacaaccacctggcagaggactggaatggatcggctacatccagtacagcggcatcaccaactacaaccccagcctgaagtcccgcgtgaccatgctggtggacacctccaagaaccagttcagcctgagactgagcagcgtgacagccgccgatacagccgtgtactactgcgccagagaggactacgactaccactggtacttcgacgtgtggggccagggaaccaccgtgacagtttcttctacgcgtgagcagaaactgatctcggaagaggatgggagcggcatccagaaccctgatcctgccgtgtaccagctgcgggatagcaagagcagcgacaagagcgtgtgtctgttcaccgacttcgacagccagaccaacgtgtcccagagcaaggactccgacgtgtacatcaccgataagtgcgtgctggacatgcggagcatggacttcaagagcaactccgccgtggcctggtccaacaagtccgatttcgcctgcgccaacgccttcaacaacagcattatccccgaggacacattcttcccaagcagcgacgtgccctgcgacgtgaagctggtggaaaagagcttcgagacagacaccaacctgaacttccagaacctgagcgtgatcggcttcagaatcctgctgctgaaagtggccggctttaacctgctgatgaccctgcggctgtggtccagccgcgccaagagaagcggatctggcgtgaagcagaccctgaatttcgacctgctgaagctggctggcgacgtggaatccaacccaggcccttctagaggccatatgaccgagtacaagcccacggtgcgcctcgccacccgcgacgacgtccccagggccgtacgcaccctcgccgccgcgttcgccgactaccccgccacgcgccacaccgtcgatccggaccgccacatcgagcgggtcaccgagctgcaagaactcttcctcacgcgcgtcgggctcgacatcggcaaggtgtgggtcgcggacgacggcgccgcggtggcggtctggaccacgccggagagcgtcgaagcgggggcggtgttcgccgagatcggcccgcgcatggccgagttgagcggttcccggctggccgcgcagcaacagatggaaggcctcctggcgccgcaccggcccaaggagcccgcgtggttcctggccaccgtcggcgtctcgcccgaccaccagggcaagggtctgggcagcgccgtcgtgctccccggagtggaggcggccgagcgcgccggggtgcccgccttcctggagacctccgcgccccgcaacctccccttctacgagcggctcggcttcaccgtcaccgccgacgtcgaggtgcccgaaggaccgcgcacctggtgcatgacccgcaagcccggtgcctga

SEQ ID NO: 8802 - DNA, 2706 bp, Artificial Sequence
  Synthetic Polynucloetide
atggccttaccagtgaccgccttgctcctgccgctggccttgctgctccacgccgccaggccgctcgagcagaaactgatctcggaagaggatctgggctccggcgatcgccctgatcctgccgtgtaccagctgcgggatagcaagagcagcgacaagagcgtgtgtctgttcaccgacttcgacagccagaccaacgtgtcccagagcaaggactccgacgtgtacatcaccgataagtgcgtgctggacatgcggagcatggacttcaagagcaactccgccgtggcctggtccaacaagtccgatttcgcctgcgccaacgccttcaacaacagcattatccccgaggacacattcttcccaagccccgagagcagctgcgacgtgaagctggtggaaaagagcttcgagacagacaccaacctgaacttccagaacctgagcgtgatcggcttcagaatcctgctgctgaaagtggccggctttaacctgctgatgaccctgcggctgtggtccagctctagtcgcgccaagagaagcggatctggcgtgaagcagaccctgaatttcgacctgctgaagctggctggcgacgtggaatccaacccaggccccactagcatggccttaccagtgaccgccttgctcctgccgctggccttgctgctccacgccgccaggccggacatccagctgacacagagcccttctagcctgtctgccagcgtgggcgacagagtgaccatcacctgtagcacaagcagcagcgtgtcctacatgcactggtatcagcagaagcccggcaaggcccctaagctgctgatctacagcaccagcaatctggcctctggcgtgcccagcagattttctggctctggcagcggcaccgacttcaccttcacaatatccagcctccagcctgaggacattgccacctactactgccaccagtggtctagctaccccacattcggccagggcaccaaggtggaaatcaaaggcggaggcggaagtggaggcggaggatctggcggcggaggctctggagtgcattctcaggttcagctgcaagagtctggccctggacttgtgcggcctagccaaacactgagcctgacctgtaccgtgtccggcttcacaatcagctccggctacagctggcactgggtccgacaaccacctggcagaggactggaatggatcggctacatccagtacagcggcatcaccaactacaaccccagcctgaagtcccgcgtgaccatgctggtggacacctccaagaaccagttcagcctgagactgagcagcgtgacagccgccgatacagccgtgtactactgcgccagagaggactacgactaccactggtacttcgacgtgtggggccagggaaccaccgtgacagtttcttctacgcgtgggaaaccaattcccaaccctcttctgggactggattcaaccggcagcggcgaggacctgaagaacgtgttcccacctgaggtggccgtgttcgagcctagcgaggccgagatcagccacacccagaaagccaccctcgtgtgcctggctaccggcttctaccccgaccatgtggaactgtcttggtgggtcaacggcaaagaggtgcacagcggcgtgtgtaccgacccccagccactgaaagaacagcccgccctgaacgacagccggtactgcctgagcagcagactgagagtgtccgccaccttctggcagaacccccggaaccacttcagatgccaggtgcagttctacggcctgagcgagaacgacgagtggacccaggacagagccaagcccgtgacccagatcgtgtctgccgaagcctggggcagagccgattgcggctttaccagcgagagctaccagcagggcgtgctgagcgccaccatcctgtacgagatcctgctgggcaaggccaccctgtacgccgtgctggtgtctgccctggtgctgatggctatggtcaagcggaaggacagccggggaagggccaagcgatctggatctggagcaacaaacttctcactactcaaacaagcaggtgacgtggaggagaatcccgggccttctagaggccatatgaccgagtacaagcccacggtgcgcctcgccacccgcgacgacgtccccagggccgtacgcaccctcgccgccgcgttcgccgactaccccgccacgcgccacaccgtcgatccggaccgccacatcgagcgggtcaccgagctgcaagaactcttcctcacgcgcgtcgggctcgacatcggcaaggtgtgggtcgcggacgacggcgccgcggtggcggtctggaccacgccggagagcgtcgaagcgggggcggtgttcgccgagatcggcccgcgcatggccgagttgagcggttcccggctggccgcgcagcaacagatggaaggcctcctggcgccgcaccggcccaaggagcccgcgtggttcctggccaccgtcggcgtctcgcccgaccaccagggcaagggtctgggcagcgccgtcgtgctccccggagtggaggcggccgagcgcgccggggtgcccgccttcctggagacctccgcgccccgcaacctccccttctacgagcggctcggcttcaccgtcaccgccgacgtcgaggtgcccgaaggaccgcgcacctggtgcatgacccgcaagcccggtgcctga

SEQ ID NO: 8803 - DNA, 2568 bp, Artificial Sequence
  Synthetic Polynucloetide
atggccttaccagtgaccgccttgctcctgccgctggccttgctgctccacgccgccaggccggacatccagctgacacagagcccttctagcctgtctgccagcgtgggcgacagagtgaccatcacctgtagcacaagcagcagcgtgtcctacatgcactggtatcagcagaagcccggcaaggcccctaagctgctgatctacagcaccagcaatctggcctctggcgtgcccagcagattttctggctctggcagcggcaccgacttcaccttcacaatatccagcctccagcctgaggacattgccacctactactgccaccagtggtctagctaccccacattcggccagggcaccaaggtggaaatcaaactcgaggacctgaagaacgtgttcccacctgaggtggccgtgttcgagcctagcgaggccgagatcagccacacccagaaagccaccctcgtgtgcctggctaccggcttctaccccgaccatgtggaactgtcttggtgggtcaacggcaaagaggtgcacagcggcgtgtctaccgacccccagccactgaaagaacagcccgccctgaacgacagccggtactgcctgagcagcagactgagagtgtccgccaccttctggcagaacccccggaaccacttcagatgccaggtgcagttctacggcctgagcgagaacgacgagtggacccaggacagagccaagcccgtgacccagatcgtgtctgccgaagcctggggcagagccgattgcggctttaccagcgagagctaccagcagggcgtgctgagcgccaccatcctgtacgagatcctgctgggcaaggccaccctgtacgccgtgctggtgtctgccctggtgctgatggctatggtcaagcggaaggacagccggggaagggccaagcgatctggatctggagcaacaaacttctcactactcaaacaagcaggtgacgtggaggagaatcccgggcctactagtatggactggatttggcgcatccttttccttgtcggcgctgctaccggcgcgcattccttcgaaggagtgcattctcaggttcagctgcaagagtctggccctggacttgtgcggcctagccaaacactgagcctgacctgtaccgtgtccggcttcacaatcagctccggctacagctggcactgggtccgacaaccacctggcagaggactggaatggatcggctacatccagtacagcggcatcaccaactacaaccccagcctgaagtcccgcgtgaccatgctggtggacacctccaagaaccagttcagcctgagactgagcagcgtgacagccgccgatacagccgtgtactactgcgccagagaggactacgactaccactggtacttcgacgtgtggggccagggaaccaccgtgacagtttcttctacgcgtatccagaaccctgatcctgccgtgtaccagctgcgggatagcaagagcagcgacaagagcgtgtgtctgttcaccgacttcgacagccagaccaacgtgtcccagagcaaggactccgacgtgtacatcaccgataagaccgtgctggacatgcggagcatggacttcaagagcaactccgccgtggcctggtccaacaagtccgatttcgcctgcgccaacgccttcaacaacagcattatccccgaggacacattcttcccaagccccgagagcagctgcgacgtgaagctggtggaaaagagcttcgagacagacaccaacctgaacttccagaacctgagcgtgatcggcttcagaatcctgctgctgaaagtggccggctttaacctgctgatgaccctgcggctgtggtccagccgcgccaagagaagcggatctggcgtgaagcagaccctgaatttcgacctgctgaagctggctggcgacgtggaatccaacccaggcccttctagaggccatatgaccgagtacaagcccacggtgcgcctcgccacccgcgacgacgtccccagggccgtacgcaccctcgccgccgcgttcgccgactaccccgccacgcgccacaccgtcgatccggaccgccacatcgagcgggtcaccgagctgcaagaactcttcctcacgcgcgtcgggctcgacatcggcaaggtgtgggtcgcggacgacggcgccgcggtggcggtctggaccacgccggagagcgtcgaagcgggggcggtgttcgccgagatcggcccgcgcatggccgagttgagcggttcccggctggccgcgcagcaacagatggaaggcctcctggcgccgcaccggcccaaggagcccgcgtggttcctggccaccgtcggcgtctcgcccgaccaccagggcaagggtctgggcagcgccgtcgtgctccccggagtggaggcggccgagcgcgccggggtgcccgccttcctggagacctccgcgccccgcaacctccccttctacgagcggctcggcttcaccgtcaccgccgacgtcgaggtgcccgaaggaccgcgcacctggtgcatgacccgcaagcccggtgcctga

SEQ ID NO: 8804 - DNA, 2814 bp, Artificial Sequence
  Synthetic Polynucloetide
atggccttaccagtgaccgccttgctcctgccgctggccttgctgctccacgccgccaggccggacatccagctgacacagagcccttctagcctgtctgccagcgtgggcgacagagtgaccatcacctgtagcacaagcagcagcgtgtcctacatgcactggtatcagcagaagcccggcaaggcccctaagctgctgatctacagcaccagcaatctggcctctggcgtgcccagcagattttctggctctggcagcggcaccgacttcaccttcacaatatccagcctccagcctgaggacattgccacctactactgccaccagtggtctagctaccccacattcggccagggcaccaaggtggaaatcaaactcgaggacctgaagaacgtgttcccacctgaggtggccgtgttcgagcctagcgaggccgagatcagccacacccagaaagccaccctcgtgtgcctggctaccggcttctaccccgaccatgtggaactgtcttggtgggtcaacggcaaagaggtgcacagcggcgtgtctaccgacccccagccactgaaagaacagcccgccctgaacgacagccggtactgcctgagcagcagactgagagtgtccgccaccttctggcagaacccccggaaccacttcagatgccaggtgcagttctacggcctgagcgagaacgacgagtggacccaggacagagccaagcccgtgacccagatcgtgtctgccgaagcctggggcagagccgattgcggctttaccagcgagagctaccagcagggcgtgctgagcgccaccatcctgtacgagatcctgctgggcaaggccaccctgtacgccgtgctggtgtctgccctggtgctgatggctatggtcaagcggaaggacagccggggaagggccaagcgatctggatctggagcaacaaacttctcactactcaaacaagcaggtgacgtggaggagaatcccgggcctactagtatggactggatttggcgcatccttttccttgtcggcgctgctaccggcgcgcattccttcgaaggagtgcattctcaggttcagctgcaagagtctggccctggacttgtgcggcctagccaaacactgagcctgacctgtaccgtgtccggcttcacaatcagctccggctacagctggcactgggtccgacaaccacctggcagaggactggaatggatcggctacatccagtacagcggcatcaccaactacaaccccagcctgaagtcccgcgtgaccatgctggtggacacctccaagaaccagttcagcctgagactgagcagcgtgacagccgccgatacagccgtgtactactgcgccagagaggactacgactaccactggtacttcgacgtgtggggccagggaaccaccgtgacagtttcttctacgcgtgagcagaaactgatctcggaagaggatgggagcggcaccccattcccttctctggcccctcccatcatgctgctggtggacggcaagcagcagatggtggtcgtgtgcctggtgctggatgtggccccacctggactggacagccccatctggtttagcgccggcaatggctctgccctggacgcctttacctacggcccaagccctgccaccgatggcacctggacaaatctggcccacctgagcctgcccagcgaggaactggcttcttgggagcctctcgtgtgccacacaggacctggcgctgagggacacagcagatccacccagcctatgcacctgtctggcgaggccagcaccgccagaacctgtcctcaggaacctctgagaggcacccctggcggagcactgtggctgggagtgctgagactgctgctgttcaagctgctgctgtttgacctgctgctgacctgctcctgtctgtgcgatcctgccggccctctgccttctcctgccaccaccacaagactgagagccctgggcagccacagactgcaccctgccacagagacaggcggcagagaggccacaagcagccctagaccccagcccagagacagaagatggggcgataccccccctggcagaaagcctggatctccagtccgcgccaagagaagcggatctggcgtgaagcagaccctgaatttcgacctgctgaagctggctggcgacgtggaatccaacccaggcccttctagaggccatatgaccgagtacaagcccacggtgcgcctcgccacccgcgacgacgtccccagggccgtacgcaccctcgccgccgcgttcgccgactaccccgccacgcgccacaccgtcgatccggaccgccacatcgagcgggtcaccgagctgcaagaactcttcctcacgcgcgtcgggctcgacatcggcaaggtgtgggtcgcggacgacggcgccgcggtggcggtctggaccacgccggagagcgtcgaagcgggggcggtgttcgccgagatcggcccgcgcatggccgagttgagcggttcccggctggccgcgcagcaacagatggaaggcctcctggcgccgcaccggcccaaggagcccgcgtggttcctggccaccgtcggcgtctcgcccgaccaccagggcaagggtctgggcagcgccgtcgtgctccccggagtggaggcggccgagcgcgccggggtgcccgccttcctggagacctccgcgccccgcaacctccccttctacgagcggctcggcttcaccgtcaccgccgacgtcgaggtgcccgaaggaccgcgcacctggtgcatgacccgcaagcccggtgcctga

SEQ ID NO: 8805 - DNA, 2868 bp, Artificial Sequence
  Synthetic Polynucloetide
atggccttaccagtgaccgccttgctcctgccgctggccttgctgctccacgccgccaggccgctcgaggacctgaagaacgtgttcccacctgaggtggccgtgttcgagcctagcgaggccgagatcagccacacccagaaagccaccctcgtgtgcctggctaccggcttctaccccgaccatgtggaactgtcttggtgggtcaacggcaaagaggtgcacagcggcgtgtctaccgacccccagccactgaaagaacagcccgccctgaacgacagccggtactgcctgagcagcagactgagagtgtccgccaccttctggcagaacccccggaaccacttcagatgccaggtgcagttctacggcctgagcgagaacgacgagtggacccaggacagagccaagcccgtgacccagatcgtgtctgccgaagcctggggcagagccgattgcggctttaccagcgagagctaccagcagggcgtgctgagcgccaccatcctgtacgagatcctgctgggcaaggccaccctgtacgccgtgctggtgtctgccctggtgctgatggctatggtcaagcggaaggacagccggggaagggccaagcgatctggatctggagcaacaaacttctcactactcaaacaagcaggtgacgtggaggagaatcccgggcctactagcatggccttaccagtgaccgccttgctcctgccgctggccttgctgctccacgccgccaggccggacatccagctgacacagagcccttctagcctgtctgccagcgtgggcgacagagtgaccatcacctgtagcacaagcagcagcgtgtcctacatgcactggtatcagcagaagcccggcaaggcccctaagctgctgatctacagcaccagcaatctggcctctggcgtgcccagcagattttctggctctggcagcggcaccgacttcaccttcacaatatccagcctccagcctgaggacattgccacctactactgccaccagtggtctagctaccccacattcggccagggcaccaaggtggaaatcaaaggcggaggcggaagtggaggcggaggatctggcggcggaggctctggagtgcattctcaggttcagctgcaagagtctggccctggacttgtgcggcctagccaaacactgagcctgacctgtaccgtgtccggcttcacaatcagctccggctacagctggcactgggtccgacaaccacctggcagaggactggaatggatcggctacatccagtacagcggcatcaccaactacaaccccagcctgaagtcccgcgtgaccatgctggtggacacctccaagaaccagttcagcctgagactgagcagcgtgacagccgccgatacagccgtgtactactgcgccagagaggactacgactaccactggtacttcgacgtgtggggccagggaaccaccgtgacagtttcttctacgcgtgagcagaaactgatctcggaagaggatctggggagcggcaccccattcccttctctggcccctcccatcatgctgctggtggacggcaagcagcagatggtggtcgtgtgcctggtgctggatgtggccccacctggactggacagccccatctggtttagcgccggcaatggctctgccctggacgcctttacctacggcccaagccctgccaccgatggcacctggacaaatctggcccacctgagcctgcccagcgaggaactggcttcttgggagcctctcgtgtgccacacaggacctggcgctgagggacacagcagatccacccagcctatgcacctgtctggcgaggccagcaccgccagaacctgtcctcaggaacctctgagaggcacccctggcggagcactgtggctgggagtgctgagactgctgctgttcaagctgctgctgtttgacctgctgctgacctgctcctgtctgtgcgatcctgccggccctctgccttctcctgccaccaccacaagactgagagccctgggcagccacagactgcaccctgccacagagacaggcggcagagaggccacaagcagccctagaccccagcccagagacagaagatggggcgataccccccctggcagaaagcctggatctccagtccgcgccaagagaagcggatctggcgtgaagcagaccctgaatttcgacctgctgaagctggctggcgacgtggaatccaacccaggcccttctagatctagaggccatatgaccgagtacaagcccacggtgcgcctcgccacccgcgacgacgtccccagggccgtacgcaccctcgccgccgcgttcgccgactaccccgccacgcgccacaccgtcgatccggaccgccacatcgagcgggtcaccgagctgcaagaactcttcctcacgcgcgtcgggctcgacatcggcaaggtgtgggtcgcggacgacggcgccgcggtggcggtctggaccacgccggagagcgtcgaagcgggggcggtgttcgccgagatcggcccgcgcatggccgagttgagcggttcccggctggccgcgcagcaacagatggaaggcctcctggcgccgcaccggcccaaggagcccgcgtggttcctggccaccgtcggcgtctcgcccgaccaccagggcaagggtctgggcagcgccgtcgtgctccccggagtggaggcggccgagcgcgccggggtgcccgccttcctggagacctccgcgccccgcaacctccccttctacgagcggctcggcttcaccgtcaccgccgacgtcgaggtgcccgaaggaccgcgcacctggtgcatgacccgcaagcccggtgcctga

SEQ ID NO: 8806 - DNA, 2679 bp, Artificial Sequence
  Synthetic Polynucloetide
atggccttaccagtgaccgccttgctcctgccgctggccttgctgctccacgccgccaggccggacatccagctgacacagagcccttctagcctgtctgccagcgtgggcgacagagtgaccatcacctgtagcacaagcagcagcgtgtcctacatgcactggtatcagcagaagcccggcaaggcccctaagctgctgatctacagcaccagcaatctggcctctggcgtgcccagcagattttctggctctggcagcggcaccgacttcaccttcacaatatccagcctccagcctgaggacattgccacctactactgccaccagtggtctagctaccccacattcggccagggcaccaaggtggaaatcaaactcgaggggaaaccaattcccaaccctcttctgggactggattcaaccggcagcggcgacaagcagctggacgccgacgtgtcccccaagcctaccatcttcctgccctctatcgccgagacaaagctccagaaggccggcacctacctgtgcctgctggaaaagttcttcccagatgtgattaagatccactggcaggaaaagaagtccaacaccatcctgggcagccaggaaggcaacaccatgaagaccaacgacacctacatgaagttcagctggctgaccgtgcccgagaagtccctggacaaagaacacagatgcatcgtgcggcacgaaaacaacaagaacggcgtggaccaggaaatcatcttcccacccatcaagaccgatgtgattacaatggaccccaaggacaactgctccaaggacgccaacgataccctgctgctccagctgaccaacaccagcgcctactacatgtacttgttgctgctgctgaagtccgtggtgtacttcgccatcatcacatgctgcctgctgcggagaaccgccttctgctgcaacggcgagaagtctagggccaagcgatctggatctggagcaacaaacttctcactactcaaacaagcaggtgacgtggaggagaatcccgggcctactagtatggactggatttggcgcatccttttccttgtcggcgctgctaccggcgcgcattccttcgaaggagtgcattctcaggttcagctgcaagagtctggccctggacttgtgcggcctagccaaacactgagcctgacctgtaccgtgtccggcttcacaatcagctccggctacagctggcactgggtccgacaaccacctggcagaggactggaatggatcggctacatccagtacagcggcatcaccaactacaaccccagcctgaagtcccgcgtgaccatgctggtggacacctccaagaaccagttcagcctgagactgagcagcgtgacagccgccgatacagccgtgtactactgcgccagagaggactacgactaccactggtacttcgacgtgtggggccagggaaccaccgtgacagtttcttctacgcgtgagcagaaactgatctcggaagaggatgggagcggcagccagcctcacaccaagcccagcgtgttcgtgatgaagaacggcaccaacgtggcctgcctcgtgaaagagttctaccccaaggacatcaggatcaacctggtgtccagcaagaagatcaccgagttcgaccccgccatcgtgatctcccccagcggcaagtacaacgccgtgaagctggggaagtacgaggacagcaacagcgtgacctgctccgtgcagcacgacaacaagaccgtgcacagcaccgactttgaagtgaaaaccgactccaccgaccacgtgaagcccaaagagacagagaacaccaagcagcccagcaagagctgccacaagcccaaggccatcgtgcacaccgagaaagtgaacatgatgagcctgaccgtgctgggcctgcggatgctgttcgccaaaaccgtggccgtgaacttcctgctgaccgccaagctgttcttcctccgcgccaagagaagcggatctggcgtgaagcagaccctgaatttcgacctgctgaagctggctggcgacgtggaatccaacccaggcccttctagaggccatatgaccgagtacaagcccacggtgcgcctcgccacccgcgacgacgtccccagggccgtacgcaccctcgccgccgcgttcgccgactaccccgccacgcgccacaccgtcgatccggaccgccacatcgagcgggtcaccgagctgcaagaactcttcctcacgcgcgtcgggctcgacatcggcaaggtgtgggtcgcggacgacggcgccgcggtggcggtctggaccacgccggagagcgtcgaagcgggggcggtgttcgccgagatcggcccgcgcatggccgagttgagcggttcccggctggccgcgcagcaacagatggaaggcctcctggcgccgcaccggcccaaggagcccgcgtggttcctggccaccgtcggcgtctcgcccgaccaccagggcaagggtctgggcagcgccgtcgtgctccccggagtggaggcggccgagcgcgccggggtgcccgccttcctggagacctccgcgccccgcaacctccccttctacgagcggctcggcttcaccgtcaccgccgacgtcgaggtgcccgaaggaccgcgcacctggtgcatgacccgcaagcccggtgcctga

SEQ ID NO: 8807 - DNA, 1890 bp, Artificial Sequence
  Synthetic Polynucloetide
atggccttaccagtgaccgccttgctcctgccgctggccttgctgctccacgccgccaggccggacatccagctgacacagagcccttctagcctgtctgccagcgtgggcgacagagtgaccatcacctgtagcacaagcagcagcgtgtcctacatgcactggtatcagcagaagcccggcaaggcccctaagctgctgatctacagcaccagcaatctggcctctggcgtgcccagcagattttctggctctggcagcggcaccgacttcaccttcacaatatccagcctccagcctgaggacattgccacctactactgccaccagtggtctagctaccccacattcggccagggcaccaaggtggaaatcaaactcgagagccagcctcacaccaagcccagcgtgttcgtgatgaagaacggcaccaacgtggcctgcctcgtgaaagagttctaccccaaggacatcaggatcaacctggtgtccagcaagaagatcaccgagttcgaccccgccatcgtgatctcccccagcggcaagtacaacgccgtgaagctggggaagtacgaggacagcaacagcgtgacctgctccgtgcagcacgacaacaagaccgtgcacagcaccgactttgaagtgaaaaccgactccaccgaccacgtgaagcccaaagagacagagaacaccaagcagcccagcaagagctgccacaagcccaaggccatcgtgcacaccgagaaagtgaacatgatgagcctgaccgtgctgggcctgcggatgctgttcgccaaaaccgtggccgtgaacttcctgctgaccgccaagctgttcttcctcagggccaagcgatctggatctggagcaacaaacttctcactactcaaacaagcaggtgacgtggaggagaatcccgggcctactagtatggactggatttggcgcatccttttccttgtcggcgctgctaccggcgcgcattccttcgaaggagtgcattctcaggttcagctgcaagagtctggccctggacttgtgcggcctagccaaacactgagcctgacctgtaccgtgtccggcttcacaatcagctccggctacagctggcactgggtccgacaaccacctggcagaggactggaatggatcggctacatccagtacagcggcatcaccaactacaaccccagcctgaagtcccgcgtgaccatgctggtggacacctccaagaaccagttcagcctgagactgagcagcgtgacagccgccgatacagccgtgtactactgcgccagagaggactacgactaccactggtacttcgacgtgtggggccagggaaccaccgtgacagtttcttctacgcgtgacaagcagctggacgccgacgtgtcccccaagcctaccatcttcctgccctctatcgccgagacaaagctccagaaggccggcacctacctgtgcctgctggaaaagttcttcccagatgtgattaagatccactggcaggaaaagaagtccaacaccatcctgggcagccaggaaggcaacaccatgaagaccaacgacacctacatgaagttcagctggctgaccgtgcccgagaagtccctggacaaagaacacagatgcatcgtgcggcacgaaaacaacaagaacggcgtggaccaggaaatcatcttcccacccatcaagaccgatgtgattacaatggaccccaaggacaactgctccaaggacgccaacgataccctgctgctccagctgaccaacaccagcgcctactacatgtacttgttgctgctgctgaagtccgtggtgtacttcgccatcatcacatgctgcctgctgcggagaaccgccttctgctgcaacggcgagaagtct

SEQ ID NO: 8808 - DNA, 2724 bp, Artificial Sequence
  Synthetic Polynucloetide
atggccttaccagtgaccgccttgctcctgccgctggccttgctgctccacgccgccaggccgctcgaggggaaaccaattcccaaccctcttctgggactggattcaaccggcagcggcgacaagcagctggacgccgacgtgtcccccaagcctaccatcttcctgccctctatcgccgagacaaagctccagaaggccggcacctacctgtgcctgctggaaaagttcttcccagatgtgattaagatccactggcaggaaaagaagtccaacaccatcctgggcagccaggaaggcaacaccatgaagaccaacgacacctacatgaagttcagctggctgaccgtgcccgagaagtccctggacaaagaacacagatgcatcgtgcggcacgaaaacaacaagaacggcgtggaccaggaaatcatcttcccacccatcaagaccgatgtgattacaatggaccccaaggacaactgctccaaggacgccaacgataccctgctgctccagctgaccaacaccagcgcctactacatgtacttgttgctgctgctgaagtccgtggtgtacttcgccatcatcacatgctgcctgctgcggagaaccgccttctgctgcaacggcgagaagtctagggccaagcgatctggatctggagcaacaaacttctcactactcaaacaagcaggtgacgtggaggagaatcccgggcctactagcatggccttaccagtgaccgccttgctcctgccgctggccttgctgctccacgccgccaggccggacatccagctgacacagagcccttctagcctgtctgccagcgtgggcgacagagtgaccatcacctgtagcacaagcagcagcgtgtcctacatgcactggtatcagcagaagcccggcaaggcccctaagctgctgatctacagcaccagcaatctggcctctggcgtgcccagcagattttctggctctggcagcggcaccgacttcaccttcacaatatccagcctccagcctgaggacattgccacctactactgccaccagtggtctagctaccccacattcggccagggcaccaaggtggaaatcaaaggcggaggcggaagtggaggcggaggatctggcggcggaggctctggagtgcattctcaggttcagctgcaagagtctggccctggacttgtgcggcctagccaaacactgagcctgacctgtaccgtgtccggcttcacaatcagctccggctacagctggcactgggtccgacaaccacctggcagaggactggaatggatcggctacatccagtacagcggcatcaccaactacaaccccagcctgaagtcccgcgtgaccatgctggtggacacctccaagaaccagttcagcctgagactgagcagcgtgacagccgccgatacagccgtgtactactgcgccagagaggactacgactaccactggtacttcgacgtgtggggccagggaaccaccgtgacagtttcttctacgcgtgagcagaaactgatctcggaagaggatgggagcggcagccagcctcacaccaagcccagcgtgttcgtgatgaagaacggcaccaacgtggcctgcctcgtgaaagagttctaccccaaggacatcaggatcaacctggtgtccagcaagaagatcaccgagttcgaccccgccatcgtgatctcccccagcggcaagtacaacgccgtgaagctggggaagtacgaggacagcaacagcgtgacctgctccgtgcagcacgacaacaagaccgtgcacagcaccgactttgaagtgaaaaccgactccaccgaccacgtgaagcccaaagagacagagaacaccaagcagcccagcaagagctgccacaagcccaaggccatcgtgcacaccgagaaagtgaacatgatgagcctgaccgtgctgggcctgcggatgctgttcgccaaaaccgtggccgtgaacttcctgctgaccgccaagctgttcttcctccgcgccaagagaagcggatctggcgtgaagcagaccctgaatttcgacctgctgaagctggctggcgacgtggaatccaacccaggcccttctagaggccatatgaccgagtacaagcccacggtgcgcctcgccacccgcgacgacgtccccagggccgtacgcaccctcgccgccgcgttcgccgactaccccgccacgcgccacaccgtcgatccggaccgccacatcgagcgggtcaccgagctgcaagaactcttcctcacgcgcgtcgggctcgacatcggcaaggtgtgggtcgcggacgacggcgccgcggtggcggtctggaccacgccggagagcgtcgaagcgggggcggtgttcgccgagatcggcccgcgcatggccgagttgagcggttcccggctggccgcgcagcaacagatggaaggcctcctggcgccgcaccggcccaaggagcccgcgtggttcctggccaccgtcggcgtctcgcccgaccaccagggcaagggtctgggcagcgccgtcgtgctccccggagtggaggcggccgagcgcgccggggtgcccgccttcctggagacctccgcgccccgcaacctccccttctacgagcggctcggcttcaccgtcaccgccgacgtcgaggtgcccgaaggaccgcgcacctggtgcatgacccgcaagcccggtgcctga

SEQ ID NO: 8809 - DNA, 3099 bp, Artificial Sequence
  Synthetic Polynucloetide
atggccttaccagtgaccgccttgctcctgccgctggccttgctgctccacgccgccaggccggacatccagctgacacagagcccttctagcctgtctgccagcgtgggcgacagagtgaccatcacctgtagcacaagcagcagcgtgtcctacatgcactggtatcagcagaagcccggcaaggcccctaagctgctgatctacagcaccagcaatctggcctctggcgtgcccagcagattttctggctctggcagcggcaccgacttcaccttcacaatatccagcctccagcctgaggacattgccacctactactgccaccagtggtctagctaccccacattcggccagggcaccaaggtggaaatcaaaggacagcctaaggccaatcctaccgtgacactgttccctccaagcagcgaagaactccaggccaacaaggccacacttgtgtgcctgatctccgacttctaccctggggctgtgacagtggcttggaaggccgatggatctcctgtgaaagccggcgtggaaaccaccaagccatccaagcagagcaacaacaaatacgccgccagctcctacctgagcctgacacctgagcagtggaagtcccacagatcctacagctgccaagtgacccacgaaggcagcaccgtggaaaagacagtggcccctacagagtgcagcggatcccagagcttcggcctgctggaccccaagctgtgctacctgctggatggcatcctgttcatctacggcgtgatcctgaccgccctgttcctgagagtgaagttcagcagaagcgccgacgcccctgcctaccagcagggacagaaccaactgtacaacgagctgaacctgggcagacgggaagagtacgacgtgctggacaagcggagaggcagggaccctgagatgggcggaaagccccagcggagaaagaacccccaggaaggactgtataacgaactccagaaagacaagatggccgaagcctacagcgagatcggcatgaagggcgagcggagaagaggcaagggccacgatggcctgtaccagggcctgagcaccgccaccaaggacacctatgacgccctgcacatgcaggccctgcctccaagaagggccaagcgatctggatctggagcaacaaacttctcactactcaaacaagcaggtgacgtggaggagaatcccgggcctactagtatggactggatttggcgcatccttttccttgtcggcgctgctaccggcgcgcattccttcgaaggagtgcattctcaggttcagctgcaagagtctggccctggacttgtgcggcctagccaaacactgagcctgacctgtaccgtgtccggcttcacaatcagctccggctacagctggcactgggtccgacaaccacctggcagaggactggaatggatcggctacatccagtacagcggcatcaccaactacaaccccagcctgaagtcccgcgtgaccatgctggtggacacctccaagaaccagttcagcctgagactgagcagcgtgacagccgccgatacagccgtgtactactgcgccagagaggactacgactaccactggtacttcgacgtgtggggccagggaaccaccgtgacagtttcttctgcctctacaaagggaccctccgtgtttcctctggctcccagcagcaagtctacaagcggaggaacagccgctctgggctgcctggtcaaggattactttcccgagcctgtgaccgtgtcctggaatagcggagcactgacaagcggcgtgcacacctttccagccgtgctgcaaagcagcggcctgtactctctgagcagcgtggtcacagtgcctagctctagcctgggcacccagacctacatctgcaatgtgaaccacaagcctagcaacaccaaggtggacaagagagtggaacccaagagctgtggtacccagagttttgggttgttggaccctaaattgtgctatctgttggacggaatcctgttcatttacggagtgatcctgaccgcattgttcctgcgggttaagttttccagatccgcagacgcacccgcttaccaacaagggcagaaccaactctacaatgaacttaatttggggcggagggaagagtacgacgttctggacaaaaggaggggacgagatcccgagatgggcggaaagcctcagcgaaggaagaatccgcaagaggggctttataacgaactccagaaagataaaatggcagaagcctatagtgagattgggatgaagggagaaaggaggaggggtaaaggtcacgatgggttgtaccaaggattgagcacagccactaaagatacctatgatgcgctccacatgcaggccctgccgccaagacgcgccaagagaagcggatctggcgtgaagcagaccctgaatttcgacctgctgaagctggctggcgacgtggaatccaacccaggcccttctagaggccatatgaccgagtacaagcccacggtgcgcctcgccacccgcgacgacgtccccagggccgtacgcaccctcgccgccgcgttcgccgactaccccgccacgcgccacaccgtcgatccggaccgccacatcgagcgggtcaccgagctgcaagaactcttcctcacgcgcgtcgggctcgacatcggcaaggtgtgggtcgcggacgacggcgccgcggtggcggtctggaccacgccggagagcgtcgaagcgggggcggtgttcgccgagatcggcccgcgcatggccgagttgagcggttcccggctggccgcgcagcaacagatggaaggcctcctggcgccgcaccggcccaaggagcccgcgtggttcctggccaccgtcggcgtctcgcccgaccaccagggcaagggtctgggcagcgccgtcgtgctccccggagtggaggcggccgagcgcgccggggtgcccgccttcctggagacctccgcgccccgcaacctccccttctacgagcggctcggcttcaccgtcaccgccgacgtcgaggtgcccgaaggaccgcgcacctggtgcatgacccgcaagcccggtgcctga

SEQ ID NO: 8810 - DNA, 2454 bp, Artificial Sequence
  Synthetic Polynucloetide
atggccttaccagtgaccgccttgctcctgccgctggccttgctgctccacgccgccaggccggacatccagctgacacagagcccttctagcctgtctgccagcgtgggcgacagagtgaccatcacctgtagcacaagcagcagcgtgtcctacatgcactggtatcagcagaagcccggcaaggcccctaagctgctgatctacagcaccagcaatctggcctctggcgtgcccagcagattttctggctctggcagcggcaccgacttcaccttcacaatatccagcctccagcctgaggacattgccacctactactgccaccagtggtctagctaccccacattcggccagggcaccaaggtggaaatcaaactcgaggacctgaagaacgtgttcccacctgaggtggccgtgttcgagcctagcgaggccgagatcagccacacccagaaagccaccctcgtgtgcctggctaccggcttctaccccgaccatgtggaactgtcttggtgggtcaacggcaaagaggtgcacagcggcgtgtctaccgacccccagccactgaaagaacagcccgccctgaacgacagccggtactgcctgagcagcagactgagagtgtccgccaccttctggcagaacccccggaaccacttcagatgccaggtgcagttctacggcctgagcgagaacgacgagtggacccaggacagagccaagcccgtgacccagatcgtgtctgccgaagcctggggcagagccgattgcggatcccagagcttcggcctgctggaccccaagctgtgctacctgctggatggcatcctgttcatctacggcgtgatcctgaccgccctgttcctgagagtgaagttcagcagaagcgccgacgcccctgcctaccagcagggacagaaccaactgtacaacgagctgaacctgggcagacgggaagagtacgacgtgctggacaagcggagaggcagggaccctgagatgggcggaaagccccagcggagaaagaacccccaggaaggactgtataacgaactccagaaagacaagatggccgaagcctacagcgagatcggcatgaagggcgagcggagaagaggcaagggccacgatggcctgtaccagggcctgagcaccgccaccaaggacacctatgacgccctgcacatgcaggccctgcctccaagaagggccaagcgatctggatctggagcaacaaacttctcactactcaaacaagcaggtgacgtggaggagaatcccgggcctactagtatggactggatttggcgcatccttttccttgtcggcgctgctaccggcgcgcattccttcgaaggagtgcattctcaggttcagctgcaagagtctggccctggacttgtgcggcctagccaaacactgagcctgacctgtaccgtgtccggcttcacaatcagctccggctacagctggcactgggtccgacaaccacctggcagaggactggaatggatcggctacatccagtacagcggcatcaccaactacaaccccagcctgaagtcccgcgtgaccatgctggtggacacctccaagaaccagttcagcctgagactgagcagcgtgacagccgccgatacagccgtgtactactgcgccagagaggactacgactaccactggtacttcgacgtgtggggccagggaaccaccgtgacagtttcttctacgcgtatccagaaccctgatcctgccgtgtaccagctgcgggatagcaagagcagcgacaagagcgtgtgtctgttcaccgacttcgacagccagaccaacgtgtcccagagcaaggactccgacgtgtacatcaccgataagaccgtgctggacatgcggagcatggacttcaagagcaactccgccgtggcctggtccaacaagtccgatttcgcctgcgccaacgccttcaacaacagcattatccccgaggacacattcttcccaagccccgagagcagctgcggtacccagagttttgggttgttggaccctaaattgtgctatctgttggacggaatcctgttcatttacggagtgatcctgaccgcattgttcctgcgggttaagttttccagatccgcagacgcacccgcttaccaacaagggcagaaccaactctacaatgaacttaatttggggcggagggaagagtacgacgttctggacaaaaggaggggacgagatcccgagatgggcggaaagcctcagcgaaggaagaatccgcaagaggggctttataacgaactccagaaagataaaatggcagaagcctatagtgagattgggatgaagggagaaaggaggaggggtaaaggtcacgatgggttgtaccaaggattgagcacagccactaaagatacctatgatgcgctccacatgcaggccctgccgccaaga

SEQ ID NO: 8811 - DNA, 2454 bp, Artificial Sequence
  Synthetic Polynucloetide
atggccttaccagtgaccgccttgctcctgccgctggccttgctgctccacgccgccaggccggacatccagctgacacagagcccttctagcctgtctgccagcgtgggcgacagagtgaccatcacctgtagcacaagcagcagcgtgtcctacatgcactggtatcagcagaagcccggcaaggcccctaagctgctgatctacagcaccagcaatctggcctctggcgtgcccagcagattttctggctctggcagcggcaccgacttcaccttcacaatatccagcctccagcctgaggacattgccacctactactgccaccagtggtctagctaccccacattcggccagggcaccaaggtggaaatcaaactcgaggacctgaagaacgtgttcccacctgaggtggccgtgttcgagcctagcaaggccgagatcgcccacacccagaaagccaccctcgtgtgcctggctaccggcttctaccccgaccatgtggaactgtcttggtgggtcaacggcaaagaggtgcacagcggcgtgtgtaccgacccccagccactgaaagaacagcccgccctgaacgacagccggtactgcctgagcagcagactgagagtgtccgccaccttctggcagaacccccggaaccacttcagatgccaggtgcagttctacggcctgagcgagaacgacgagtggacccaggacagagccaagcccgtgacccagatcgtgtctgccgaagcctggggcagagccgattgcggatcccagagcttcggcctgctggaccccaagctgtgctacctgctggatggcatcctgttcatctacggcgtgatcctgaccgccctgttcctgagagtgaagttcagcagaagcgccgacgcccctgcctaccagcagggacagaaccaactgtacaacgagctgaacctgggcagacgggaagagtacgacgtgctggacaagcggagaggcagggaccctgagatgggcggaaagccccagcggagaaagaacccccaggaaggactgtataacgaactccagaaagacaagatggccgaagcctacagcgagatcggcatgaagggcgagcggagaagaggcaagggccacgatggcctgtaccagggcctgagcaccgccaccaaggacacctatgacgccctgcacatgcaggccctgcctccaagaagggccaagcgatctggatctggagcaacaaacttctcactactcaaacaagcaggtgacgtggaggagaatcccgggcctactagtatggactggatttggcgcatccttttccttgtcggcgctgctaccggcgcgcattccttcgaaggagtgcattctcaggttcagctgcaagagtctggccctggacttgtgcggcctagccaaacactgagcctgacctgtaccgtgtccggcttcacaatcagctccggctacagctggcactgggtccgacaaccacctggcagaggactggaatggatcggctacatccagtacagcggcatcaccaactacaaccccagcctgaagtcccgcgtgaccatgctggtggacacctccaagaaccagttcagcctgagactgagcagcgtgacagccgccgatacagccgtgtactactgcgccagagaggactacgactaccactggtacttcgacgtgtggggccagggaaccaccgtgacagtttcttctacgcgtatccagaaccctgatcctgccgtgtaccagctgcgggatagcaagagcagcgacaagagcgtgtgtctgttcaccgacttcgacagccagaccaacgtgtcccagagcaaggactccgacgtgtacatcaccgataagtgcgtgctggacatgcggagcatggacttcaagagcaactccgccgtggcctggtccaacaagtccgatttcgcctgcgccaacgccttcaacaacagcattatccccgaggacacattcttcccaagcagcgacgtgccctgcggtacccagagttttgggttgttggaccctaaattgtgctatctgttggacggaatcctgttcatttacggagtgatcctgaccgcattgttcctgcgggttaagttttccagatccgcagacgcacccgcttaccaacaagggcagaaccaactctacaatgaacttaatttggggcggagggaagagtacgacgttctggacaaaaggaggggacgagatcccgagatgggcggaaagcctcagcgaaggaagaatccgcaagaggggctttataacgaactccagaaagataaaatggcagaagcctatagtgagattgggatgaagggagaaaggaggaggggtaaaggtcacgatgggttgtaccaaggattgagcacagccactaaagatacctatgatgcgctccacatgcaggccctgccgccaaga

SEQ ID NO: 8812 - DNA, 2667 bp, Artificial Sequence
  Synthetic Polynucloetide
atggccttaccagtgaccgccttgctcctgccgctggccttgctgctccacgccgccaggccggacatccagctgacacagagcccttctagcctgtctgccagcgtgggcgacagagtgaccatcacctgtagcacaagcagcagcgtgtcctacatgcactggtatcagcagaagcccggcaaggcccctaagctgctgatctacagcaccagcaatctggcctctggcgtgcccagcagattttctggctctggcagcggcaccgacttcaccttcacaatatccagcctccagcctgaggacattgccacctactactgccaccagtggtctagctaccccacattcggccagggcaccaaggtggaaatcaaactcgaggggaaaccaattcccaaccctcttctgggactggattcaaccggcagcggcgaggacctgaagaacgtgttcccacctgaggtggccgtgttcgagcctagcgaggccgagatcagccacacccagaaagccaccctcgtgtgcctggctaccggcttctaccccgaccatgtggaactgtcttggtgggtcaacggcaaagaggtgcacagcggcgtgtctaccgacccccagccactgaaagaacagcccgccctgaacgacagccggtactgcctgagcagcagactgagagtgtccgccaccttctggcagaacccccggaaccacttcagatgccaggtgcagttctacggcctgagcgagaacgacgagtggacccaggacagagccaagcccgtgacccagatcgtgtctgccgaagcctggggcagagccgattgcggatcccagagcttcggcctgctggaccccaagctgtgctacctgctggatggcatcctgttcatctacggcgtgatcctgaccgccctgttcctgagagtgaagttcagcagaagcgccgacgcccctgcctaccagcagggacagaaccaactgtacaacgagctgaacctgggcagacgggaagagtacgacgtgctggacaagcggagaggcagggaccctgagatgggcggaaagccccagcggagaaagaacccccaggaaggactgtataacgaactccagaaagacaagatggccgaagcctacagcgagatcggcatgaagggcgagcggagaagaggcaagggccacgatggcctgtaccagggcctgagcaccgccaccaaggacacctatgacgccctgcacatgcaggccctgcctccaagaagggccaagcgatctggatctggagcaacaaacttctcactactcaaacaagcaggtgacgtggaggagaatcccgggcctactagtatggactggatttggcgcatccttttccttgtcggcgctgctaccggcgcgcattccttcgaaggagtgcattctcaggttcagctgcaagagtctggccctggacttgtgcggcctagccaaacactgagcctgacctgtaccgtgtccggcttcacaatcagctccggctacagctggcactgggtccgacaaccacctggcagaggactggaatggatcggctacatccagtacagcggcatcaccaactacaaccccagcctgaagtcccgcgtgaccatgctggtggacacctccaagaaccagttcagcctgagactgagcagcgtgacagccgccgatacagccgtgtactactgcgccagagaggactacgactaccactggtacttcgacgtgtggggccagggaaccaccgtgacagtttcttctacgcgtgagcagaaactgatctcggaagaggatgggagcggcatccagaaccctgatcctgccgtgtaccagctgcgggatagcaagagcagcgacaagagcgtgtgtctgttcaccgacttcgacagccagaccaacgtgtcccagagcaaggactccgacgtgtacatcaccgataagaccgtgctggacatgcggagcatggacttcaagagcaactccgccgtggcctggtccaacaagtccgatttcgcctgcgccaacgccttcaacaacagcattatccccgaggacacattcttcccaagccccgagagcagctgcggtacccagagttttgggttgttggaccctaaattgtgctatctgttggacggaatcctgttcatttacggagtgatcctgaccgcattgttcctgaggagcaagcggtcacggctgctccacagcgattacatgaatatgacaccacgaagaccgggtcctactcgcaaacactaccaaccctacgcacctccccgcgactttgcagcgtaccgatctcgggttaagttttccagatccgcagacgcacccgcttaccaacaagggcagaaccaactctacaatgaacttaatttggggcggagggaagagtacgacgttctggacaaaaggaggggacgagatcccgagatgggcggaaagcctcagcgaaggaagaatccgcaagaggggctttataacgaactccagaaagataaaatggcagaagcctatagtgagattgggatgaagggagaaaggaggaggggtaaaggtcacgatgggttgtaccaaggattgagcacagccactaaagatacctatgatgcgctccacatgcaggccctgccgccaaga

SEQ ID NO: 8813 - DNA, 2790 bp, Artificial Sequence
  Synthetic Polynucloetide
atggccttaccagtgaccgccttgctcctgccgctggccttgctgctccacgccgccaggccggacatccagctgacacagagcccttctagcctgtctgccagcgtgggcgacagagtgaccatcacctgtagcacaagcagcagcgtgtcctacatgcactggtatcagcagaagcccggcaaggcccctaagctgctgatctacagcaccagcaatctggcctctggcgtgcccagcagattttctggctctggcagcggcaccgacttcaccttcacaatatccagcctccagcctgaggacattgccacctactactgccaccagtggtctagctaccccacattcggccagggcaccaaggtggaaatcaaactcgaggggaaaccaattcccaaccctcttctgggactggattcaaccggcagcggcgaggacctgaagaacgtgttcccacctgaggtggccgtgttcgagcctagcgaggccgagatcagccacacccagaaagccaccctcgtgtgcctggctaccggcttctaccccgaccatgtggaactgtcttggtgggtcaacggcaaagaggtgcacagcggcgtgtctaccgacccccagccactgaaagaacagcccgccctgaacgacagccggtactgcctgagcagcagactgagagtgtccgccaccttctggcagaacccccggaaccacttcagatgccaggtgcagttctacggcctgagcgagaacgacgagtggacccaggacagagccaagcccgtgacccagatcgtgtctgccgaagcctggggcagagccgattgcggatcccagagcttcggcctgctggaccccaagctgtgctacctgctggatggcatcctgttcatctacggcgtgatcctgaccgccctgttcctgaggagtaagaggagcaggctcctgcacagtgactacatgaacatgactccacgccgccccggacccacccgcaagcattaccagccctatgccccaccacgcgacttcgcagcctatcgctccagagtgaagttcagcagaagcgccgacgcccctgcctaccagcagggacagaaccaactgtacaacgagctgaacctgggcagacgggaagagtacgacgtgctggacaagcggagaggcagggaccctgagatgggcggaaagccccagcggagaaagaacccccaggaaggactgtataacgaactccagaaagacaagatggccgaagcctacagcgagatcggcatgaagggcgagcggagaagaggcaagggccacgatggcctgtaccagggcctgagcaccgccaccaaggacacctatgacgccctgcacatgcaggccctgcctccaagaagggccaagcgatctggatctggagcaacaaacttctcactactcaaacaagcaggtgacgtggaggagaatcccgggcctactagtatggactggatttggcgcatccttttccttgtcggcgctgctaccggcgcgcattccttcgaaggagtgcattctcaggttcagctgcaagagtctggccctggacttgtgcggcctagccaaacactgagcctgacctgtaccgtgtccggcttcacaatcagctccggctacagctggcactgggtccgacaaccacctggcagaggactggaatggatcggctacatccagtacagcggcatcaccaactacaaccccagcctgaagtcccgcgtgaccatgctggtggacacctccaagaaccagttcagcctgagactgagcagcgtgacagccgccgatacagccgtgtactactgcgccagagaggactacgactaccactggtacttcgacgtgtggggccagggaaccaccgtgacagtttcttctacgcgtgagcagaaactgatctcggaagaggatgggagcggcatccagaaccctgatcctgccgtgtaccagctgcgggatagcaagagcagcgacaagagcgtgtgtctgttcaccgacttcgacagccagaccaacgtgtcccagagcaaggactccgacgtgtacatcaccgataagaccgtgctggacatgcggagcatggacttcaagagcaactccgccgtggcctggtccaacaagtccgatttcgcctgcgccaacgccttcaacaacagcattatccccgaggacacattcttcccaagccccgagagcagctgcggtacccagagttttgggttgttggaccctaaattgtgctatctgttggacggaatcctgttcatttacggagtgatcctgaccgcattgttcctgaggagcaagcggtcacggctgctccacagcgattacatgaatatgacaccacgaagaccgggtcctactcgcaaacactaccaaccctacgcacctccccgcgactttgcagcgtaccgatctcgggttaagttttccagatccgcagacgcacccgcttaccaacaagggcagaaccaactctacaatgaacttaatttggggcggagggaagagtacgacgttctggacaaaaggaggggacgagatcccgagatgggcggaaagcctcagcgaaggaagaatccgcaagaggggctttataacgaactccagaaagataaaatggcagaagcctatagtgagattgggatgaagggagaaaggaggaggggtaaaggtcacgatgggttgtaccaaggattgagcacagccactaaagatacctatgatgcgctccacatgcaggccctgccgccaaga

SEQ ID NO: 8814 - DNA, 2673 bp, Artificial Sequence
  Synthetic Polynucloetide
atggccttaccagtgaccgccttgctcctgccgctggccttgctgctccacgccgccaggccggacatccagctgacacagagcccttctagcctgtctgccagcgtgggcgacagagtgaccatcacctgtagcacaagcagcagcgtgtcctacatgcactggtatcagcagaagcccggcaaggcccctaagctgctgatctacagcaccagcaatctggcctctggcgtgcccagcagattttctggctctggcagcggcaccgacttcaccttcacaatatccagcctccagcctgaggacattgccacctactactgccaccagtggtctagctaccccacattcggccagggcaccaaggtggaaatcaaactcgaggggaaaccaattcccaaccctcttctgggactggattcaaccggcagcggcgaggacctgaagaacgtgttcccacctgaggtggccgtgttcgagcctagcgaggccgagatcagccacacccagaaagccaccctcgtgtgcctggctaccggcttctaccccgaccatgtggaactgtcttggtgggtcaacggcaaagaggtgcacagcggcgtgtctaccgacccccagccactgaaagaacagcccgccctgaacgacagccggtactgcctgagcagcagactgagagtgtccgccaccttctggcagaacccccggaaccacttcagatgccaggtgcagttctacggcctgagcgagaacgacgagtggacccaggacagagccaagcccgtgacccagatcgtgtctgccgaagcctggggcagagccgattgcggatcccagagcttcggcctgctggaccccaagctgtgctacctgctggatggcatcctgttcatctacggcgtgatcctgaccgccctgttcctgagagtgaagttcagcagaagcgccgacgcccctgcctaccagcagggacagaaccaactgtacaacgagctgaacctgggcagacgggaagagtacgacgtgctggacaagcggagaggcagggaccctgagatgggcggaaagccccagcggagaaagaacccccaggaaggactgtataacgaactccagaaagacaagatggccgaagcctacagcgagatcggcatgaagggcgagcggagaagaggcaagggccacgatggcctgtaccagggcctgagcaccgccaccaaggacacctatgacgccctgcacatgcaggccctgcctccaagaagggccaagcgatctggatctggagcaacaaacttctcactactcaaacaagcaggtgacgtggaggagaatcccgggcctactagtatggactggatttggcgcatccttttccttgtcggcgctgctaccggcgcgcattccttcgaaggagtgcattctcaggttcagctgcaagagtctggccctggacttgtgcggcctagccaaacactgagcctgacctgtaccgtgtccggcttcacaatcagctccggctacagctggcactgggtccgacaaccacctggcagaggactggaatggatcggctacatccagtacagcggcatcaccaactacaaccccagcctgaagtcccgcgtgaccatgctggtggacacctccaagaaccagttcagcctgagactgagcagcgtgacagccgccgatacagccgtgtactactgcgccagagaggactacgactaccactggtacttcgacgtgtggggccagggaaccaccgtgacagtttcttctacgcgtgagcagaaactgatctcggaagaggatctggggagcggcatccagaaccctgatcctgccgtgtaccagctgcgggatagcaagagcagcgacaagagcgtgtgtctgttcaccgacttcgacagccagaccaacgtgtcccagagcaaggactccgacgtgtacatcaccgataagaccgtgctggacatgcggagcatggacttcaagagcaactccgccgtggcctggtccaacaagtccgatttcgcctgcgccaacgccttcaacaacagcattatccccgaggacacattcttcccaagccccgagagcagctgcggtacccagagttttgggttgttggaccctaaattgtgctatctgttggacggaatcctgttcatttacggagtgatcctgaccgcattgttcctgaagagaggccggaagaagctgctgtacatcttcaagcagcctttcatgcggcccgtgcagaccacccaggaagaggacggctgctcctgccggttccccgaggaagaagaaggcggctgcgagctgcgggttaagttttccagatccgcagacgcacccgcttaccaacaagggcagaaccaactctacaatgaacttaatttggggcggagggaagagtacgacgttctggacaaaaggaggggacgagatcccgagatgggcggaaagcctcagcgaaggaagaatccgcaagaggggctttataacgaactccagaaagataaaatggcagaagcctatagtgagattgggatgaagggagaaaggaggaggggtaaaggtcacgatgggttgtaccaaggattgagcacagccactaaagatacctatgatgcgctccacatgcaggccctgccgccaaga

SEQ ID NO: 8815 - DNA, 2799 bp, Artificial Sequence
  Synthetic Polynucloetide
atggccttaccagtgaccgccttgctcctgccgctggccttgctgctccacgccgccaggccggacatccagctgacacagagcccttctagcctgtctgccagcgtgggcgacagagtgaccatcacctgtagcacaagcagcagcgtgtcctacatgcactggtatcagcagaagcccggcaaggcccctaagctgctgatctacagcaccagcaatctggcctctggcgtgcccagcagattttctggctctggcagcggcaccgacttcaccttcacaatatccagcctccagcctgaggacattgccacctactactgccaccagtggtctagctaccccacattcggccagggcaccaaggtggaaatcaaactcgaggggaaaccaattcccaaccctcttctgggactggattcaaccggcagcggcgaggacctgaagaacgtgttcccacctgaggtggccgtgttcgagcctagcgaggccgagatcagccacacccagaaagccaccctcgtgtgcctggctaccggcttctaccccgaccatgtggaactgtcttggtgggtcaacggcaaagaggtgcacagcggcgtgtctaccgacccccagccactgaaagaacagcccgccctgaacgacagccggtactgcctgagcagcagactgagagtgtccgccaccttctggcagaacccccggaaccacttcagatgccaggtgcagttctacggcctgagcgagaacgacgagtggacccaggacagagccaagcccgtgacccagatcgtgtctgccgaagcctggggcagagccgattgcggatcccagagcttcggcctgctggaccccaagctgtgctacctgctggatggcatcctgttcatctacggcgtgatcctgaccgccctgttcctgaaacggggcagaaagaaactcctgtatatattcaaacaaccatttatgagaccagtacaaactactcaagaggaagatggctgtagctgccgatttccagaagaagaagaaggaggatgtgaactgagagtgaagttcagcagaagcgccgacgcccctgcctaccagcagggacagaaccaactgtacaacgagctgaacctgggcagacgggaagagtacgacgtgctggacaagcggagaggcagggaccctgagatgggcggaaagccccagcggagaaagaacccccaggaaggactgtataacgaactccagaaagacaagatggccgaagcctacagcgagatcggcatgaagggcgagcggagaagaggcaagggccacgatggcctgtaccagggcctgagcaccgccaccaaggacacctatgacgccctgcacatgcaggccctgcctccaagaagggccaagcgatctggatctggagcaacaaacttctcactactcaaacaagcaggtgacgtggaggagaatcccgggcctactagtatggactggatttggcgcatccttttccttgtcggcgctgctaccggcgcgcattccttcgaaggagtgcattctcaggttcagctgcaagagtctggccctggacttgtgcggcctagccaaacactgagcctgacctgtaccgtgtccggcttcacaatcagctccggctacagctggcactgggtccgacaaccacctggcagaggactggaatggatcggctacatccagtacagcggcatcaccaactacaaccccagcctgaagtcccgcgtgaccatgctggtggacacctccaagaaccagttcagcctgagactgagcagcgtgacagccgccgatacagccgtgtactactgcgccagagaggactacgactaccactggtacttcgacgtgtggggccagggaaccaccgtgacagtttcttctacgcgtgagcagaaactgatctcggaagaggatctggggagcggcatccagaaccctgatcctgccgtgtaccagctgcgggatagcaagagcagcgacaagagcgtgtgtctgttcaccgacttcgacagccagaccaacgtgtcccagagcaaggactccgacgtgtacatcaccgataagaccgtgctggacatgcggagcatggacttcaagagcaactccgccgtggcctggtccaacaagtccgatttcgcctgcgccaacgccttcaacaacagcattatccccgaggacacattcttcccaagccccgagagcagctgcggtacccagagttttgggttgttggaccctaaattgtgctatctgttggacggaatcctgttcatttacggagtgatcctgaccgcattgttcctgaagagaggccggaagaagctgctgtacatcttcaagcagcctttcatgcggcccgtgcagaccacccaggaagaggacggctgctcctgccggttccccgaggaagaagaaggcggctgcgagctgcgggttaagttttccagatccgcagacgcacccgcttaccaacaagggcagaaccaactctacaatgaacttaatttggggcggagggaagagtacgacgttctggacaaaaggaggggacgagatcccgagatgggcggaaagcctcagcgaaggaagaatccgcaagaggggctttataacgaactccagaaagataaaatggcagaagcctatagtgagattgggatgaagggagaaaggaggaggggtaaaggtcacgatgggttgtaccaaggattgagcacagccactaaagatacctatgatgcgctccacatgcaggccctgccgccaaga

SEQ ID NO: 8816 - DNA, 2472 bp, Artificial Sequence
  Synthetic Polynucloetide
atggccttaccagtgaccgccttgctcctgccgctggccttgctgctccacgccgccaggccggacatccagctgacacagagcccttctagcctgtctgccagcgtgggcgacagagtgaccatcacctgtagcacaagcagcagcgtgtcctacatgcactggtatcagcagaagcccggcaaggcccctaagctgctgatctacagcaccagcaatctggcctctggcgtgcccagcagattttctggctctggcagcggcaccgacttcaccttcacaatatccagcctccagcctgaggacattgccacctactactgccaccagtggtctagctaccccacattcggccagggcaccaaggtggaaatcaaactcgagcagagcttcggcctgctggaccccaagctgtgctacctgctggatggcatcctgttcatctacggcgtgatcctgaccgccctgttcctgagagtgaagttcagcagaagcgccgacgcccctgcctaccagcagggacagaaccaactgtacaacgagctgaacctgggcagacgggaagagtacgacgtgctggacaagcggagaggcagggaccctgagatgggcggaaagccccagcggagaaagaacccccaggaaggactgtataacgaactccagaaagacaagatggccgaagcctacagcgagatcggcatgaagggcgagcggagaagaggcaagggccacgatggcctgtaccagggcctgagcaccgccaccaaggacacctatgacgccctgcacatgcaggccctgcctccaagaagggccaagcgatctggatctggagcaacaaacttctcactactcaaacaagcaggtgacgtggaggagaatcccgggcctactagtatggactggatttggcgcatccttttccttgtcggcgctgctaccggcgcgcattccttcgaaggagtgcattctcaggttcagctgcaagagtctggccctggacttgtgcggcctagccaaacactgagcctgacctgtaccgtgtccggcttcacaatcagctccggctacagctggcactgggtccgacaaccacctggcagaggactggaatggatcggctacatccagtacagcggcatcaccaactacaaccccagcctgaagtcccgcgtgaccatgctggtggacacctccaagaaccagttcagcctgagactgagcagcgtgacagccgccgatacagccgtgtactactgcgccagagaggactacgactaccactggtacttcgacgtgtggggccagggaaccaccgtgacagtttcttctacgcgtcagagttttgggttgttggaccctaaattgtgctatctgttggacggaatcctgttcatttacggagtgatcctgaccgcattgttcctgcgggttaagttttccagatccgcagacgcacccgcttaccaacaagggcagaaccaactctacaatgaacttaatttggggcggagggaagagtacgacgttctggacaaaaggaggggacgagatcccgagatgggcggaaagcctcagcgaaggaagaatccgcaagaggggctttataacgaactccagaaagataaaatggcagaagcctatagtgagattgggatgaagggagaaaggaggaggggtaaaggtcacgatgggttgtaccaaggattgagcacagccactaaagatacctatgatgcgctccacatgcaggccctgccgccaagacgcgccaagagaagcggatctggcgtgaagcagaccctgaatttcgacctgctgaagctggctggcgacgtggaatccaacccaggcccttctagaggccatatgaccgagtacaagcccacggtgcgcctcgccacccgcgacgacgtccccagggccgtacgcaccctcgccgccgcgttcgccgactaccccgccacgcgccacaccgtcgatccggaccgccacatcgagcgggtcaccgagctgcaagaactcttcctcacgcgcgtcgggctcgacatcggcaaggtgtgggtcgcggacgacggcgccgcggtggcggtctggaccacgccggagagcgtcgaagcgggggcggtgttcgccgagatcggcccgcgcatggccgagttgagcggttcccggctggccgcgcagcaacagatggaaggcctcctggcgccgcaccggcccaaggagcccgcgtggttcctggccaccgtcggcgtctcgcccgaccaccagggcaagggtctgggcagcgccgtcgtgctccccggagtggaggcggccgagcgcgccggggtgcccgccttcctggagacctccgcgccccgcaacctccccttctacgagcggctcggcttcaccgtcaccgccgacgtcgaggtgcccgaaggaccgcgcacctggtgcatgacccgcaagcccggtgcctga

SEQ ID NO: 8817 - DNA, 1944 bp, Artificial Sequence
  Synthetic Polynucloetide
atggccttaccagtgaccgccttgctcctgccgctggccttgctgctccacgccgccaggccggacatccagctgacacagagcccttctagcctgtctgccagcgtgggcgacagagtgaccatcacctgtagcacaagcagcagcgtgtcctacatgcactggtatcagcagaagcccggcaaggcccctaagctgctgatctacagcaccagcaatctggcctctggcgtgcccagcagattttctggctctggcagcggcaccgacttcaccttcacaatatccagcctccagcctgaggacattgccacctactactgccaccagtggtctagctaccccacattcggccagggcaccaaggtggaaatcaaactcgagggacagcctaaggccaatcctaccgtgacactgttccctccaagcagcgaagaactccaggccaacaaggccacacttgtgtgcctgatctccgacttctaccctggggctgtgacagtggcttggaaggccgatggatctcctgtgaaagccggcgtggaaaccaccaagccatccaagcagagcaacaacaaatacgccgccagctcctacctgagcctgacacctgagcagtggaagtcccacagatcctacagctgccaagtgacccacgaaggcagcaccgtggaaaagacagtggcccctacagagtgcagccccatcaagaccgatgtgattacaatggaccccaaggacaactgctccaaggacgccaacgataccctgctgctccagctgaccaacaccagcgcctactacatgtacttgttgctgctgctgaagtccgtggtgtacttcgccatcatcacatgctgcctgctgcggagaaccgccttctgctgcaacggcgagaagtctagggccaagcgatctggatctggagcaacaaacttctcactactcaaacaagcaggtgacgtggaggagaatcccgggcctactagtatggactggatttggcgcatccttttccttgtcggcgctgctaccggcgcgcattccttcgaaggagtgcattctcaggttcagctgcaagagtctggccctggacttgtgcggcctagccaaacactgagcctgacctgtaccgtgtccggcttcacaatcagctccggctacagctggcactgggtccgacaaccacctggcagaggactggaatggatcggctacatccagtacagcggcatcaccaactacaaccccagcctgaagtcccgcgtgaccatgctggtggacacctccaagaaccagttcagcctgagactgagcagcgtgacagccgccgatacagccgtgtactactgcgccagagaggactacgactaccactggtacttcgacgtgtggggccagggaaccaccgtgacagtttcttctacgcgtgcctctacaaagggaccctccgtgtttcctctggctcccagcagcaagtctacaagcggaggaacagccgctctgggctgcctggtcaaggattactttcccgagcctgtgaccgtgtcctggaatagcggagcactgacaagcggcgtgcacacctttccagccgtgctgcaaagcagcggcctgtactctctgagcagcgtggtcacagtgcctagctctagcctgggcacccagacctacatctgcaatgtgaaccacaagcctagcaacaccaaggtggacaagagagtggaacccaagagctgtgaagtgaaaaccgactccaccgaccacgtgaagcccaaagagacagagaacaccaagcagcccagcaagagctgccacaagcccaaggccatcgtgcacaccgagaaagtgaacatgatgagcctgaccgtgctgggcctgcggatgctgttcgccaaaaccgtggccgtgaacttcctgctgaccgccaagctgttcttcctc

SEQ ID NO: 8818 - DNA, 1878 bp, Artificial Sequence
  Synthetic Polynucloetide
atggccttaccagtgaccgccttgctcctgccgctggccttgctgctccacgccgccaggccggacatccagctgacacagagcccttctagcctgtctgccagcgtgggcgacagagtgaccatcacctgtagcacaagcagcagcgtgtcctacatgcactggtatcagcagaagcccggcaaggcccctaagctgctgatctacagcaccagcaatctggcctctggcgtgcccagcagattttctggctctggcagcggcaccgacttcaccttcacaatatccagcctccagcctgaggacattgccacctactactgccaccagtggtctagctaccccacattcggccagggcaccaaggtggaaatcaaactcgagggacagcctaaggccaatcctaccgtgacactgttccctccaagcagcgaagaactccaggccaacaaggccacacttgtgtgcctgatctccgacttctaccctggggctgtgacagtggcttggaaggccgatggatctcctgtgaaagccggcgtggaaaccaccaagccatccaagcagagcaacaacaaatacgccgccagctcctacctgagcctgacacctgagcagtggaagtcccacagatcctacagctgccaagtgacccacgaaggcagcaccgtggaaaagacagtggcccctacagagtgcagcggcagagccgattgcggcatcaccagcgccagctaccaccagggcgtgctgagcgccaccatcctgtacgagatcctgctgggcaaggccaccctgtacgccgtgctggtgtctgccctggtgctgatggctatggtcaagcggaaggacagccggggaagggccaagcgatctggatctggagcaacaaacttctcactactcaaacaagcaggtgacgtggaggagaatcccgggcctactagtatggactggatttggcgcatccttttccttgtcggcgctgctaccggcgcgcattccttcgaaggagtgcattctcaggttcagctgcaagagtctggccctggacttgtgcggcctagccaaacactgagcctgacctgtaccgtgtccggcttcacaatcagctccggctacagctggcactgggtccgacaaccacctggcagaggactggaatggatcggctacatccagtacagcggcatcaccaactacaaccccagcctgaagtcccgcgtgaccatgctggtggacacctccaagaaccagttcagcctgagactgagcagcgtgacagccgccgatacagccgtgtactactgcgccagagaggactacgactaccactggtacttcgacgtgtggggccagggaaccaccgtgacagtttcttctacgcgtgcctctacaaagggaccctccgtgtttcctctggctcccagcagcaagtctacaagcggaggaacagccgctctgggctgcctggtcaaggattactttcccgagcctgtgaccgtgtcctggaatagcggagcactgacaagcggcgtgcacacctttccagccgtgctgcaaagcagcggcctgtactctctgagcagcgtggtcacagtgcctagctctagcctgggcacccagacctacatctgcaatgtgaaccacaagcctagcaacaccaaggtggacaagagagtggaacccaagagctgtatccccgaggacacattcttcccaagcagcgacgtgccctgcgacgtgaagctggtggaaaagagcttcgagacagacaccaacctgaacttccagaacctgagcgtgatcggcttcagaatcctgctgctgaaagtggccggctttaacctgctgatgaccctgcggctgtggtccagc

SEQ ID NO: 8819 - DNA, 1878 bp, Artificial Sequence
  Synthetic Polynucloetide
atggccttaccagtgaccgccttgctcctgccgctggccttgctgctccacgccgccaggccggacatccagctgacacagagcccttctagcctgtctgccagcgtgggcgacagagtgaccatcacctgtagcacaagcagcagcgtgtcctacatgcactggtatcagcagaagcccggcaaggcccctaagctgctgatctacagcaccagcaatctggcctctggcgtgcccagcagattttctggctctggcagcggcaccgacttcaccttcacaatatccagcctccagcctgaggacattgccacctactactgccaccagtggtctagctaccccacattcggccagggcaccaaggtggaaatcaaactcgagggacagcctaaggccaatcctaccgtgacactgttccctccaagcagcgaagaactccaggccaacaaggccacacttgtgtgcctgatctccgacttctaccctggggctgtgacagtggcttggaaggccgatggatctcctgtgaaagccggcgtggaaaccaccaagccatccaagcagagcaacaacaaatacgccgccagctcctacctgagcctgacacctgagcagtggaagtcccacagatcctacagctgccaagtgacccacgaaggcagcaccgtggaaaagacagtggcccctacagagtgcagcggcagagccgattgcggctttaccagcgagagctaccagcagggcgtgctgagcgccaccatcctgtacgagatcctgctgggcaaggccaccctgtacgccgtgctggtgtctgccctggtgctgatggctatggtcaagcggaaggacagccggggaagggccaagcgatctggatctggagcaacaaacttctcactactcaaacaagcaggtgacgtggaggagaatcccgggcctactagtatggactggatttggcgcatccttttccttgtcggcgctgctaccggcgcgcattccttcgaaggagtgcattctcaggttcagctgcaagagtctggccctggacttgtgcggcctagccaaacactgagcctgacctgtaccgtgtccggcttcacaatcagctccggctacagctggcactgggtccgacaaccacctggcagaggactggaatggatcggctacatccagtacagcggcatcaccaactacaaccccagcctgaagtcccgcgtgaccatgctggtggacacctccaagaaccagttcagcctgagactgagcagcgtgacagccgccgatacagccgtgtactactgcgccagagaggactacgactaccactggtacttcgacgtgtggggccagggaaccaccgtgacagtttcttctacgcgtgcctctacaaagggaccctccgtgtttcctctggctcccagcagcaagtctacaagcggaggaacagccgctctgggctgcctggtcaaggattactttcccgagcctgtgaccgtgtcctggaatagcggagcactgacaagcggcgtgcacacctttccagccgtgctgcaaagcagcggcctgtactctctgagcagcgtggtcacagtgcctagctctagcctgggcacccagacctacatctgcaatgtgaaccacaagcctagcaacaccaaggtggacaagagagtggaacccaagagctgtatccccgaggacacattcttcccaagccccgagagcagctgcgacgtgaagctggtggaaaagagcttcgagacagacaccaacctgaacttccagaacctgagcgtgatcggcttcagaatcctgctgctgaaagtggccggctttaacctgctgatgaccctgcggctgtggtccagc

SEQ ID NO: 8820 - DNA, 1356 bp, Artificial Sequence
  Synthetic Polynucloetide
atggccttaccagtgaccgccttgctcctgccgctggccttgctgctccacgccgccaggccggacatccagctgacacagagcccttctagcctgtctgccagcgtgggcgacagagtgaccatcacctgtagcacaagcagcagcgtgtcctacatgcactggtatcagcagaagcccggcaaggcccctaagctgctgatctacagcaccagcaatctggcctctggcgtgcccagcagattttctggctctggcagcggcaccgacttcaccttcacaatatccagcctccagcctgaggacattgccacctactactgccaccagtggtctagctaccccacattcggccagggcaccaaggtggaaatcaaaggcggaggcggaagtggaggcggaggatctggcggcggaggctctggagtgcattctcaggttcagctgcaagagtctggccctggacttgtgcggcctagccaaacactgagcctgacctgtaccgtgtccggcttcacaatcagctccggctacagctggcactgggtccgacaaccacctggcagaggactggaatggatcggctacatccagtacagcggcatcaccaactacaaccccagcctgaagtcccgcgtgaccatgctggtggacacctccaagaaccagttcagcctgagactgagcagcgtgacagccgccgatacagccgtgtactactgcgccagagaggactacgactaccactggtacttcgacgtgtggggccagggaaccaccgtgacagtttcttctacgcgtgacggtaacgaggagatgggaggaatcactcaaaccccttacaaagtctcaatttcaggaacaactgttatccttacatgtccccagtatcctggcagcgagatcctttggcagcataacgacaagaatatagggggagatgaagacgataagaatatcggatctgacgaggatcacttgagcctgaaagagttctccgagcttgaacaaagcggatattatgtgtgctatccgcgcgggtcaaagccggaagacgctaacttttacctttatctccgagccagagtgtgcgaaaattgcatggaaatggacgttatgtccgttgctacaatagttatcgtagatatatgcatcacgggtggactgcttctgctggtttattattggtccaagaatagaaaggccaaagctaaacccgtgaccagaggcgctggcgcaggcggaaggcaaaggggacaaaacaaagaacggccaccaccagtgccaaatccagattatgagcctattcggaaaggacagagggacctgtactctggcctgaatcagagaagaatc

SEQ ID NO: 8821 - DNA, 1251 bp, Artificial Sequence
  Synthetic Polynucloetide
atggccttaccagtgaccgccttgctcctgccgctggccttgctgctccacgccgccaggccggacatccagctgacacagagcccttctagcctgtctgccagcgtgggcgacagagtgaccatcacctgtagcacaagcagcagcgtgtcctacatgcactggtatcagcagaagcccggcaaggcccctaagctgctgatctacagcaccagcaatctggcctctggcgtgcccagcagattttctggctctggcagcggcaccgacttcaccttcacaatatccagcctccagcctgaggacattgccacctactactgccaccagtggtctagctaccccacattcggccagggcaccaaggtggaaatcaaaggcggaggcggaagtggaggcggaggatctggcggcggaggctctggagtgcattctcaggttcagctgcaagagtctggccctggacttgtgcggcctagccaaacactgagcctgacctgtaccgtgtccggcttcacaatcagctccggctacagctggcactgggtccgacaaccacctggcagaggactggaatggatcggctacatccagtacagcggcatcaccaactacaaccccagcctgaagtcccgcgtgaccatgctggtggacacctccaagaaccagttcagcctgagactgagcagcgtgacagccgccgatacagccgtgtactactgcgccagagaggactacgactaccactggtacttcgacgtgtggggccagggaaccaccgtgacagtttcttctacgcgtttcaagatccccatcgaggaactggaagatcgggtgttcgtgaactgcaacacctctatcacctgggtggaaggcaccgtgggaacactgctgagcgacatcaccagactggacctcggcaagcggattctggaccctcggggcatctacagatgcaacggcaccgacatctacaaggacaaagaaagcaccgtgcaggtccactacagaatgtgccagtcctgcgtggaactggaccctgctacagtggccggcatcatcgtgaccgatgtgatcgctactctgctgctggctctgggagtgttctgcttcgccggacacgaaacaggcagactgtctggcgctgccgatacacaggccctgctgagaaacgaccaagtgtatcagcccctgcgcgacagagatgatgcccagtattctcacctcggcggcaactgggctagaaacaag

SEQ ID NO: 8822 - DNA, 1281 bp, Artificial Sequence
  Synthetic Polynucloetide
atggccttaccagtgaccgccttgctcctgccgctggccttgctgctccacgccgccaggccggacatccagctgacacagagcccttctagcctgtctgccagcgtgggcgacagagtgaccatcacctgtagcacaagcagcagcgtgtcctacatgcactggtatcagcagaagcccggcaaggcccctaagctgctgatctacagcaccagcaatctggcctctggcgtgcccagcagattttctggctctggcagcggcaccgacttcaccttcacaatatccagcctccagcctgaggacattgccacctactactgccaccagtggtctagctaccccacattcggccagggcaccaaggtggaaatcaaaggcggaggcggaagtggaggcggaggatctggcggcggaggctctggagtgcattctcaggttcagctgcaagagtctggccctggacttgtgcggcctagccaaacactgagcctgacctgtaccgtgtccggcttcacaatcagctccggctacagctggcactgggtccgacaaccacctggcagaggactggaatggatcggctacatccagtacagcggcatcaccaactacaaccccagcctgaagtcccgcgtgaccatgctggtggacacctccaagaaccagttcagcctgagactgagcagcgtgacagccgccgatacagccgtgtactactgcgccagagaggactacgactaccactggtacttcgacgtgtggggccagggaaccaccgtgacagtttcttctacgcgtcagagcatcaagggcaaccacctggtcaaggtgtacgactaccaagaggacggcagcgtgctgctgacatgtgatgccgaggccaagaacatcacctggtttaaggacggcaagatgatcggcttcctgaccgaggacaagaagaagtggaacctgggcagcaacgctaaggaccccagaggcatgtatcagtgcaagggcagccagaacaagagcaagcccctccaggtgtactaccggatgtgccagaactgcatcgagctgaacgccgctaccatcagcggctttctgttcgccgagatcgtgtccatcttcgtgctggccgtgggcgtgtactttatcgctggacaggatggcgtgcggcagagcagagcttccgataagcaaaccctgctgcctaacgaccagctgtaccagcctctgaaggacagagaggacgaccagtacagccacctccagggcaatcagctgagaagaaac

SEQ ID NO: 8823 - DNA, 1230 bp, Artificial Sequence
  Synthetic Polynucloetide
atggccttaccagtgaccgccttgctcctgccgctggccttgctgctccacgccgccaggccggacatccagctgacacagagcccttctagcctgtctgccagcgtgggcgacagagtgaccatcacctgtagcacaagcagcagcgtgtcctacatgcactggtatcagcagaagcccggcaaggcccctaagctgctgatctacagcaccagcaatctggcctctggcgtgcccagcagattttctggctctggcagcggcaccgacttcaccttcacaatatccagcctccagcctgaggacattgccacctactactgccaccagtggtctagctaccccacattcggccagggcaccaaggtggaaatcaaaggcggaggcggaagtggaggcggaggatctggcggcggaggctctggagtgcattctcaggttcagctgcaagagtctggccctggacttgtgcggcctagccaaacactgagcctgacctgtaccgtgtccggcttcacaatcagctccggctacagctggcactgggtccgacaaccacctggcagaggactggaatggatcggctacatccagtacagcggcatcaccaactacaaccccagcctgaagtcccgcgtgaccatgctggtggacacctccaagaaccagttcagcctgagactgagcagcgtgacagccgccgatacagccgtgtactactgcgccagagaggactacgactaccactggtacttcgacgtgtggggccagggaaccaccgtgacagtttcttctacgcgtcagagttttgggttgttggaccctaaattgtgctatctgttggacggaatcctgttcatttacggagtgatcctgaccgcattgttcctgcgggttaagttttccagatccgcagacgcacccgcttaccaacaagggcagaaccaactctacaatgaacttaatttggggcggagggaagagtacgacgttctggacaaaaggaggggacgagatcccgagatgggcggaaagcctcagcgaaggaagaatccgcaagaggggctttataacgaactccagaaagataaaatggcagaagcctatagtgagattgggatgaagggagaaaggaggaggggtaaaggtcacgatgggttgtaccaaggattgagcacagccactaaagatacctatgatgcgctccacatgcaggccctgccgccaaga

SEQ ID NO: 8824 - DNA, 1356 bp, Artificial Sequence
  Synthetic Polynucloetide
atggccttaccagtgaccgccttgctcctgccgctggccttgctgctccacgccgccaggccgggagtgcattctcaggttcagctgcaagagtctggccctggacttgtgcggcctagccaaacactgagcctgacctgtaccgtgtccggcttcacaatcagctccggctacagctggcactgggtccgacaaccacctggcagaggactggaatggatcggctacatccagtacagcggcatcaccaactacaaccccagcctgaagtcccgcgtgaccatgctggtggacacctccaagaaccagttcagcctgagactgagcagcgtgacagccgccgatacagccgtgtactactgcgccagagaggactacgactaccactggtacttcgacgtgtggggccagggaaccaccgtgacagtttcttctggcggaggcggaagtggaggcggaggatctggcggcggaggctctgacatccagctgacacagagcccttctagcctgtctgccagcgtgggcgacagagtgaccatcacctgtagcacaagcagcagcgtgtcctacatgcactggtatcagcagaagcccggcaaggcccctaagctgctgatctacagcaccagcaatctggcctctggcgtgcccagcagattttctggctctggcagcggcaccgacttcaccttcacaatatccagcctccagcctgaggacattgccacctactactgccaccagtggtctagctaccccacattcggccagggcaccaaggtggaaatcaaaacgcgtgacggtaacgaggagatgggaggaatcactcaaaccccttacaaagtctcaatttcaggaacaactgttatccttacatgtccccagtatcctggcagcgagatcctttggcagcataacgacaagaatatagggggagatgaagacgataagaatatcggatctgacgaggatcacttgagcctgaaagagttctccgagcttgaacaaagcggatattatgtgtgctatccgcgcgggtcaaagccggaagacgctaacttttacctttatctccgagccagagtgtgcgaaaattgcatggaaatggacgttatgtccgttgctacaatagttatcgtagatatatgcatcacgggtggactgcttctgctggtttattattggtccaagaatagaaaggccaaagctaaacccgtgaccagaggcgctggcgcaggcggaaggcaaaggggacaaaacaaagaacggccaccaccagtgccaaatccagattatgagcctattcggaaaggacagagggacctgtactctggcctgaatcagagaagaatc

SEQ ID NO: 8825 - DNA, 1251 bp, Artificial Sequence
  Synthetic Polynucloetide
atggccttaccagtgaccgccttgctcctgccgctggccttgctgctccacgccgccaggccgggagtgcattctcaggttcagctgcaagagtctggccctggacttgtgcggcctagccaaacactgagcctgacctgtaccgtgtccggcttcacaatcagctccggctacagctggcactgggtccgacaaccacctggcagaggactggaatggatcggctacatccagtacagcggcatcaccaactacaaccccagcctgaagtcccgcgtgaccatgctggtggacacctccaagaaccagttcagcctgagactgagcagcgtgacagccgccgatacagccgtgtactactgcgccagagaggactacgactaccactggtacttcgacgtgtggggccagggaaccaccgtgacagtttcttctggcggaggcggaagtggaggcggaggatctggcggcggaggctctgacatccagctgacacagagcccttctagcctgtctgccagcgtgggcgacagagtgaccatcacctgtagcacaagcagcagcgtgtcctacatgcactggtatcagcagaagcccggcaaggcccctaagctgctgatctacagcaccagcaatctggcctctggcgtgcccagcagattttctggctctggcagcggcaccgacttcaccttcacaatatccagcctccagcctgaggacattgccacctactactgccaccagtggtctagctaccccacattcggccagggcaccaaggtggaaatcaaaacgcgtttcaagatccccatcgaggaactggaagatcgggtgttcgtgaactgcaacacctctatcacctgggtggaaggcaccgtgggaacactgctgagcgacatcaccagactggacctcggcaagcggattctggaccctcggggcatctacagatgcaacggcaccgacatctacaaggacaaagaaagcaccgtgcaggtccactacagaatgtgccagtcctgcgtggaactggaccctgctacagtggccggcatcatcgtgaccgatgtgatcgctactctgctgctggctctgggagtgttctgcttcgccggacacgaaacaggcagactgtctggcgctgccgatacacaggccctgctgagaaacgaccaagtgtatcagcccctgcgcgacagagatgatgcccagtattctcacctcggcggcaactgggctagaaacaag

SEQ ID NO: 8826 - DNA, 1281 bp, Artificial Sequence
  Synthetic Polynucloetide
atggccttaccagtgaccgccttgctcctgccgctggccttgctgctccacgccgccaggccgggagtgcattctcaggttcagctgcaagagtctggccctggacttgtgcggcctagccaaacactgagcctgacctgtaccgtgtccggcttcacaatcagctccggctacagctggcactgggtccgacaaccacctggcagaggactggaatggatcggctacatccagtacagcggcatcaccaactacaaccccagcctgaagtcccgcgtgaccatgctggtggacacctccaagaaccagttcagcctgagactgagcagcgtgacagccgccgatacagccgtgtactactgcgccagagaggactacgactaccactggtacttcgacgtgtggggccagggaaccaccgtgacagtttcttctggcggaggcggaagtggaggcggaggatctggcggcggaggctctgacatccagctgacacagagcccttctagcctgtctgccagcgtgggcgacagagtgaccatcacctgtagcacaagcagcagcgtgtcctacatgcactggtatcagcagaagcccggcaaggcccctaagctgctgatctacagcaccagcaatctggcctctggcgtgcccagcagattttctggctctggcagcggcaccgacttcaccttcacaatatccagcctccagcctgaggacattgccacctactactgccaccagtggtctagctaccccacattcggccagggcaccaaggtggaaatcaaaacgcgtcagagcatcaagggcaaccacctggtcaaggtgtacgactaccaagaggacggcagcgtgctgctgacatgtgatgccgaggccaagaacatcacctggtttaaggacggcaagatgatcggcttcctgaccgaggacaagaagaagtggaacctgggcagcaacgctaaggaccccagaggcatgtatcagtgcaagggcagccagaacaagagcaagcccctccaggtgtactaccggatgtgccagaactgcatcgagctgaacgccgctaccatcagcggctttctgttcgccgagatcgtgtccatcttcgtgctggccgtgggcgtgtactttatcgctggacaggatggcgtgcggcagagcagagcttccgataagcaaaccctgctgcctaacgaccagctgtaccagcctctgaaggacagagaggacgaccagtacagccacctccagggcaatcagctgagaagaaac

SEQ ID NO: 8827 - DNA, 1230 bp, Artificial Sequence
  Synthetic Polynucloetide
atggccttaccagtgaccgccttgctcctgccgctggccttgctgctccacgccgccaggccgggagtgcattctcaggttcagctgcaagagtctggccctggacttgtgcggcctagccaaacactgagcctgacctgtaccgtgtccggcttcacaatcagctccggctacagctggcactgggtccgacaaccacctggcagaggactggaatggatcggctacatccagtacagcggcatcaccaactacaaccccagcctgaagtcccgcgtgaccatgctggtggacacctccaagaaccagttcagcctgagactgagcagcgtgacagccgccgatacagccgtgtactactgcgccagagaggactacgactaccactggtacttcgacgtgtggggccagggaaccaccgtgacagtttcttctggcggaggcggaagtggaggcggaggatctggcggcggaggctctgacatccagctgacacagagcccttctagcctgtctgccagcgtgggcgacagagtgaccatcacctgtagcacaagcagcagcgtgtcctacatgcactggtatcagcagaagcccggcaaggcccctaagctgctgatctacagcaccagcaatctggcctctggcgtgcccagcagattttctggctctggcagcggcaccgacttcaccttcacaatatccagcctccagcctgaggacattgccacctactactgccaccagtggtctagctaccccacattcggccagggcaccaaggtggaaatcaaaacgcgtcagagttttgggttgttggaccctaaattgtgctatctgttggacggaatcctgttcatttacggagtgatcctgaccgcattgttcctgcgggttaagttttccagatccgcagacgcacccgcttaccaacaagggcagaaccaactctacaatgaacttaatttggggcggagggaagagtacgacgttctggacaaaaggaggggacgagatcccgagatgggcggaaagcctcagcgaaggaagaatccgcaagaggggctttataacgaactccagaaagataaaatggcagaagcctatagtgagattgggatgaagggagaaaggaggaggggtaaaggtcacgatgggttgtaccaaggattgagcacagccactaaagatacctatgatgcgctccacatgcaggccctgccgccaaga

SEQ ID NO: 8828 - DNA, 1932 bp, Artificial Sequence
  Synthetic Polynucloetide
atggccttaccagtgaccgccttgctcctgccgctggccttgctgctccacgccgccaggccggacatccagctgacacagagcccttctagcctgtctgccagcgtgggcgacagagtgaccatcacctgtagcacaagcagcagcgtgtcctacatgcactggtatcagcagaagcccggcaaggcccctaagctgctgatctacagcaccagcaatctggcctctggcgtgcccagcagattttctggctctggcagcggcaccgacttcaccttcacaatatccagcctccagcctgaggacattgccacctactactgccaccagtggtctagctaccccacattcggccagggcaccaaggtggaaatcaaaggcggaggcggaagtggaggcggaggatctggcggcggaggctctggagtgcattctcaggttcagctgcaagagtctggccctggacttgtgcggcctagccaaacactgagcctgacctgtaccgtgtccggcttcacaatcagctccggctacagctggcactgggtccgacaaccacctggcagaggactggaatggatcggctacatccagtacagcggcatcaccaactacaaccccagcctgaagtcccgcgtgaccatgctggtggacacctccaagaaccagttcagcctgagactgagcagcgtgacagccgccgatacagccgtgtactactgcgccagagaggactacgactaccactggtacttcgacgtgtggggccagggaaccaccgtgacagtttcttctacgcgtgggagcggcatccagaaccctgatcctgccgtgtaccagctgcgggatagcaagagcagcgacaagagcgtgtgtctgttcaccgacttcgacagccagaccaacgtgtcccagagcaaggactccgacgtgtacatcaccgataagaccgtgctggacatgcggagcatggacttcaagagcaactccgccgtggcctggtccaacaagtccgatttcgcctgcgccaacgccttcaacaacagcattatccccgaggacacattcttcccaagccccgagagcagctgcgacgtgaagctggtggaaaagagcttcgagacagacaccaacctgaacttccagaacctgagcgtgatcggcttcagaatcctgctgctgaaagtggccggctttaacctgctgatgaccctgcggctgtggtccagccgcgccaagagaagcggatctggcgtgaagcagaccctgaatttcgacctgctgaagctggctggcgacgtggaatccaacccaggcccttctagaggccatatgaccgagtacaagcccacggtgcgcctcgccacccgcgacgacgtccccagggccgtacgcaccctcgccgccgcgttcgccgactaccccgccacgcgccacaccgtcgatccggaccgccacatcgagcgggtcaccgagctgcaagaactcttcctcacgcgcgtcgggctcgacatcggcaaggtgtgggtcgcggacgacggcgccgcggtggcggtctggaccacgccggagagcgtcgaagcgggggcggtgttcgccgagatcggcccgcgcatggccgagttgagcggttcccggctggccgcgcagcaacagatggaaggcctcctggcgccgcaccggcccaaggagcccgcgtggttcctggccaccgtcggcgtctcgcccgaccaccagggcaagggtctgggcagcgccgtcgtgctccccggagtggaggcggccgagcgcgccggggtgcccgccttcctggagacctccgcgccccgcaacctccccttctacgagcggctcggcttcaccgtcaccgccgacgtcgaggtgcccgaaggaccgcgcacctggtgcatgacccgcaagcccggtgcctga

SEQ ID NO: 8829 - DNA, 2028 bp, Artificial Sequence
  Synthetic Polynucloetide
atggccttaccagtgaccgccttgctcctgccgctggccttgctgctccacgccgccaggccggacatccagctgacacagagcccttctagcctgtctgccagcgtgggcgacagagtgaccatcacctgtagcacaagcagcagcgtgtcctacatgcactggtatcagcagaagcccggcaaggcccctaagctgctgatctacagcaccagcaatctggcctctggcgtgcccagcagattttctggctctggcagcggcaccgacttcaccttcacaatatccagcctccagcctgaggacattgccacctactactgccaccagtggtctagctaccccacattcggccagggcaccaaggtggaaatcaaaggcggaggcggaagtggaggcggaggatctggcggcggaggctctggagtgcattctcaggttcagctgcaagagtctggccctggacttgtgcggcctagccaaacactgagcctgacctgtaccgtgtccggcttcacaatcagctccggctacagctggcactgggtccgacaaccacctggcagaggactggaatggatcggctacatccagtacagcggcatcaccaactacaaccccagcctgaagtcccgcgtgaccatgctggtggacacctccaagaaccagttcagcctgagactgagcagcgtgacagccgccgatacagccgtgtactactgcgccagagaggactacgactaccactggtacttcgacgtgtggggccagggaaccaccgtgacagtttcttctctcgaggacctgaagaacgtgttcccacctgaggtggccgtgttcgagcctagcgaggccgagatcagccacacccagaaagccaccctcgtgtgcctggctaccggcttctaccccgaccatgtggaactgtcttggtgggtcaacggcaaagaggtgcacagcggcgtgtctaccgacccccagccactgaaagaacagcccgccctgaacgacagccggtactgcctgagcagcagactgagagtgtccgccaccttctggcagaacccccggaaccacttcagatgccaggtgcagttctacggcctgagcgagaacgacgagtggacccaggacagagccaagcccgtgacccagatcgtgtctgccgaagcctggggcagagccgattgcggctttaccagcgagagctaccagcagggcgtgctgagcgccaccatcctgtacgagatcctgctgggcaaggccaccctgtacgccgtgctggtgtctgccctggtgctgatggctatggtcaagcggaaggacagccggggaagggccaagcgatctggatctggagcaacaaacttctcactactcaaacaagcaggtgacgtggaggagaatcccgggcctactagaggccatatgaccgagtacaagcccacggtgcgcctcgccacccgcgacgacgtccccagggccgtacgcaccctcgccgccgcgttcgccgactaccccgccacgcgccacaccgtcgatccggaccgccacatcgagcgggtcaccgagctgcaagaactcttcctcacgcgcgtcgggctcgacatcggcaaggtgtgggtcgcggacgacggcgccgcggtggcggtctggaccacgccggagagcgtcgaagcgggggcggtgttcgccgagatcggcccgcgcatggccgagttgagcggttcccggctggccgcgcagcaacagatggaaggcctcctggcgccgcaccggcccaaggagcccgcgtggttcctggccaccgtcggcgtctcgcccgaccaccagggcaagggtctgggcagcgccgtcgtgctccccggagtggaggcggccgagcgcgccggggtgcccgccttcctggagacctccgcgccccgcaacctccccttctacgagcggctcggcttcaccgtcaccgccgacgtcgaggtgcccgaaggaccgcgcacctggtgcatgacccgcaagcccggtgcctga

SEQ ID NO: 8830 - DNA, 2178 bp, Artificial Sequence
  Synthetic Polynucloetide
atggccttaccagtgaccgccttgctcctgccgctggccttgctgctccacgccgccaggccggacatccagctgacacagagcccttctagcctgtctgccagcgtgggcgacagagtgaccatcacctgtagcacaagcagcagcgtgtcctacatgcactggtatcagcagaagcccggcaaggcccctaagctgctgatctacagcaccagcaatctggcctctggcgtgcccagcagattttctggctctggcagcggcaccgacttcaccttcacaatatccagcctccagcctgaggacattgccacctactactgccaccagtggtctagctaccccacattcggccagggcaccaaggtggaaatcaaaggcggaggcggaagtggaggcggaggatctggcggcggaggctctggagtgcattctcaggttcagctgcaagagtctggccctggacttgtgcggcctagccaaacactgagcctgacctgtaccgtgtccggcttcacaatcagctccggctacagctggcactgggtccgacaaccacctggcagaggactggaatggatcggctacatccagtacagcggcatcaccaactacaaccccagcctgaagtcccgcgtgaccatgctggtggacacctccaagaaccagttcagcctgagactgagcagcgtgacagccgccgatacagccgtgtactactgcgccagagaggactacgactaccactggtacttcgacgtgtggggccagggaaccaccgtgacagtttcttctacgcgtgagcagaaactgatctcggaagaggatctggggagcggcaccccattcccttctctggcccctcccatcatgctgctggtggacggcaagcagcagatggtggtcgtgtgcctggtgctggatgtggccccacctggactggacagccccatctggtttagcgccggcaatggctctgccctggacgcctttacctacggcccaagccctgccaccgatggcacctggacaaatctggcccacctgagcctgcccagcgaggaactggcttcttgggagcctctcgtgtgccacacaggacctggcgctgagggacacagcagatccacccagcctatgcacctgtctggcgaggccagcaccgccagaacctgtcctcaggaacctctgagaggcacccctggcggagcactgtggctgggagtgctgagactgctgctgttcaagctgctgctgtttgacctgctgctgacctgctcctgtctgtgcgatcctgccggccctctgccttctcctgccaccaccacaagactgagagccctgggcagccacagactgcaccctgccacagagacaggcggcagagaggccacaagcagccctagaccccagcccagagacagaagatggggcgataccccccctggcagaaagcctggatctccagtccgcgccaagagaagcggatctggcgtgaagcagaccctgaatttcgacctgctgaagctggctggcgacgtggaatccaacccaggcccttctagatctagaggccatatgaccgagtacaagcccacggtgcgcctcgccacccgcgacgacgtccccagggccgtacgcaccctcgccgccgcgttcgccgactaccccgccacgcgccacaccgtcgatccggaccgccacatcgagcgggtcaccgagctgcaagaactcttcctcacgcgcgtcgggctcgacatcggcaaggtgtgggtcgcggacgacggcgccgcggtggcggtctggaccacgccggagagcgtcgaagcgggggcggtgttcgccgagatcggcccgcgcatggccgagttgagcggttcccggctggccgcgcagcaacagatggaaggcctcctggcgccgcaccggcccaaggagcccgcgtggttcctggccaccgtcggcgtctcgcccgaccaccagggcaagggtctgggcagcgccgtcgtgctccccggagtggaggcggccgagcgcgccggggtgcccgccttcctggagacctccgcgccccgcaacctccccttctacgagcggctcggcttcaccgtcaccgccgacgtcgaggtgcccgaaggaccgcgcacctggtgcatgacccgcaagcccggtgcctga

SEQ ID NO: 8831 - DNA, 1611 bp, Artificial Sequence
  Synthetic Polynucloetide
atggccttaccagtgaccgccttgctcctgccgctggccttgctgctccacgccgccaggccggacatccagctgacacagagcccttctagcctgtctgccagcgtgggcgacagagtgaccatcacctgtagcacaagcagcagcgtgtcctacatgcactggtatcagcagaagcccggcaaggcccctaagctgctgatctacagcaccagcaatctggcctctggcgtgcccagcagattttctggctctggcagcggcaccgacttcaccttcacaatatccagcctccagcctgaggacattgccacctactactgccaccagtggtctagctaccccacattcggccagggcaccaaggtggaaatcaaactcgaggacctgaagaacgtgttcccacctgaggtggccgtgttcgagcctagcgaggccgagatcagccacacccagaaagccaccctcgtgtgcctggctaccggcttctaccccgaccatgtggaactgtcttggtgggtcaacggcaaagaggtgcacagcggcgtgtctaccgacccccagccactgaaagaacagcccgccctgaacgacagccggtactgcctgagcagcagactgagagtgtccgccaccttctggcagaacccccggaaccacttcagatgccaggtgcagttctacggcctgagcgagaacgacgagtggacccaggacagagccaagcccgtgacccagatcgtgtctgccgaagcctggggcagagccgattgcggctttaccagcgagagctaccagcagggcgtgctgagcgccaccatcctgtacgagatcctgctgggcaaggccaccctgtacgccgtgctggtgtctgccctggtgctgatggctatggtcaagcggaaggacagccggggaagggccaagcgatctggatctggagcaacaaacttctcactactcaaacaagcaggtgacgtggaggagaatcccgggcctactagaggccatatgaccgagtacaagcccacggtgcgcctcgccacccgcgacgacgtccccagggccgtacgcaccctcgccgccgcgttcgccgactaccccgccacgcgccacaccgtcgatccggaccgccacatcgagcgggtcaccgagctgcaagaactcttcctcacgcgcgtcgggctcgacatcggcaaggtgtgggtcgcggacgacggcgccgcggtggcggtctggaccacgccggagagcgtcgaagcgggggcggtgttcgccgagatcggcccgcgcatggccgagttgagcggttcccggctggccgcgcagcaacagatggaaggcctcctggcgccgcaccggcccaaggagcccgcgtggttcctggccaccgtcggcgtctcgcccgaccaccagggcaagggtctgggcagcgccgtcgtgctccccggagtggaggcggccgagcgcgccggggtgcccgccttcctggagacctccgcgccccgcaacctccccttctacgagcggctcggcttcaccgtcaccgccgacgtcgaggtgcccgaaggaccgcgcacctggtgcatgacccgcaagcccggtgcctga

SEQ ID NO: 8832 - DNA, 918 bp, Artificial Sequence
  Synthetic Polynucloetide
atggccttaccagtgaccgccttgctcctgccgctggccttgctgctccacgccgccaggccggacatccagctgacacagagcccttctagcctgtctgccagcgtgggcgacagagtgaccatcacctgtagcacaagcagcagcgtgtcctacatgcactggtatcagcagaagcccggcaaggcccctaagctgctgatctacagcaccagcaatctggcctctggcgtgcccagcagattttctggctctggcagcggcaccgacttcaccttcacaatatccagcctccagcctgaggacattgccacctactactgccaccagtggtctagctaccccacattcggccagggcaccaaggtggaaatcaaactcgaggacctgaagaacgtgttcccacctgaggtggccgtgttcgagcctagcgaggccgagatcagccacacccagaaagccaccctcgtgtgcctggctaccggcttctaccccgaccatgtggaactgtcttggtgggtcaacggcaaagaggtgcacagcggcgtgtctaccgacccccagccactgaaagaacagcccgccctgaacgacagccggtactgcctgagcagcagactgagagtgtccgccaccttctggcagaacccccggaaccacttcagatgccaggtgcagttctacggcctgagcgagaacgacgagtggacccaggacagagccaagcccgtgacccagatcgtgtctgccgaagcctggggcagagccgattgcggctttaccagcgagagctaccagcagggcgtgctgagcgccaccatcctgtacgagatcctgctgggcaaggccaccctgtacgccgtgctggtgtctgccctggtgctgatggctatggtcaagcggaaggacagccgggga

SEQ ID NO: 8833 - DNA, 1362 bp, Artificial Sequence
  Synthetic Polynucloetide
atggactggatttggcgcatccttttccttgtcggcgctgctaccggcgcgcattccttcgaaggagtgcattctcaggttcagctgcaagagtctggccctggacttgtgcggcctagccaaacactgagcctgacctgtaccgtgtccggcttcacaatcagctccggctacagctggcactgggtccgacaaccacctggcagaggactggaatggatcggctacatccagtacagcggcatcaccaactacaaccccagcctgaagtcccgcgtgaccatgctggtggacacctccaagaaccagttcagcctgagactgagcagcgtgacagccgccgatacagccgtgtactactgcgccagagaggactacgactaccactggtacttcgacgtgtggggccagggaaccaccgtgacagtttcttctacgcgtatccagaaccctgatcctgccgtgtaccagctgcgggatagcaagagcagcgacaagagcgtgtgtctgttcaccgacttcgacagccagaccaacgtgtcccagagcaaggactccgacgtgtacatcaccgataagaccgtgctggacatgcggagcatggacttcaagagcaactccgccgtggcctggtccaacaagtccgatttcgcctgcgccaacgccttcaacaacagcattatccccgaggacacattcttcccaagccccgagagcagctgcgacgtgaagctggtggaaaagagcttcgagacagacaccaacctgaacttccagaacctgagcgtgatcggcttcagaatcctgctgctgaaagtggccggctttaacctgctgatgaccctgcggctgtggtccagccgcgccaagagaagcggatctggcgtgaagcagaccctgaatttcgacctgctgaagctggctggcgacgtggaatccaacccaggcccttctagaggccatatggccaagcctttgtctcaagaagaatccaccctcattgaaagagcaacggctacaatcaacagcatccccatctctgaagactacagcgtcgccagcgcagctctctctagcgacggccgcatcttcactggtgtcaatgtatatcattttactgggggaccttgtgcagaactcgtggtgctgggcactgctgctgctgcggcagctggcaacctgacttgtatcgtcgcgatcggaaatgagaacaggggcatcttgagcccctgcggacggtgccgacaggtgcttctcgatctgcatcctgggatcaaagccatagtgaaggacagtgatggacagccgacggcagttgggattcgtgaattgctgccctctggttatgtgtgggagggctga

SEQ ID NO: 8834 - DNA, 861 bp, Artificial Sequence
  Synthetic Polynucloetide
atggactggatttggcgcatccttttccttgtcggcgctgctaccggcgcgcattccttcgaaggagtgcattctcaggttcagctgcaagagtctggccctggacttgtgcggcctagccaaacactgagcctgacctgtaccgtgtccggcttcacaatcagctccggctacagctggcactgggtccgacaaccacctggcagaggactggaatggatcggctacatccagtacagcggcatcaccaactacaaccccagcctgaagtcccgcgtgaccatgctggtggacacctccaagaaccagttcagcctgagactgagcagcgtgacagccgccgatacagccgtgtactactgcgccagagaggactacgactaccactggtacttcgacgtgtggggccagggaaccaccgtgacagtttcttctacgcgtatccagaaccctgatcctgccgtgtaccagctgcgggatagcaagagcagcgacaagagcgtgtgtctgttcaccgacttcgacagccagaccaacgtgtcccagagcaaggactccgacgtgtacatcaccgataagaccgtgctggacatgcggagcatggacttcaagagcaactccgccgtggcctggtccaacaagtccgatttcgcctgcgccaacgccttcaacaacagcattatccccgaggacacattcttcccaagccccgagagcagctgcgacgtgaagctggtggaaaagagcttcgagacagacaccaacctgaacttccagaacctgagcgtgatcggcttcagaatcctgctgctgaaagtggccggctttaacctgctgatgaccctgcggctgtggtccagc

SEQ ID NO: 8835 - DNA, 1665 bp, Artificial Sequence
  Synthetic Polynucloetide
atggccttaccagtgaccgccttgctcctgccgctggccttgctgctccacgccgccaggccggacatccagctgacacagagcccttctagcctgtctgccagcgtgggcgacagagtgaccatcacctgtagcacaagcagcagcgtgtcctacatgcactggtatcagcagaagcccggcaaggcccctaagctgctgatctacagcaccagcaatctggcctctggcgtgcccagcagattttctggctctggcagcggcaccgacttcaccttcacaatatccagcctccagcctgaggacattgccacctactactgccaccagtggtctagctaccccacattcggccagggcaccaaggtggaaatcaaactcgaggggaaaccaattcccaaccctcttctgggactggattcaaccggcagcggcgaggacctgaagaacgtgttcccacctgaggtggccgtgttcgagcctagcgaggccgagatcagccacacccagaaagccaccctcgtgtgcctggctaccggcttctaccccgaccatgtggaactgtcttggtgggtcaacggcaaagaggtgcacagcggcgtgtgtaccgacccccagccactgaaagaacagcccgccctgaacgacagccggtactgcctgagcagcagactgagagtgtccgccaccttctggcagaacccccggaaccacttcagatgccaggtgcagttctacggcctgagcgagaacgacgagtggacccaggacagagccaagcccgtgacccagatcgtgtctgccgaagcctggggcagagccgattgcggctttaccagcgagagctaccagcagggcgtgctgagcgccaccatcctgtacgagatcctgctgggcaaggccaccctgtacgccgtgctggtgtctgccctggtgctgatggctatggtcaagcggaaggacagccggggaagggccaagcgatctggatctggagcaacaaacttctcactactcaaacaagcaggtgacgtggaggagaatcccgggcctactagaggccatatgaccgagtacaagcccacggtgcgcctcgccacccgcgacgacgtccccagggccgtacgcaccctcgccgccgcgttcgccgactaccccgccacgcgccacaccgtcgatccggaccgccacatcgagcgggtcaccgagctgcaagaactcttcctcacgcgcgtcgggctcgacatcggcaaggtgtgggtcgcggacgacggcgccgcggtggcggtctggaccacgccggagagcgtcgaagcgggggcggtgttcgccgagatcggcccgcgcatggccgagttgagcggttcccggctggccgcgcagcaacagatggaaggcctcctggcgccgcaccggcccaaggagcccgcgtggttcctggccaccgtcggcgtctcgcccgaccaccagggcaagggtctgggcagcgccgtcgtgctccccggagtggaggcggccgagcgcgccggggtgcccgccttcctggagacctccgcgccccgcaacctccccttctacgagcggctcggcttcaccgtcaccgccgacgtcgaggtgcccgaaggaccgcgcacctggtgcatgacccgcaagcccggtgcctga

SEQ ID NO: 8836 - DNA, 975 bp, Artificial Sequence
  Synthetic Polynucloetide
atggccttaccagtgaccgccttgctcctgccgctggccttgctgctccacgccgccaggccggacatccagctgacacagagcccttctagcctgtctgccagcgtgggcgacagagtgaccatcacctgtagcacaagcagcagcgtgtcctacatgcactggtatcagcagaagcccggcaaggcccctaagctgctgatctacagcaccagcaatctggcctctggcgtgcccagcagattttctggctctggcagcggcaccgacttcaccttcacaatatccagcctccagcctgaggacattgccacctactactgccaccagtggtctagctaccccacattcggccagggcaccaaggtggaaatcaaactcgaggggaaaccaattcccaaccctcttctgggactggattcaaccggcagcggcgaggacctgaagaacgtgttcccacctgaggtggccgtgttcgagcctagcgaggccgagatcagccacacccagaaagccaccctcgtgtgcctggctaccggcttctaccccgaccatgtggaactgtcttggtgggtcaacggcaaagaggtgcacagcggcgtgtgtaccgacccccagccactgaaagaacagcccgccctgaacgacagccggtactgcctgagcagcagactgagagtgtccgccaccttctggcagaacccccggaaccacttcagatgccaggtgcagttctacggcctgagcgagaacgacgagtggacccaggacagagccaagcccgtgacccagatcgtgtctgccgaagcctggggcagagccgattgcggctttaccagcgagagctaccagcagggcgtgctgagcgccaccatcctgtacgagatcctgctgggcaaggccaccctgtacgccgtgctggtgtctgccctggtgctgatggctatggtcaagcggaaggacagccggggatga

SEQ ID NO: 8837 - DNA, 1398 bp, Artificial Sequence
  Synthetic Polynucloetide
atggactggatttggcgcatccttttccttgtcggcgctgctaccggcgcgcattccttcgaaggagtgcattctcaggttcagctgcaagagtctggccctggacttgtgcggcctagccaaacactgagcctgacctgtaccgtgtccggcttcacaatcagctccggctacagctggcactgggtccgacaaccacctggcagaggactggaatggatcggctacatccagtacagcggcatcaccaactacaaccccagcctgaagtcccgcgtgaccatgctggtggacacctccaagaaccagttcagcctgagactgagcagcgtgacagccgccgatacagccgtgtactactgcgccagagaggactacgactaccactggtacttcgacgtgtggggccagggaaccaccgtgacagtttcttctacgcgtgagcagaaactgatctcggaagaggatgggagcggcatccagaaccctgatcctgccgtgtaccagctgcgggatagcaagagcagcgacaagagcgtgtgtctgttcaccgacttcgacagccagaccaacgtgtcccagagcaaggactccgacgtgtacatcaccgataagtgcgtgctggacatgcggagcatggacttcaagagcaactccgccgtggcctggtccaacaagtccgatttcgcctgcgccaacgccttcaacaacagcattatccccgaggacacattcttcccaagccccgagagcagctgcgacgtgaagctggtggaaaagagcttcgagacagacaccaacctgaacttccagaacctgagcgtgatcggcttcagaatcctgctgctgaaagtggccggctttaacctgctgatgaccctgcggctgtggtccagccgcgccaagagaagcggatctggcgtgaagcagaccctgaatttcgacctgctgaagctggctggcgacgtggaatccaacccaggcccttctagaggccatatggccaagcctttgtctcaagaagaatccaccctcattgaaagagcaacggctacaatcaacagcatccccatctctgaagactacagcgtcgccagcgcagctctctctagcgacggccgcatcttcactggtgtcaatgtatatcattttactgggggaccttgtgcagaactcgtggtgctgggcactgctgctgctgcggcagctggcaacctgacttgtatcgtcgcgatcggaaatgagaacaggggcatcttgagcccctgcggacggtgccgacaggtgcttctcgatctgcatcctgggatcaaagccatagtgaaggacagtgatggacagccgacggcagttgggattcgtgaattgctgccctctggttatgtgtgggagggctga

SEQ ID NO: 8838 - DNA, 900 bp, Artificial Sequence
  Synthetic Polynucloetide
atggactggatttggcgcatccttttccttgtcggcgctgctaccggcgcgcattccttcgaaggagtgcattctcaggttcagctgcaagagtctggccctggacttgtgcggcctagccaaacactgagcctgacctgtaccgtgtccggcttcacaatcagctccggctacagctggcactgggtccgacaaccacctggcagaggactggaatggatcggctacatccagtacagcggcatcaccaactacaaccccagcctgaagtcccgcgtgaccatgctggtggacacctccaagaaccagttcagcctgagactgagcagcgtgacagccgccgatacagccgtgtactactgcgccagagaggactacgactaccactggtacttcgacgtgtggggccagggaaccaccgtgacagtttcttctacgcgtgagcagaaactgatctcggaagaggatgggagcggcatccagaaccctgatcctgccgtgtaccagctgcgggatagcaagagcagcgacaagagcgtgtgtctgttcaccgacttcgacagccagaccaacgtgtcccagagcaaggactccgacgtgtacatcaccgataagtgcgtgctggacatgcggagcatggacttcaagagcaactccgccgtggcctggtccaacaagtccgatttcgcctgcgccaacgccttcaacaacagcattatccccgaggacacattcttcccaagccccgagagcagctgcgacgtgaagctggtggaaaagagcttcgagacagacaccaacctgaacttccagaacctgagcgtgatcggcttcagaatcctgctgctgaaagtggccggctttaacctgctgatgaccctgcggctgtggtccagctga

SEQ ID NO: 8839 - DNA, 1932 bp, Artificial Sequence
  Synthetic Polynucloetide
atggccttaccagtgaccgccttgctcctgccgctggccttgctgctccacgccgccaggccggacatccagctgacacagagcccttctagcctgtctgccagcgtgggcgacagagtgaccatcacctgtagcacaagcagcagcgtgtcctacatgcactggtatcagcagaagcccggcaaggcccctaagctgctgatctacagcaccagcaatctggcctctggcgtgcccagcagattttctggctctggcagcggcaccgacttcaccttcacaatatccagcctccagcctgaggacattgccacctactactgccaccagtggtctagctaccccacattcggccagggcaccaaggtggaaatcaaaggcggaggcggaagtggaggcggaggatctggcggcggaggctctggagtgcattctcaggttcagctgcaagagtctggccctggacttgtgcggcctagccaaacactgagcctgacctgtaccgtgtccggcttcacaatcagctccggctacagctggcactgggtccgacaaccacctggcagaggactggaatggatcggctacatccagtacagcggcatcaccaactacaaccccagcctgaagtcccgcgtgaccatgctggtggacacctccaagaaccagttcagcctgagactgagcagcgtgacagccgccgatacagccgtgtactactgcgccagagaggactacgactaccactggtacttcgacgtgtggggccagggaaccaccgtgacagtttcttctacgcgtgggagcggcatccagaaccctgatcctgccgtgtaccagctgcgggatagcaagagcagcgacaagagcgtgtgtctgttcaccgacttcgacagccagaccaacgtgtcccagagcaaggactccgacgtgtacatcaccgataagaccgtgctggacatgcggagcatggacttcaagagcaactccgccgtggcctggtccaacaagtccgatttcgcctgcgccaacgccttcaacaacagcattatccccgaggacacattcttcccaagcagcgacgtgccctgcgacgtgaagctggtggaaaagagcttcgagacagacaccaacctgaacttccagaacctgagcgtgatcggcttcagaatcctgctgctgaaagtggccggctttaacctgctgatgaccctgcggctgtggtccagccgcgccaagagaagcggatctggcgtgaagcagaccctgaatttcgacctgctgaagctggctggcgacgtggaatccaacccaggcccttctagaggccatatgaccgagtacaagcccacggtgcgcctcgccacccgcgacgacgtccccagggccgtacgcaccctcgccgccgcgttcgccgactaccccgccacgcgccacaccgtcgatccggaccgccacatcgagcgggtcaccgagctgcaagaactcttcctcacgcgcgtcgggctcgacatcggcaaggtgtgggtcgcggacgacggcgccgcggtggcggtctggaccacgccggagagcgtcgaagcgggggcggtgttcgccgagatcggcccgcgcatggccgagttgagcggttcccggctggccgcgcagcaacagatggaaggcctcctggcgccgcaccggcccaaggagcccgcgtggttcctggccaccgtcggcgtctcgcccgaccaccagggcaagggtctgggcagcgccgtcgtgctccccggagtggaggcggccgagcgcgccggggtgcccgccttcctggagacctccgcgccccgcaacctccccttctacgagcggctcggcttcaccgtcaccgccgacgtcgaggtgcccgaaggaccgcgcacctggtgcatgacccgcaagcccggtgcctga

SEQ ID NO: 8840 - DNA, 2028 bp, Artificial Sequence
  Synthetic Polynucloetide
atggccttaccagtgaccgccttgctcctgccgctggccttgctgctccacgccgccaggccggacatccagctgacacagagcccttctagcctgtctgccagcgtgggcgacagagtgaccatcacctgtagcacaagcagcagcgtgtcctacatgcactggtatcagcagaagcccggcaaggcccctaagctgctgatctacagcaccagcaatctggcctctggcgtgcccagcagattttctggctctggcagcggcaccgacttcaccttcacaatatccagcctccagcctgaggacattgccacctactactgccaccagtggtctagctaccccacattcggccagggcaccaaggtggaaatcaaaggcggaggcggaagtggaggcggaggatctggcggcggaggctctggagtgcattctcaggttcagctgcaagagtctggccctggacttgtgcggcctagccaaacactgagcctgacctgtaccgtgtccggcttcacaatcagctccggctacagctggcactgggtccgacaaccacctggcagaggactggaatggatcggctacatccagtacagcggcatcaccaactacaaccccagcctgaagtcccgcgtgaccatgctggtggacacctccaagaaccagttcagcctgagactgagcagcgtgacagccgccgatacagccgtgtactactgcgccagagaggactacgactaccactggtacttcgacgtgtggggccagggaaccaccgtgacagtttcttctctcgaggacctgaagaacgtgttcccacctgaggtggccgtgttcgagcctagcaaggccgagatcgcccacacccagaaagccaccctcgtgtgcctggctaccggcttctaccccgaccatgtggaactgtcttggtgggtcaacggcaaagaggtgcacagcggcgtgtctaccgacccccagccactgaaagaacagcccgccctgaacgacagccggtactgcctgagcagcagactgagagtgtccgccaccttctggcagaacccccggaaccacttcagatgccaggtgcagttctacggcctgagcgagaacgacgagtggacccaggacagagccaagcccgtgacccagatcgtgtctgccgaagcctggggcagagccgattgcggcatcaccagcgccagctaccaccagggcgtgctgagcgccaccatcctgtacgagatcctgctgggcaaggccaccctgtacgccgtgctggtgtctgccctggtgctgatggctatggtcaagcggaaggacagccggggaagggccaagcgatctggatctggagcaacaaacttctcactactcaaacaagcaggtgacgtggaggagaatcccgggcctactagaggccatatgaccgagtacaagcccacggtgcgcctcgccacccgcgacgacgtccccagggccgtacgcaccctcgccgccgcgttcgccgactaccccgccacgcgccacaccgtcgatccggaccgccacatcgagcgggtcaccgagctgcaagaactcttcctcacgcgcgtcgggctcgacatcggcaaggtgtgggtcgcggacgacggcgccgcggtggcggtctggaccacgccggagagcgtcgaagcgggggcggtgttcgccgagatcggcccgcgcatggccgagttgagcggttcccggctggccgcgcagcaacagatggaaggcctcctggcgccgcaccggcccaaggagcccgcgtggttcctggccaccgtcggcgtctcgcccgaccaccagggcaagggtctgggcagcgccgtcgtgctccccggagtggaggcggccgagcgcgccggggtgcccgccttcctggagacctccgcgccccgcaacctccccttctacgagcggctcggcttcaccgtcaccgccgacgtcgaggtgcccgaaggaccgcgcacctggtgcatgacccgcaagcccggtgcctga

SEQ ID NO: 8841 - DNA, 2097 bp, Artificial Sequence
  Synthetic Polynucloetide
atggccttaccagtgaccgccttgctcctgccgctggccttgctgctccacgccgccaggccggacatccagctgacacagagcccttctagcctgtctgccagcgtgggcgacagagtgaccatcacctgtagcacaagcagcagcgtgtcctacatgcactggtatcagcagaagcccggcaaggcccctaagctgctgatctacagcaccagcaatctggcctctggcgtgcccagcagattttctggctctggcagcggcaccgacttcaccttcacaatatccagcctccagcctgaggacattgccacctactactgccaccagtggtctagctaccccacattcggccagggcaccaaggtggaaatcaaaggcggaggcggaagtggaggcggaggatctggcggcggaggctctggagtgcattctcaggttcagctgcaagagtctggccctggacttgtgcggcctagccaaacactgagcctgacctgtaccgtgtccggcttcacaatcagctccggctacagctggcactgggtccgacaaccacctggcagaggactggaatggatcggctacatccagtacagcggcatcaccaactacaaccccagcctgaagtcccgcgtgaccatgctggtggacacctccaagaaccagttcagcctgagactgagcagcgtgacagccgccgatacagccgtgtactactgcgccagagaggactacgactaccactggtacttcgacgtgtggggccagggaaccaccgtgacagtttcttctacgcgtgggtctggaggcggaggcagcggcggaggcgggagcggcgacggtaacgaggagatgggaggaatcactcaaaccccttacaaagtctcaatttcaggaacaactgttatccttacatgtccccagtatcctggcagcgagatcctttggcagcataacgacaagaatatagggggagatgaagacgataagaatatcggatctgacgaggatcacttgagcctgaaagagttctccgagcttgaacaaagcggatattatgtgtgctatccgcgcgggtcaaagccggaagacgctaacttttacctttatctccgagccagagtgtgcgaaaattgcatggaaatggacgttatgtccgttgctacaatagttatcgtagatatatgcatcacgggtggactgcttctgctggtttattattggtccaagaatagaaaggccaaagctaaacccgtgaccagaggcgctggcgcaggcggaaggcaaaggggacaaaacaaagaacggccaccaccagtgccaaatccagattatgagcctattcggaaaggacagagggacctgtactctggcctgaatcagagaagaatccgcgccaagagaagcggatctggcgtgaagcagaccctgaatttcgacctgctgaagctggctggcgacgtggaatccaacccaggcccttctagaggccatatgaccgagtacaagcccacggtgcgcctcgccacccgcgacgacgtccccagggccgtacgcaccctcgccgccgcgttcgccgactaccccgccacgcgccacaccgtcgatccggaccgccacatcgagcgggtcaccgagctgcaagaactcttcctcacgcgcgtcgggctcgacatcggcaaggtgtgggtcgcggacgacggcgccgcggtggcggtctggaccacgccggagagcgtcgaagcgggggcggtgttcgccgagatcggcccgcgcatggccgagttgagcggttcccggctggccgcgcagcaacagatggaaggcctcctggcgccgcaccggcccaaggagcccgcgtggttcctggccaccgtcggcgtctcgcccgaccaccagggcaagggtctgggcagcgccgtcgtgctccccggagtggaggcggccgagcgcgccggggtgcccgccttcctggagacctccgcgccccgcaacctccccttctacgagcggctcggcttcaccgtcaccgccgacgtcgaggtgcccgaaggaccgcgcacctggtgcatgacccgcaagcccggtgcctga

SEQ ID NO: 8842 - DNA, 1992 bp, Artificial Sequence
  Synthetic Polynucloetide
atggccttaccagtgaccgccttgctcctgccgctggccttgctgctccacgccgccaggccggacatccagctgacacagagcccttctagcctgtctgccagcgtgggcgacagagtgaccatcacctgtagcacaagcagcagcgtgtcctacatgcactggtatcagcagaagcccggcaaggcccctaagctgctgatctacagcaccagcaatctggcctctggcgtgcccagcagattttctggctctggcagcggcaccgacttcaccttcacaatatccagcctccagcctgaggacattgccacctactactgccaccagtggtctagctaccccacattcggccagggcaccaaggtggaaatcaaaggcggaggcggaagtggaggcggaggatctggcggcggaggctctggagtgcattctcaggttcagctgcaagagtctggccctggacttgtgcggcctagccaaacactgagcctgacctgtaccgtgtccggcttcacaatcagctccggctacagctggcactgggtccgacaaccacctggcagaggactggaatggatcggctacatccagtacagcggcatcaccaactacaaccccagcctgaagtcccgcgtgaccatgctggtggacacctccaagaaccagttcagcctgagactgagcagcgtgacagccgccgatacagccgtgtactactgcgccagagaggactacgactaccactggtacttcgacgtgtggggccagggaaccaccgtgacagtttcttctacgcgtgggtctggaggcggaggcagcggcggaggcgggagcggcttcaagatccccatcgaggaactggaagatcgggtgttcgtgaactgcaacacctctatcacctgggtggaaggcaccgtgggaacactgctgagcgacatcaccagactggacctcggcaagcggattctggaccctcggggcatctacagatgcaacggcaccgacatctacaaggacaaagaaagcaccgtgcaggtccactacagaatgtgccagtcctgcgtggaactggaccctgctacagtggccggcatcatcgtgaccgatgtgatcgctactctgctgctggctctgggagtgttctgcttcgccggacacgaaacaggcagactgtctggcgctgccgatacacaggccctgctgagaaacgaccaagtgtatcagcccctgcgcgacagagatgatgcccagtattctcacctcggcggcaactgggctagaaacaagcgcgccaagagaagcggatctggcgtgaagcagaccctgaatttcgacctgctgaagctggctggcgacgtggaatccaacccaggcccttctagaggccatatgaccgagtacaagcccacggtgcgcctcgccacccgcgacgacgtccccagggccgtacgcaccctcgccgccgcgttcgccgactaccccgccacgcgccacaccgtcgatccggaccgccacatcgagcgggtcaccgagctgcaagaactcttcctcacgcgcgtcgggctcgacatcggcaaggtgtgggtcgcggacgacggcgccgcggtggcggtctggaccacgccggagagcgtcgaagcgggggcggtgttcgccgagatcggcccgcgcatggccgagttgagcggttcccggctggccgcgcagcaacagatggaaggcctcctggcgccgcaccggcccaaggagcccgcgtggttcctggccaccgtcggcgtctcgcccgaccaccagggcaagggtctgggcagcgccgtcgtgctccccggagtggaggcggccgagcgcgccggggtgcccgccttcctggagacctccgcgccccgcaacctccccttctacgagcggctcggcttcaccgtcaccgccgacgtcgaggtgcccgaaggaccgcgcacctggtgcatgacccgcaagcccggtgcctga

SEQ ID NO: 8843 - DNA, 2022 bp, Artificial Sequence
  Synthetic Polynucloetide
atggccttaccagtgaccgccttgctcctgccgctggccttgctgctccacgccgccaggccggacatccagctgacacagagcccttctagcctgtctgccagcgtgggcgacagagtgaccatcacctgtagcacaagcagcagcgtgtcctacatgcactggtatcagcagaagcccggcaaggcccctaagctgctgatctacagcaccagcaatctggcctctggcgtgcccagcagattttctggctctggcagcggcaccgacttcaccttcacaatatccagcctccagcctgaggacattgccacctactactgccaccagtggtctagctaccccacattcggccagggcaccaaggtggaaatcaaaggcggaggcggaagtggaggcggaggatctggcggcggaggctctggagtgcattctcaggttcagctgcaagagtctggccctggacttgtgcggcctagccaaacactgagcctgacctgtaccgtgtccggcttcacaatcagctccggctacagctggcactgggtccgacaaccacctggcagaggactggaatggatcggctacatccagtacagcggcatcaccaactacaaccccagcctgaagtcccgcgtgaccatgctggtggacacctccaagaaccagttcagcctgagactgagcagcgtgacagccgccgatacagccgtgtactactgcgccagagaggactacgactaccactggtacttcgacgtgtggggccagggaaccaccgtgacagtttcttctacgcgtgggtctggaggcggaggcagcggcggaggcgggagcggccagagcatcaagggcaaccacctggtcaaggtgtacgactaccaagaggacggcagcgtgctgctgacatgtgatgccgaggccaagaacatcacctggtttaaggacggcaagatgatcggcttcctgaccgaggacaagaagaagtggaacctgggcagcaacgctaaggaccccagaggcatgtatcagtgcaagggcagccagaacaagagcaagcccctccaggtgtactaccggatgtgccagaactgcatcgagctgaacgccgctaccatcagcggctttctgttcgccgagatcgtgtccatcttcgtgctggccgtgggcgtgtactttatcgctggacaggatggcgtgcggcagagcagagcttccgataagcaaaccctgctgcctaacgaccagctgtaccagcctctgaaggacagagaggacgaccagtacagccacctccagggcaatcagctgagaagaaaccgcgccaagagaagcggatctggcgtgaagcagaccctgaatttcgacctgctgaagctggctggcgacgtggaatccaacccaggcccttctagaggccatatgaccgagtacaagcccacggtgcgcctcgccacccgcgacgacgtccccagggccgtacgcaccctcgccgccgcgttcgccgactaccccgccacgcgccacaccgtcgatccggaccgccacatcgagcgggtcaccgagctgcaagaactcttcctcacgcgcgtcgggctcgacatcggcaaggtgtgggtcgcggacgacggcgccgcggtggcggtctggaccacgccggagagcgtcgaagcgggggcggtgttcgccgagatcggcccgcgcatggccgagttgagcggttcccggctggccgcgcagcaacagatggaaggcctcctggcgccgcaccggcccaaggagcccgcgtggttcctggccaccgtcggcgtctcgcccgaccaccagggcaagggtctgggcagcgccgtcgtgctccccggagtggaggcggccgagcgcgccggggtgcccgccttcctggagacctccgcgccccgcaacctccccttctacgagcggctcggcttcaccgtcaccgccgacgtcgaggtgcccgaaggaccgcgcacctggtgcatgacccgcaagcccggtgcctga

SEQ ID NO: 8844 - DNA, 1971 bp, Artificial Sequence
  Synthetic Polynucloetide
atggccttaccagtgaccgccttgctcctgccgctggccttgctgctccacgccgccaggccggacatccagctgacacagagcccttctagcctgtctgccagcgtgggcgacagagtgaccatcacctgtagcacaagcagcagcgtgtcctacatgcactggtatcagcagaagcccggcaaggcccctaagctgctgatctacagcaccagcaatctggcctctggcgtgcccagcagattttctggctctggcagcggcaccgacttcaccttcacaatatccagcctccagcctgaggacattgccacctactactgccaccagtggtctagctaccccacattcggccagggcaccaaggtggaaatcaaaggcggaggcggaagtggaggcggaggatctggcggcggaggctctggagtgcattctcaggttcagctgcaagagtctggccctggacttgtgcggcctagccaaacactgagcctgacctgtaccgtgtccggcttcacaatcagctccggctacagctggcactgggtccgacaaccacctggcagaggactggaatggatcggctacatccagtacagcggcatcaccaactacaaccccagcctgaagtcccgcgtgaccatgctggtggacacctccaagaaccagttcagcctgagactgagcagcgtgacagccgccgatacagccgtgtactactgcgccagagaggactacgactaccactggtacttcgacgtgtggggccagggaaccaccgtgacagtttcttctacgcgtgggtctggaggcggaggcagcggcggaggcgggagcggccagagttttgggttgttggaccctaaattgtgctatctgttggacggaatcctgttcatttacggagtgatcctgaccgcattgttcctgcgggttaagttttccagatccgcagacgcacccgcttaccaacaagggcagaaccaactctacaatgaacttaatttggggcggagggaagagtacgacgttctggacaaaaggaggggacgagatcccgagatgggcggaaagcctcagcgaaggaagaatccgcaagaggggctttataacgaactccagaaagataaaatggcagaagcctatagtgagattgggatgaagggagaaaggaggaggggtaaaggtcacgatgggttgtaccaaggattgagcacagccactaaagatacctatgatgcgctccacatgcaggccctgccgccaagacgcgccaagagaagcggatctggcgtgaagcagaccctgaatttcgacctgctgaagctggctggcgacgtggaatccaacccaggcccttctagaggccatatgaccgagtacaagcccacggtgcgcctcgccacccgcgacgacgtccccagggccgtacgcaccctcgccgccgcgttcgccgactaccccgccacgcgccacaccgtcgatccggaccgccacatcgagcgggtcaccgagctgcaagaactcttcctcacgcgcgtcgggctcgacatcggcaaggtgtgggtcgcggacgacggcgccgcggtggcggtctggaccacgccggagagcgtcgaagcgggggcggtgttcgccgagatcggcccgcgcatggccgagttgagcggttcccggctggccgcgcagcaacagatggaaggcctcctggcgccgcaccggcccaaggagcccgcgtggttcctggccaccgtcggcgtctcgcccgaccaccagggcaagggtctgggcagcgccgtcgtgctccccggagtggaggcggccgagcgcgccggggtgcccgccttcctggagacctccgcgccccgcaacctccccttctacgagcggctcggcttcaccgtcaccgccgacgtcgaggtgcccgaaggaccgcgcacctggtgcatgacccgcaagcccggtgcctga

SEQ ID NO: 8845 - DNA, 2271 bp, Artificial Sequence
  Synthetic Polynucloetide
atggccttaccagtgaccgccttgctcctgccgctggccttgctgctccacgccgccaggccggaagtgcagctggttgaatctggcggaggactggttcagcctggcggatctctgagactgtcttgtgccgccagcggcttcagcttcagcgacttttggatgagctgggtccgacaggcccctggcaaaggacttgaatgggtcgccacaatcagccaggccggcagcgagaaggactacgtggactctgtgaagggcagattcaccatcagccgggacaacgccaagaagtccctgtacctccagatgaacagcctgagagccgaggacaccgccgtgtactattgtgcctctggcgtgtacagcttcgactacagaggccagggcaccctggtcacagtctcttctggtaccggcggaggcggatctggcggcggaggtagcggtggcggaggatctgaattcgacatccagctgacacagagcccttctagcctgtctgccagcgtgggcgacagagtgaccatcacctgtagcacaagcagcagcgtgtcctacatgcactggtatcagcagaagcccggcaaggcccctaagctgctgatctacagcaccagcaatctggcctctggcgtgcccagcagattttctggctctggcagcggcaccgacttcaccttcacaatatccagcctccagcctgaggacattgccacctactactgccaccagtggtctagctaccccacattcggccagggcaccaaggtggaaatcaaactcgaggacctgaagaacgtgttcccacctgaggtggccgtgttcgagcctagcgaggccgagatcagccacacccagaaagccaccctcgtgtgcctggctaccggcttctaccccgaccatgtggaactgtcttggtgggtcaacggcaaagaggtgcacagcggcgtgtgtaccgacccccagccactgaaagaacagcccgccctgaacgacagccggtactgcctgagcagcagactgagagtgtccgccaccttctggcagaacccccggaaccacttcagatgccaggtgcagttctacggcctgagcgagaacgacgagtggacccaggacagagccaagcccgtgacccagatcgtgtctgccgaagcctggggcagagccgattgcggctttaccagcgagagctaccagcagggcgtgctgagcgccaccatcctgtacgagatcctgctgggcaaggccaccctgtacgccgtgctggtgtctgccctggtgctgatggctatggtcaagcggaaggacagccggggaagggccaagcgatctggatctggagcaacaaacttctcactactcaaacaagcaggtgacgtggaggagaatcccgggcctactagtatggactggatttggcgcatccttttccttgtcggcgctgctaccggcgcgcattccttcgaaggagtgcattctcaggttcagctgcaagagtctggccctggacttgtgcggcctagccaaacactgagcctgacctgtaccgtgtccggcttcacaatcagctccggctacagctggcactgggtccgacaaccacctggcagaggactggaatggatcggctacatccagtacagcggcatcaccaactacaaccccagcctgaagtcccgcgtgaccatgctggtggacacctccaagaaccagttcagcctgagactgagcagcgtgacagccgccgatacagccgtgtactactgcgccagagaggactacgactaccactggtacttcgacgtgtggggccagggaaccaccgtgacagtttcttctacgcgtatccagaaccctgatcctgccgtgtaccagctgcgggatagcaagagcagcgacaagagcgtgtgtctgttcaccgacttcgacagccagaccaacgtgtcccagagcaaggactccgacgtgtacatcaccgataagtgcgtgctggacatgcggagcatggacttcaagagcaactccgccgtggcctggtccaacaagtccgatttcgcctgcgccaacgccttcaacaacagcattatccccgaggacacattcttcccaagccccgagagcagctgcgacgtgaagctggtggaaaagagcttcgagacagacaccaacctgaacttccagaacctgagcgtgatcggcttcagaatcctgctgctgaaagtggccggctttaacctgctgatgaccctgcggctgtggtccagc

SEQ ID NO: 8846 - DNA, 2283 bp, Artificial Sequence
  Synthetic Polynucloetide
atggccttaccagtgaccgccttgctcctgccgctggccttgctgctccacgccgccaggccggaagtgcagctggttgaatctggcggaggactggttcagcctggcggatctctgagactgtcttgtgccgccagcggcttcagcttcagcgacttttggatgagctgggtccgacaggcccctggcaaaggacttgaatgggtcgccacaatcagccaggccggcagcgagaaggactacgtggactctgtgaagggcagattcaccatcagccgggacaacgccaagaagtccctgtacctccagatgaacagcctgagagccgaggacaccgccgtgtactattgtgcctctggcgtgtacagcttcgactacagaggccagggcaccctggtcacagtctcttctggtaccggcggaggcggatctggcggcggaggtagcggtggcggaggatctgaattcgacatccagctgacacagagcccttctagcctgtctgccagcgtgggcgacagagtgaccatcacctgtagcacaagcagcagcgtgtcctacatgcactggtatcagcagaagcccggcaaggcccctaagctgctgatctacagcaccagcaatctggcctctggcgtgcccagcagattttctggctctggcagcggcaccgacttcaccttcacaatatccagcctccagcctgaggacattgccacctactactgccaccagtggtctagctaccccacattcggccagggcaccaaggtggaaatcaaactcgagatccagaaccctgatcctgccgtgtaccagctgcgggatagcaagagcagcgacaagagcgtgtgtctgttcaccgacttcgacagccagaccaacgtgtcccagagcaaggactccgacgtgtacatcaccgataagtgcgtgctggacatgcggagcatggacttcaagagcaactccgccgtggcctggtccaacaagtccgatttcgcctgcgccaacgccttcaacaacagcattatccccgaggacacattcttcccaagccccgagagcagctgcgacgtgaagctggtggaaaagagcttcgagacagacaccaacctgaacttccagaacctgagcgtgatcggcttcagaatcctgctgctgaaagtggccggctttaacctgctgatgaccctgcggctgtggtccagccgcgccaagagaagcggatctggcgtgaagcagaccctgaatttcgacctgctgaagctggctggcgacgtggaatccaacccaggccctactagtatggactggatttggcgcatccttttccttgtcggcgctgctaccggcgcgcattccttcgaaggagtgcattctcaggttcagctgcaagagtctggccctggacttgtgcggcctagccaaacactgagcctgacctgtaccgtgtccggcttcacaatcagctccggctacagctggcactgggtccgacaaccacctggcagaggactggaatggatcggctacatccagtacagcggcatcaccaactacaaccccagcctgaagtcccgcgtgaccatgctggtggacacctccaagaaccagttcagcctgagactgagcagcgtgacagccgccgatacagccgtgtactactgcgccagagaggactacgactaccactggtacttcgacgtgtggggccagggaaccaccgtgacagtttcttctacgcgtgaggacctgaagaacgtgttcccacctgaggtggccgtgttcgagcctagcgaggccgagatcagccacacccagaaagccaccctcgtgtgcctggctaccggcttctaccccgaccatgtggaactgtcttggtgggtcaacggcaaagaggtgcacagcggcgtgtgtaccgacccccagccactgaaagaacagcccgccctgaacgacagccggtactgcctgagcagcagactgagagtgtccgccaccttctggcagaacccccggaaccacttcagatgccaggtgcagttctacggcctgagcgagaacgacgagtggacccaggacagagccaagcccgtgacccagatcgtgtctgccgaagcctggggcagagccgattgcggctttaccagcgagagctaccagcagggcgtgctgagcgccaccatcctgtacgagatcctgctgggcaaggccaccctgtacgccgtgctggtgtctgccctggtgctgatggctatggtcaagcggaaggacagccgggga

SEQ ID NO: 8847 - DNA, 2859 bp, Artificial Sequence
  Synthetic Polynucloetide
atggccttaccagtgaccgccttgctcctgccgctggccttgctgctccacgccgccaggccggaagtgcagctggttgaatctggcggaggactggttcagcctggcggatctctgagactgtcttgtgccgccagcggcttcagcttcagcgacttttggatgagctgggtccgacaggcccctggcaaaggacttgaatgggtcgccacaatcagccaggccggcagcgagaaggactacgtggactctgtgaagggcagattcaccatcagccgggacaacgccaagaagtccctgtacctccagatgaacagcctgagagccgaggacaccgccgtgtactattgtgcctctggcgtgtacagcttcgactacagaggccagggcaccctggtcacagtctcttctggtaccggcggaggcggatctggcggcggaggtagcggtggcggaggatctgaattcgacatccagctgacacagagcccttctagcctgtctgccagcgtgggcgacagagtgaccatcacctgtagcacaagcagcagcgtgtcctacatgcactggtatcagcagaagcccggcaaggcccctaagctgctgatctacagcaccagcaatctggcctctggcgtgcccagcagattttctggctctggcagcggcaccgacttcaccttcacaatatccagcctccagcctgaggacattgccacctactactgccaccagtggtctagctaccccacattcggccagggcaccaaggtggaaatcaaactcgaggacctgaagaacgtgttcccacctgaggtggccgtgttcgagcctagcgaggccgagatcagccacacccagaaagccaccctcgtgtgcctggctaccggcttctaccccgaccatgtggaactgtcttggtgggtcaacggcaaagaggtgcacagcggcgtgtctaccgacccccagccactgaaagaacagcccgccctgaacgacagccggtactgcctgagcagcagactgagagtgtccgccaccttctggcagaacccccggaaccacttcagatgccaggtgcagttctacggcctgagcgagaacgacgagtggacccaggacagagccaagcccgtgacccagatcgtgtctgccgaagcctggggcagagccgattgcggatcccagagcttcggcctgctggaccccaagctgtgctacctgctggatggcatcctgttcatctacggcgtgatcctgaccgccctgttcctgagagtgaagttcagcagaagcgccgacgcccctgcctaccagcagggacagaaccaactgtacaacgagctgaacctgggcagacgggaagagtacgacgtgctggacaagcggagaggcagggaccctgagatgggcggaaagccccagcggagaaagaacccccaggaaggactgtataacgaactccagaaagacaagatggccgaagcctacagcgagatcggcatgaagggcgagcggagaagaggcaagggccacgatggcctgtaccagggcctgagcaccgccaccaaggacacctatgacgccctgcacatgcaggccctgcctccaagaagggccaagcgatctggatctggagcaacaaacttctcactactcaaacaagcaggtgacgtggaggagaatcccgggcctactagtatggactggatttggcgcatccttttccttgtcggcgctgctaccggcgcgcattccttcgaaggagtgcattctcaggttcagctgcaagagtctggccctggacttgtgcggcctagccaaacactgagcctgacctgtaccgtgtccggcttcacaatcagctccggctacagctggcactgggtccgacaaccacctggcagaggactggaatggatcggctacatccagtacagcggcatcaccaactacaaccccagcctgaagtcccgcgtgaccatgctggtggacacctccaagaaccagttcagcctgagactgagcagcgtgacagccgccgatacagccgtgtactactgcgccagagaggactacgactaccactggtacttcgacgtgtggggccagggaaccaccgtgacagtttcttctacgcgtatccagaaccctgatcctgccgtgtaccagctgcgggatagcaagagcagcgacaagagcgtgtgtctgttcaccgacttcgacagccagaccaacgtgtcccagagcaaggactccgacgtgtacatcaccgataagaccgtgctggacatgcggagcatggacttcaagagcaactccgccgtggcctggtccaacaagtccgatttcgcctgcgccaacgccttcaacaacagcattatccccgaggacacattcttcccaagccccgagagcagctgcggtacccagagttttgggttgttggaccctaaattgtgctatctgttggacggaatcctgttcatttacggagtgatcctgaccgcattgttcctgcgggttaagttttccagatccgcagacgcacccgcttaccaacaagggcagaaccaactctacaatgaacttaatttggggcggagggaagagtacgacgttctggacaaaaggaggggacgagatcccgagatgggcggaaagcctcagcgaaggaagaatccgcaagaggggctttataacgaactccagaaagataaaatggcagaagcctatagtgagattgggatgaagggagaaaggaggaggggtaaaggtcacgatgggttgtaccaaggattgagcacagccactaaagatacctatgatgcgctccacatgcaggccctgccgccaaga

SEQ ID NO: 8848 - DNA, 2349 bp, Artificial Sequence
  Synthetic Polynucloetide
atggccttaccagtgaccgccttgctcctgccgctggccttgctgctccacgccgccaggccggaagtgcagctggttgaatctggcggaggactggttcagcctggcggatctctgagactgtcttgtgccgccagcggcttcagcttcagcgacttttggatgagctgggtccgacaggcccctggcaaaggacttgaatgggtcgccacaatcagccaggccggcagcgagaaggactacgtggactctgtgaagggcagattcaccatcagccgggacaacgccaagaagtccctgtacctccagatgaacagcctgagagccgaggacaccgccgtgtactattgtgcctctggcgtgtacagcttcgactacagaggccagggcaccctggtcacagtctcttctggtaccggcggaggcggatctggcggcggaggtagcggtggcggaggatctgaattcgacatccagctgacacagagcccttctagcctgtctgccagcgtgggcgacagagtgaccatcacctgtagcacaagcagcagcgtgtcctacatgcactggtatcagcagaagcccggcaaggcccctaagctgctgatctacagcaccagcaatctggcctctggcgtgcccagcagattttctggctctggcagcggcaccgacttcaccttcacaatatccagcctccagcctgaggacattgccacctactactgccaccagtggtctagctaccccacattcggccagggcaccaaggtggaaatcaaactcgagggacagcctaaggccaatcctaccgtgacactgttccctccaagcagcgaagaactccaggccaacaaggccacacttgtgtgcctgatctccgacttctaccctggggctgtgacagtggcttggaaggccgatggatctcctgtgaaagccggcgtggaaaccaccaagccatccaagcagagcaacaacaaatacgccgccagctcctacctgagcctgacacctgagcagtggaagtcccacagatcctacagctgccaagtgacccacgaaggcagcaccgtggaaaagacagtggcccctacagagtgcagccccatcaagaccgatgtgattacaatggaccccaaggacaactgctccaaggacgccaacgataccctgctgctccagctgaccaacaccagcgcctactacatgtacttgttgctgctgctgaagtccgtggtgtacttcgccatcatcacatgctgcctgctgcggagaaccgccttctgctgcaacggcgagaagtctagggccaagcgatctggatctggagcaacaaacttctcactactcaaacaagcaggtgacgtggaggagaatcccgggcctactagtatggactggatttggcgcatccttttccttgtcggcgctgctaccggcgcgcattccttcgaaggagtgcattctcaggttcagctgcaagagtctggccctggacttgtgcggcctagccaaacactgagcctgacctgtaccgtgtccggcttcacaatcagctccggctacagctggcactgggtccgacaaccacctggcagaggactggaatggatcggctacatccagtacagcggcatcaccaactacaaccccagcctgaagtcccgcgtgaccatgctggtggacacctccaagaaccagttcagcctgagactgagcagcgtgacagccgccgatacagccgtgtactactgcgccagagaggactacgactaccactggtacttcgacgtgtggggccagggaaccaccgtgacagtttcttctacgcgtgcctctacaaagggaccctccgtgtttcctctggctcccagcagcaagtctacaagcggaggaacagccgctctgggctgcctggtcaaggattactttcccgagcctgtgaccgtgtcctggaatagcggagcactgacaagcggcgtgcacacctttccagccgtgctgcaaagcagcggcctgtactctctgagcagcgtggtcacagtgcctagctctagcctgggcacccagacctacatctgcaatgtgaaccacaagcctagcaacaccaaggtggacaagagagtggaacccaagagctgtgaagtgaaaaccgactccaccgaccacgtgaagcccaaagagacagagaacaccaagcagcccagcaagagctgccacaagcccaaggccatcgtgcacaccgagaaagtgaacatgatgagcctgaccgtgctgggcctgcggatgctgttcgccaaaaccgtggccgtgaacttcctgctgaccgccaagctgttcttcctc

SEQ ID NO: 8849 - DNA, 2292 bp, Artificial Sequence
  Synthetic Polynucloetide
atggccttaccagtgaccgccttgctcctgccgctggccttgctgctccacgccgccaggccggaagtgcagctggttgaatctggcggaggactggttcagcctggcggatctctgagactgtcttgtgccgccagcggcttcagcttcagcgacttttggatgagctgggtccgacaggcccctggcaaaggacttgaatgggtcgccacaatcagccaggccggcagcgagaaggactacgtggactctgtgaagggcagattcaccatcagccgggacaacgccaagaagtccctgtacctccagatgaacagcctgagagccgaggacaccgccgtgtactattgtgcctctggcgtgtacagcttcgactacagaggccagggcaccctggtcacagtctcttctggtaccggcggaggcggatctggcggcggaggtagcggtggcggaggatctgaattcgacatccagctgacacagagcccttctagcctgtctgccagcgtgggcgacagagtgaccatcacctgtagcacaagcagcagcgtgtcctacatgcactggtatcagcagaagcccggcaaggcccctaagctgctgatctacagcaccagcaatctggcctctggcgtgcccagcagattttctggctctggcagcggcaccgacttcaccttcacaatatccagcctccagcctgaggacattgccacctactactgccaccagtggtctagctaccccacattcggccagggcaccaaggtggaaatcaaactcgagggacagcctaaggccaatcctaccgtgacactgttccctccaagcagcgaagaactccaggccaacaaggccacacttgtgtgcctgatctccgacttctaccctggggctgtgacagtggcttggaaggccgatggatctcctgtgaaagccggcgtggaaaccaccaagccatccaagcagagcaacaacaaatacgccgccagctcctacctgagcctgacacctgagcagtggaagtcccacagatcctacagctgccaagtgacccacgaaggcagcaccgtggaaaagacagtggcccctacagagtgcagcggcagagccgattgcggctttaccagcgagagctaccagcagggcgtgctgagcgccaccatcctgtacgagatcctgctgggcaaggccaccctgtacgccgtgctggtgtctgccctggtgctgatggctatggtcaagcggaaggacagccggggacgcgccaagagaagcggatctggcgtgaagcagaccctgaatttcgacctgctgaagctggctggcgacgtggaatccaacccaggccctactagtatggactggatttggcgcatccttttccttgtcggcgctgctaccggcgcgcattccttcgaaggagtgcattctcaggttcagctgcaagagtctggccctggacttgtgcggcctagccaaacactgagcctgacctgtaccgtgtccggcttcacaatcagctccggctacagctggcactgggtccgacaaccacctggcagaggactggaatggatcggctacatccagtacagcggcatcaccaactacaaccccagcctgaagtcccgcgtgaccatgctggtggacacctccaagaaccagttcagcctgagactgagcagcgtgacagccgccgatacagccgtgtactactgcgccagagaggactacgactaccactggtacttcgacgtgtggggccagggaaccaccgtgacagtttcttctacgcgtgcctctacaaagggaccctccgtgtttcctctggctcccagcagcaagtctacaagcggaggaacagccgctctgggctgcctggtcaaggattactttcccgagcctgtgaccgtgtcctggaatagcggagcactgacaagcggcgtgcacacctttccagccgtgctgcaaagcagcggcctgtactctctgagcagcgtggtcacagtgcctagctctagcctgggcacccagacctacatctgcaatgtgaaccacaagcctagcaacaccaaggtggacaagagagtggaacccaagagctgtatccccgaggacacattcttcccaagccccgagagcagctgcgacgtgaagctggtggaaaagagcttcgagacagacaccaacctgaacttccagaacctgagcgtgatcggcttcagaatcctgctgctgaaagtggccggctttaacctgctgatgaccctgcggctgtggtccagc

SEQ ID NO: 8850 - DNA, 2694 bp, Artificial Sequence
  Synthetic Polynucloetide
atggccttaccagtgaccgccttgctcctgccgctggccttgctgctccacgccgccaggccggaagtgcagctggttgaatctggcggaggactggttcagcctggcggatctctgagactgtcttgtgccgccagcggcttcagcttcagcgacttttggatgagctgggtccgacaggcccctggcaaaggacttgaatgggtcgccacaatcagccaggccggcagcgagaaggactacgtggactctgtgaagggcagattcaccatcagccgggacaacgccaagaagtccctgtacctccagatgaacagcctgagagccgaggacaccgccgtgtactattgtgcctctggcgtgtacagcttcgactacagaggccagggcaccctggtcacagtctcttctggtaccggcggaggcggatctggcggcggaggtagcggtggcggaggatctgaattcgacatccagctgacacagagcccttctagcctgtctgccagcgtgggcgacagagtgaccatcacctgtagcacaagcagcagcgtgtcctacatgcactggtatcagcagaagcccggcaaggcccctaagctgctgatctacagcaccagcaatctggcctctggcgtgcccagcagattttctggctctggcagcggcaccgacttcaccttcacaatatccagcctccagcctgaggacattgccacctactactgccaccagtggtctagctaccccacattcggccagggcaccaaggtggaaatcaaactcgagatccagaaccctgatcctgccgtgtaccagctgcgggatagcaagagcagcgacaagagcgtgtgtctgttcaccgacttcgacagccagaccaacgtgtcccagagcaaggactccgacgtgtacatcaccgataagtgcgtgctggacatgcggagcatggacttcaagagcaactccgccgtggcctggtccaacaagtccgatttcgcctgcgccaacgccttcaacaacagcattatccccgaggacacattcttcccaagccccgagagcagctgcgacgtgaagctggtggaaaagagcttcgagacagacaccaacctgaacttccagaacctgagcgtgatcggcttcagaatcctgctgctgaaagtggccggctttaacctgctgatgaccctgcggctgtggtccagccgcgccaagagaagcggatctggcgtgaagcagaccctgaatttcgacctgctgaagctggctggcgacgtggaatccaacccaggccctactagtatggactggatttggcgcatccttttccttgtcggcgctgctaccggcgcgcattccgggccccagctccagctgcaagagtctggacctggcctggtcaagcctagcgagacactgagcctgacctgtaccgtgtccggcgatagcatcagcagcggcgattactactggggctggatcagacagcctcctggcaaaggactggaatggatcggccacatctactacagcggcgtgacctactacaaccccagcctgaagtccagagtgaccatcagcgtggacaccagccggaaccagttctccctgaagctgtctagcgtgacagccgccgataccgccgtgtactactgcaccagagaggacagcagcaactggcggagtagaggccagggaacactggtcacagttagctctggatccggcggaggcggaagtggaggcggaggatctggcggcggaggctctttcgaaggagtgcattctcaggttcagctgcaagagtctggccctggacttgtgcggcctagccaaacactgagcctgacctgtaccgtgtccggcttcacaatcagctccggctacagctggcactgggtccgacaaccacctggcagaggactggaatggatcggctacatccagtacagcggcatcaccaactacaaccccagcctgaagtcccgcgtgaccatgctggtggacacctccaagaaccagttcagcctgagactgagcagcgtgacagccgccgatacagccgtgtactactgcgccagagaggactacgactaccactggtacttcgacgtgtggggccagggaaccaccgtgacagtttcttctacgcgtgaggacctgaagaacgtgttcccacctgaggtggccgtgttcgagcctagcgaggccgagatcagccacacccagaaagccaccctcgtgtgcctggctaccggcttctaccccgaccatgtggaactgtcttggtgggtcaacggcaaagaggtgcacagcggcgtgtgtaccgacccccagccactgaaagaacagcccgccctgaacgacagccggtactgcctgagcagcagactgagagtgtccgccaccttctggcagaacccccggaaccacttcagatgccaggtgcagttctacggcctgagcgagaacgacgagtggacccaggacagagccaagcccgtgacccagatcgtgtctgccgaagcctggggcagagccgattgcggctttaccagcgagagctaccagcagggcgtgctgagcgccaccatcctgtacgagatcctgctgggcaaggccaccctgtacgccgtgctggtgtctgccctggtgctgatggctatggtcaagcggaaggacagccgggga

SEQ ID NO: 8851 - DNA, 3270 bp, Artificial Sequence
  Synthetic Polynucloetide
atggccttaccagtgaccgccttgctcctgccgctggccttgctgctccacgccgccaggccggaagtgcagctggttgaatctggcggaggactggttcagcctggcggatctctgagactgtcttgtgccgccagcggcttcagcttcagcgacttttggatgagctgggtccgacaggcccctggcaaaggacttgaatgggtcgccacaatcagccaggccggcagcgagaaggactacgtggactctgtgaagggcagattcaccatcagccgggacaacgccaagaagtccctgtacctccagatgaacagcctgagagccgaggacaccgccgtgtactattgtgcctctggcgtgtacagcttcgactacagaggccagggcaccctggtcacagtctcttctggtaccggcggaggcggatctggcggcggaggtagcggtggcggaggatctgaattcgacatccagctgacacagagcccttctagcctgtctgccagcgtgggcgacagagtgaccatcacctgtagcacaagcagcagcgtgtcctacatgcactggtatcagcagaagcccggcaaggcccctaagctgctgatctacagcaccagcaatctggcctctggcgtgcccagcagattttctggctctggcagcggcaccgacttcaccttcacaatatccagcctccagcctgaggacattgccacctactactgccaccagtggtctagctaccccacattcggccagggcaccaaggtggaaatcaaactcgaggacctgaagaacgtgttcccacctgaggtggccgtgttcgagcctagcgaggccgagatcagccacacccagaaagccaccctcgtgtgcctggctaccggcttctaccccgaccatgtggaactgtcttggtgggtcaacggcaaagaggtgcacagcggcgtgtctaccgacccccagccactgaaagaacagcccgccctgaacgacagccggtactgcctgagcagcagactgagagtgtccgccaccttctggcagaacccccggaaccacttcagatgccaggtgcagttctacggcctgagcgagaacgacgagtggacccaggacagagccaagcccgtgacccagatcgtgtctgccgaagcctggggcagagccgattgcggatcccagagcttcggcctgctggaccccaagctgtgctacctgctggatggcatcctgttcatctacggcgtgatcctgaccgccctgttcctgagagtgaagttcagcagaagcgccgacgcccctgcctaccagcagggacagaaccaactgtacaacgagctgaacctgggcagacgggaagagtacgacgtgctggacaagcggagaggcagggaccctgagatgggcggaaagccccagcggagaaagaacccccaggaaggactgtataacgaactccagaaagacaagatggccgaagcctacagcgagatcggcatgaagggcgagcggagaagaggcaagggccacgatggcctgtaccagggcctgagcaccgccaccaaggacacctatgacgccctgcacatgcaggccctgcctccaagaagggccaagcgatctggatctggagcaacaaacttctcactactcaaacaagcaggtgacgtggaggagaatcccgggcctactagtatggactggatttggcgcatccttttccttgtcggcgctgctaccggcgcgcattccgggccccagctccagctgcaagagtctggacctggcctggtcaagcctagcgagacactgagcctgacctgtaccgtgtccggcgatagcatcagcagcggcgattactactggggctggatcagacagcctcctggcaaaggactggaatggatcggccacatctactacagcggcgtgacctactacaaccccagcctgaagtccagagtgaccatcagcgtggacaccagccggaaccagttctccctgaagctgtctagcgtgacagccgccgataccgccgtgtactactgcaccagagaggacagcagcaactggcggagtagaggccagggaacactggtcacagttagctctggatccggcggaggcggaagtggaggcggaggatctggcggcggaggctctttcgaaggagtgcattctcaggttcagctgcaagagtctggccctggacttgtgcggcctagccaaacactgagcctgacctgtaccgtgtccggcttcacaatcagctccggctacagctggcactgggtccgacaaccacctggcagaggactggaatggatcggctacatccagtacagcggcatcaccaactacaaccccagcctgaagtcccgcgtgaccatgctggtggacacctccaagaaccagttcagcctgagactgagcagcgtgacagccgccgatacagccgtgtactactgcgccagagaggactacgactaccactggtacttcgacgtgtggggccagggaaccaccgtgacagtttcttctacgcgtatccagaaccctgatcctgccgtgtaccagctgcgggatagcaagagcagcgacaagagcgtgtgtctgttcaccgacttcgacagccagaccaacgtgtcccagagcaaggactccgacgtgtacatcaccgataagaccgtgctggacatgcggagcatggacttcaagagcaactccgccgtggcctggtccaacaagtccgatttcgcctgcgccaacgccttcaacaacagcattatccccgaggacacattcttcccaagccccgagagcagctgcggtacccagagttttgggttgttggaccctaaattgtgctatctgttggacggaatcctgttcatttacggagtgatcctgaccgcattgttcctgcgggttaagttttccagatccgcagacgcacccgcttaccaacaagggcagaaccaactctacaatgaacttaatttggggcggagggaagagtacgacgttctggacaaaaggaggggacgagatcccgagatgggcggaaagcctcagcgaaggaagaatccgcaagaggggctttataacgaactccagaaagataaaatggcagaagcctatagtgagattgggatgaagggagaaaggaggaggggtaaaggtcacgatgggttgtaccaaggattgagcacagccactaaagatacctatgatgcgctccacatgcaggccctgccgccaaga

SEQ ID NO: 8852 - DNA, 2760 bp, Artificial Sequence
  Synthetic Polynucloetide
atggccttaccagtgaccgccttgctcctgccgctggccttgctgctccacgccgccaggccggaagtgcagctggttgaatctggcggaggactggttcagcctggcggatctctgagactgtcttgtgccgccagcggcttcagcttcagcgacttttggatgagctgggtccgacaggcccctggcaaaggacttgaatgggtcgccacaatcagccaggccggcagcgagaaggactacgtggactctgtgaagggcagattcaccatcagccgggacaacgccaagaagtccctgtacctccagatgaacagcctgagagccgaggacaccgccgtgtactattgtgcctctggcgtgtacagcttcgactacagaggccagggcaccctggtcacagtctcttctggtaccggcggaggcggatctggcggcggaggtagcggtggcggaggatctgaattcgacatccagctgacacagagcccttctagcctgtctgccagcgtgggcgacagagtgaccatcacctgtagcacaagcagcagcgtgtcctacatgcactggtatcagcagaagcccggcaaggcccctaagctgctgatctacagcaccagcaatctggcctctggcgtgcccagcagattttctggctctggcagcggcaccgacttcaccttcacaatatccagcctccagcctgaggacattgccacctactactgccaccagtggtctagctaccccacattcggccagggcaccaaggtggaaatcaaactcgagggacagcctaaggccaatcctaccgtgacactgttccctccaagcagcgaagaactccaggccaacaaggccacacttgtgtgcctgatctccgacttctaccctggggctgtgacagtggcttggaaggccgatggatctcctgtgaaagccggcgtggaaaccaccaagccatccaagcagagcaacaacaaatacgccgccagctcctacctgagcctgacacctgagcagtggaagtcccacagatcctacagctgccaagtgacccacgaaggcagcaccgtggaaaagacagtggcccctacagagtgcagccccatcaagaccgatgtgattacaatggaccccaaggacaactgctccaaggacgccaacgataccctgctgctccagctgaccaacaccagcgcctactacatgtacttgttgctgctgctgaagtccgtggtgtacttcgccatcatcacatgctgcctgctgcggagaaccgccttctgctgcaacggcgagaagtctagggccaagcgatctggatctggagcaacaaacttctcactactcaaacaagcaggtgacgtggaggagaatcccgggcctactagtatggactggatttggcgcatccttttccttgtcggcgctgctaccggcgcgcattccgggccccagctccagctgcaagagtctggacctggcctggtcaagcctagcgagacactgagcctgacctgtaccgtgtccggcgatagcatcagcagcggcgattactactggggctggatcagacagcctcctggcaaaggactggaatggatcggccacatctactacagcggcgtgacctactacaaccccagcctgaagtccagagtgaccatcagcgtggacaccagccggaaccagttctccctgaagctgtctagcgtgacagccgccgataccgccgtgtactactgcaccagagaggacagcagcaactggcggagtagaggccagggaacactggtcacagttagctctggatccggcggaggcggaagtggaggcggaggatctggcggcggaggctctttcgaaggagtgcattctcaggttcagctgcaagagtctggccctggacttgtgcggcctagccaaacactgagcctgacctgtaccgtgtccggcttcacaatcagctccggctacagctggcactgggtccgacaaccacctggcagaggactggaatggatcggctacatccagtacagcggcatcaccaactacaaccccagcctgaagtcccgcgtgaccatgctggtggacacctccaagaaccagttcagcctgagactgagcagcgtgacagccgccgatacagccgtgtactactgcgccagagaggactacgactaccactggtacttcgacgtgtggggccagggaaccaccgtgacagtttcttctacgcgtgcctctacaaagggaccctccgtgtttcctctggctcccagcagcaagtctacaagcggaggaacagccgctctgggctgcctggtcaaggattactttcccgagcctgtgaccgtgtcctggaatagcggagcactgacaagcggcgtgcacacctttccagccgtgctgcaaagcagcggcctgtactctctgagcagcgtggtcacagtgcctagctctagcctgggcacccagacctacatctgcaatgtgaaccacaagcctagcaacaccaaggtggacaagagagtggaacccaagagctgtgaagtgaaaaccgactccaccgaccacgtgaagcccaaagagacagagaacaccaagcagcccagcaagagctgccacaagcccaaggccatcgtgcacaccgagaaagtgaacatgatgagcctgaccgtgctgggcctgcggatgctgttcgccaaaaccgtggccgtgaacttcctgctgaccgccaagctgttcttcctc

SEQ ID NO: 8853 - DNA, 2703 bp, Artificial Sequence
  Synthetic Polynucloetide
atggccttaccagtgaccgccttgctcctgccgctggccttgctgctccacgccgccaggccggaagtgcagctggttgaatctggcggaggactggttcagcctggcggatctctgagactgtcttgtgccgccagcggcttcagcttcagcgacttttggatgagctgggtccgacaggcccctggcaaaggacttgaatgggtcgccacaatcagccaggccggcagcgagaaggactacgtggactctgtgaagggcagattcaccatcagccgggacaacgccaagaagtccctgtacctccagatgaacagcctgagagccgaggacaccgccgtgtactattgtgcctctggcgtgtacagcttcgactacagaggccagggcaccctggtcacagtctcttctggtaccggcggaggcggatctggcggcggaggtagcggtggcggaggatctgaattcgacatccagctgacacagagcccttctagcctgtctgccagcgtgggcgacagagtgaccatcacctgtagcacaagcagcagcgtgtcctacatgcactggtatcagcagaagcccggcaaggcccctaagctgctgatctacagcaccagcaatctggcctctggcgtgcccagcagattttctggctctggcagcggcaccgacttcaccttcacaatatccagcctccagcctgaggacattgccacctactactgccaccagtggtctagctaccccacattcggccagggcaccaaggtggaaatcaaactcgagggacagcctaaggccaatcctaccgtgacactgttccctccaagcagcgaagaactccaggccaacaaggccacacttgtgtgcctgatctccgacttctaccctggggctgtgacagtggcttggaaggccgatggatctcctgtgaaagccggcgtggaaaccaccaagccatccaagcagagcaacaacaaatacgccgccagctcctacctgagcctgacacctgagcagtggaagtcccacagatcctacagctgccaagtgacccacgaaggcagcaccgtggaaaagacagtggcccctacagagtgcagcggcagagccgattgcggctttaccagcgagagctaccagcagggcgtgctgagcgccaccatcctgtacgagatcctgctgggcaaggccaccctgtacgccgtgctggtgtctgccctggtgctgatggctatggtcaagcggaaggacagccggggacgcgccaagagaagcggatctggcgtgaagcagaccctgaatttcgacctgctgaagctggctggcgacgtggaatccaacccaggccctactagtatggactggatttggcgcatccttttccttgtcggcgctgctaccggcgcgcattccgggccccagctccagctgcaagagtctggacctggcctggtcaagcctagcgagacactgagcctgacctgtaccgtgtccggcgatagcatcagcagcggcgattactactggggctggatcagacagcctcctggcaaaggactggaatggatcggccacatctactacagcggcgtgacctactacaaccccagcctgaagtccagagtgaccatcagcgtggacaccagccggaaccagttctccctgaagctgtctagcgtgacagccgccgataccgccgtgtactactgcaccagagaggacagcagcaactggcggagtagaggccagggaacactggtcacagttagctctggatccggcggaggcggaagtggaggcggaggatctggcggcggaggctctttcgaaggagtgcattctcaggttcagctgcaagagtctggccctggacttgtgcggcctagccaaacactgagcctgacctgtaccgtgtccggcttcacaatcagctccggctacagctggcactgggtccgacaaccacctggcagaggactggaatggatcggctacatccagtacagcggcatcaccaactacaaccccagcctgaagtcccgcgtgaccatgctggtggacacctccaagaaccagttcagcctgagactgagcagcgtgacagccgccgatacagccgtgtactactgcgccagagaggactacgactaccactggtacttcgacgtgtggggccagggaaccaccgtgacagtttcttctacgcgtgcctctacaaagggaccctccgtgtttcctctggctcccagcagcaagtctacaagcggaggaacagccgctctgggctgcctggtcaaggattactttcccgagcctgtgaccgtgtcctggaatagcggagcactgacaagcggcgtgcacacctttccagccgtgctgcaaagcagcggcctgtactctctgagcagcgtggtcacagtgcctagctctagcctgggcacccagacctacatctgcaatgtgaaccacaagcctagcaacaccaaggtggacaagagagtggaacccaagagctgtatccccgaggacacattcttcccaagccccgagagcagctgcgacgtgaagctggtggaaaagagcttcgagacagacaccaacctgaacttccagaacctgagcgtgatcggcttcagaatcctgctgctgaaagtggccggctttaacctgctgatgaccctgcggctgtggtccagc

SEQ ID NO: 8854 - DNA, 2274 bp, Artificial Sequence
  Synthetic Polynucloetide
atggccttaccagtgaccgccttgctcctgccgctggccttgctgctccacgccgccaggccggaagtgcaggttttggagtctggcggaggactggttcagcctggcggatctctgagactgtcttgtgccgccagcggcttcaccttcagcaactttgccatgagctgggtccgacaggcccctggcaaaggacttgaatgggtgtccacaatcagcggcagcgccggcacaacagattacgccgattctgtgaagggcagattcaccatcagccgggacaacagcaagaaaaccctgtacctccagatgaacagcctgcgcgtggaagataccgccgtgtactactgtgccgatggcagaggccccttcttcgattatcgcggccagggcacactggtcaccgtttcttctggtaccggcggaggcggatctggcggcggaggtagcggtggcggaggatctgaattcgacatccagctgacacagagcccttctagcctgtctgccagcgtgggcgacagagtgaccatcacctgtagcacaagcagcagcgtgtcctacatgcactggtatcagcagaagcccggcaaggcccctaagctgctgatctacagcaccagcaatctggcctctggcgtgcccagcagattttctggctctggcagcggcaccgacttcaccttcacaatatccagcctccagcctgaggacattgccacctactactgccaccagtggtctagctaccccacattcggccagggcaccaaggtggaaatcaaactcgaggacctgaagaacgtgttcccacctgaggtggccgtgttcgagcctagcgaggccgagatcagccacacccagaaagccaccctcgtgtgcctggctaccggcttctaccccgaccatgtggaactgtcttggtgggtcaacggcaaagaggtgcacagcggcgtgtgtaccgacccccagccactgaaagaacagcccgccctgaacgacagccggtactgcctgagcagcagactgagagtgtccgccaccttctggcagaacccccggaaccacttcagatgccaggtgcagttctacggcctgagcgagaacgacgagtggacccaggacagagccaagcccgtgacccagatcgtgtctgccgaagcctggggcagagccgattgcggctttaccagcgagagctaccagcagggcgtgctgagcgccaccatcctgtacgagatcctgctgggcaaggccaccctgtacgccgtgctggtgtctgccctggtgctgatggctatggtcaagcggaaggacagccggggaagggccaagcgatctggatctggagcaacaaacttctcactactcaaacaagcaggtgacgtggaggagaatcccgggcctactagtatggactggatttggcgcatccttttccttgtcggcgctgctaccggcgcgcattccttcgaaggagtgcattctcaggttcagctgcaagagtctggccctggacttgtgcggcctagccaaacactgagcctgacctgtaccgtgtccggcttcacaatcagctccggctacagctggcactgggtccgacaaccacctggcagaggactggaatggatcggctacatccagtacagcggcatcaccaactacaaccccagcctgaagtcccgcgtgaccatgctggtggacacctccaagaaccagttcagcctgagactgagcagcgtgacagccgccgatacagccgtgtactactgcgccagagaggactacgactaccactggtacttcgacgtgtggggccagggaaccaccgtgacagtttcttctacgcgtatccagaaccctgatcctgccgtgtaccagctgcgggatagcaagagcagcgacaagagcgtgtgtctgttcaccgacttcgacagccagaccaacgtgtcccagagcaaggactccgacgtgtacatcaccgataagtgcgtgctggacatgcggagcatggacttcaagagcaactccgccgtggcctggtccaacaagtccgatttcgcctgcgccaacgccttcaacaacagcattatccccgaggacacattcttcccaagccccgagagcagctgcgacgtgaagctggtggaaaagagcttcgagacagacaccaacctgaacttccagaacctgagcgtgatcggcttcagaatcctgctgctgaaagtggccggctttaacctgctgatgaccctgcggctgtggtccagc

SEQ ID NO: 8855 - DNA, 2277 bp, Artificial Sequence
  Synthetic Polynucloetide
atggccttaccagtgaccgccttgctcctgccgctggccttgctgctccacgccgccaggccggacatccagctgacacagagcccttctagcctgtctgccagcgtgggcgacagagtgaccatcacctgtagcacaagcagcagcgtgtcctacatgcactggtatcagcagaagcccggcaaggcccctaagctgctgatctacagcaccagcaatctggcctctggcgtgcccagcagattttctggctctggcagcggcaccgacttcaccttcacaatatccagcctccagcctgaggacattgccacctactactgccaccagtggtctagctaccccacattcggccagggcaccaaggtggaaatcaaactcgaggacctgaagaacgtgttcccacctgaggtggccgtgttcgagcctagcgaggccgagatcagccacacccagaaagccaccctcgtgtgcctggctaccggcttctaccccgaccatgtggaactgtcttggtgggtcaacggcaaagaggtgcacagcggcgtgtgtaccgacccccagccactgaaagaacagcccgccctgaacgacagccggtactgcctgagcagcagactgagagtgtccgccaccttctggcagaacccccggaaccacttcagatgccaggtgcagttctacggcctgagcgagaacgacgagtggacccaggacagagccaagcccgtgacccagatcgtgtctgccgaagcctggggcagagccgattgcggctttaccagcgagagctaccagcagggcgtgctgagcgccaccatcctgtacgagatcctgctgggcaaggccaccctgtacgccgtgctggtgtctgccctggtgctgatggctatggtcaagcggaaggacagccggggaagggccaagcgatctggatctggagcaacaaacttctcactactcaaacaagcaggtgacgtggaggagaatcccgggcctactagtatggactggatttggcgcatccttttccttgtcggcgctgctaccggcgcccattccgggcccgaagtgcagctggttgaatctggcggaggactggttcaggctggcggatctctgagactgtcttgtgccgccagcggcagaacctttagcatgggctggtttagacaggcccctggcaaagagagagagttcgtcgccgccatcacatactctggcggcagcccttactacgccgactctgtgaagggcagattcaccatcagccgggacaacgccaagaacaccgtgtacctccagatgaacagcctgaagcctgaggacaccgccgtgtactactgcgccgccaatccaacatacggcagcgactggaacgccgagaattggggccagggaacccaagtgacagtgtctagcggatccggcggcggaggatctggcggaggcggatctgggggcggaggctctttcgaaggagtgcattctcaggttcagctgcaagagtctggccctggacttgtgcggcctagccaaacactgagcctgacctgtaccgtgtccggcttcacaatcagctccggctacagctggcactgggtccgacaaccacctggcagaggactggaatggatcggctacatccagtacagcggcatcaccaactacaaccccagcctgaagtcccgcgtgaccatgctggtggacacctccaagaaccagttcagcctgagactgagcagcgtgacagccgccgatacagccgtgtactactgcgccagagaggactacgactaccactggtacttcgacgtgtggggccagggaaccaccgtgacagtttcttctacgcgtatccagaaccctgatcctgccgtgtaccagctgcgggatagcaagagcagcgacaagagcgtgtgtctgttcaccgacttcgacagccagaccaacgtgtcccagagcaaggactccgacgtgtacatcaccgataagtgcgtgctggacatgcggagcatggacttcaagagcaactccgccgtggcctggtccaacaagtccgatttcgcctgcgccaacgccttcaacaacagcattatccccgaggacacattcttcccaagccccgagagcagctgcgacgtgaagctggtggaaaagagcttcgagacagacaccaacctgaacttccagaacctgagcgtgatcggcttcagaatcctgctgctgaaagtggccggctttaacctgctgatgaccctgcggctgtggtccagc

SEQ ID NO: 8856 - DNA, 2658 bp, Artificial Sequence
  Synthetic Polynucloetide
atggccttaccagtgaccgccttgctcctgccgctggccttgctgctccacgccgccaggccggacatccagctgacacagagcccttctagcctgtctgccagcgtgggcgacagagtgaccatcacctgtagcacaagcagcagcgtgtcctacatgcactggtatcagcagaagcccggcaaggcccctaagctgctgatctacagcaccagcaatctggcctctggcgtgcccagcagattttctggctctggcagcggcaccgacttcaccttcacaatatccagcctccagcctgaggacattgccacctactactgccaccagtggtctagctaccccacattcggccagggcaccaaggtggaaatcaaactcgaggacctgaagaacgtgttcccacctgaggtggccgtgttcgagcctagcgaggccgagatcagccacacccagaaagccaccctcgtgtgcctggctaccggcttctaccccgaccatgtggaactgtcttggtgggtcaacggcaaagaggtgcacagcggcgtgtgtaccgacccccagccactgaaagaacagcccgccctgaacgacagccggtactgcctgagcagcagactgagagtgtccgccaccttctggcagaacccccggaaccacttcagatgccaggtgcagttctacggcctgagcgagaacgacgagtggacccaggacagagccaagcccgtgacccagatcgtgtctgccgaagcctggggcagagccgattgcggctttaccagcgagagctaccagcagggcgtgctgagcgccaccatcctgtacgagatcctgctgggcaaggccaccctgtacgccgtgctggtgtctgccctggtgctgatggctatggtcaagcggaaggacagccggggaagggccaagcgatctggatctggagcaacaaacttctcactactcaaacaagcaggtgacgtggaggagaatcccgggcctactagtatggactggatttggcgcatccttttccttgtcggcgctgctaccggcgcccattcccaactgcaactgcaagagtctggccctggcctggtcaagccttctgaaaccctgagcctgacctgtaccgtgtccggcggctctatcagcagcggcgattactactggggctggatcagacagcctccaggcaagggactcgaatggatcggcagcatcagctacagcggctccacctactacaacccaagcctgaagtccagagtgaccatcagcgtggacaccagcagaaaccagttctccctgaagctgagcagcgtgacagccgccgatacagccgtgtattattgcaccagagaggacagcagcaactggcggagtagaggacagggcacactggtcacagtgtcctcttctggaggcggtggaagcggtggaggaggatctgaagtgcagctggttgaatctggcggaggactggttcaggctggcggatctctgagactgtcttgtgccgccagcggcagaacctttagcatgggctggtttagacaggcccctggcaaagagagagagttcgtcgccgccatcacatactctggcggcagcccttactacgccgactctgtgaagggcagattcaccatcagccgggacaacgccaagaacaccgtgtacctccagatgaacagcctgaagcctgaggacaccgccgtgtactactgcgccgccaatccaacatacggcagcgactggaacgccgagaattggggccagggaacccaagtgacagtgtctagcggatccggcggcggaggatctggcggaggcggatctgggggcggaggctctttcgaaggagtgcattctcaggttcagctgcaagagtctggccctggacttgtgcggcctagccaaacactgagcctgacctgtaccgtgtccggcttcacaatcagctccggctacagctggcactgggtccgacaaccacctggcagaggactggaatggatcggctacatccagtacagcggcatcaccaactacaaccccagcctgaagtcccgcgtgaccatgctggtggacacctccaagaaccagttcagcctgagactgagcagcgtgacagccgccgatacagccgtgtactactgcgccagagaggactacgactaccactggtacttcgacgtgtggggccagggaaccaccgtgacagtttcttctacgcgtatccagaaccctgatcctgccgtgtaccagctgcgggatagcaagagcagcgacaagagcgtgtgtctgttcaccgacttcgacagccagaccaacgtgtcccagagcaaggactccgacgtgtacatcaccgataagtgcgtgctggacatgcggagcatggacttcaagagcaactccgccgtggcctggtccaacaagtccgatttcgcctgcgccaacgccttcaacaacagcattatccccgaggacacattcttcccaagccccgagagcagctgcgacgtgaagctggtggaaaagagcttcgagacagacaccaacctgaacttccagaacctgagcgtgatcggcttcagaatcctgctgctgaaagtggccggctttaacctgctgatgaccctgcggctgtggtccagc

SEQ ID NO: 8857 - DNA, 2685 bp, Artificial Sequence
  Synthetic Polynucloetide
atggccttaccagtgaccgccttgctcctgccgctggccttgctgctccacgccgccaggccggaagtgcaggttttggagtctggcggaggactggttcagcctggcggatctctgagactgtcttgtgccgccagcggcttcaccttcagcaactttgccatgagctgggtccgacaggcccctggcaaaggacttgaatgggtgtccacaatcagcggcagcgccggcacaacagattacgccgattctgtgaagggcagattcaccatcagccgggacaacagcaagaaaaccctgtacctccagatgaacagcctgcgcgtggaagataccgccgtgtactactgtgccgatggcagaggccccttcttcgattatcgcggccagggcacactggtcaccgtttcttctggtaccggcggaggcggatctggcggcggaggtagcggtggcggaggatctgaattcgacatccagctgacacagagcccttctagcctgtctgccagcgtgggcgacagagtgaccatcacctgtagcacaagcagcagcgtgtcctacatgcactggtatcagcagaagcccggcaaggcccctaagctgctgatctacagcaccagcaatctggcctctggcgtgcccagcagattttctggctctggcagcggcaccgacttcaccttcacaatatccagcctccagcctgaggacattgccacctactactgccaccagtggtctagctaccccacattcggccagggcaccaaggtggaaatcaaactcgaggacctgaagaacgtgttcccacctgaggtggccgtgttcgagcctagcgaggccgagatcagccacacccagaaagccaccctcgtgtgcctggctaccggcttctaccccgaccatgtggaactgtcttggtgggtcaacggcaaagaggtgcacagcggcgtgtgtaccgacccccagccactgaaagaacagcccgccctgaacgacagccggtactgcctgagcagcagactgagagtgtccgccaccttctggcagaacccccggaaccacttcagatgccaggtgcagttctacggcctgagcgagaacgacgagtggacccaggacagagccaagcccgtgacccagatcgtgtctgccgaagcctggggcagagccgattgcggctttaccagcgagagctaccagcagggcgtgctgagcgccaccatcctgtacgagatcctgctgggcaaggccaccctgtacgccgtgctggtgtctgccctggtgctgatggctatggtcaagcggaaggacagccggggaagggccaagcgatctggatctggagcaacaaacttctcactactcaaacaagcaggtgacgtggaggagaatcccgggcctactagtatggactggatttggcgcatccttttccttgtcggcgctgctaccggcgcccattccgggcccgaagtgcagctggttgaatctggcggaggactggttcaggctggcggatctctgagactgtcttgtgccgccagcggcagaacctttagcatgggctggtttagacaggcccctggcaaagagagagagttcgtcgccgccatcacatacagcggcggcagcccttactacgcctcttctgtcagaggccggttcaccatcagccgggacaacgccaagaacaccgtgtacctccagatgaacagcctgaagccagaggacaccgccgtgtactactgtgccgccaatccaacctacggcagcgactggaatgccgagaattggggccagggcacccaagtgacagtgtctagtggatccggcggcggaggatctggcggaggcggatctgggggcggaggctctttcgaaggagtgcattctcaggttcagctgcaagagtctggccctggacttgtgcggcctagccaaacactgagcctgacctgtaccgtgtccggcttcacaatcagctccggctacagctggcactgggtccgacaaccacctggcagaggactggaatggatcggctacatccagtacagcggcatcaccaactacaaccccagcctgaagtcccgcgtgaccatgctggtggacacctccaagaaccagttcagcctgagactgagcagcgtgacagccgccgatacagccgtgtactactgcgccagagaggactacgactaccactggtacttcgacgtgtggggccagggaaccaccgtgacagtttcttctacgcgtatccagaaccctgatcctgccgtgtaccagctgcgggatagcaagagcagcgacaagagcgtgtgtctgttcaccgacttcgacagccagaccaacgtgtcccagagcaaggactccgacgtgtacatcaccgataagtgcgtgctggacatgcggagcatggacttcaagagcaactccgccgtggcctggtccaacaagtccgatttcgcctgcgccaacgccttcaacaacagcattatccccgaggacacattcttcccaagccccgagagcagctgcgacgtgaagctggtggaaaagagcttcgagacagacaccaacctgaacttccagaacctgagcgtgatcggcttcagaatcctgctgctgaaagtggccggctttaacctgctgatgaccctgcggctgtggtccagc

SEQ ID NO: 8858 - DNA, 2181 bp, Artificial Sequence
  Synthetic Polynucloetide
atggccttaccagtgaccgccttgctcctgccgctggccttgctgctccacgccgccaggccggacatccagatgacacagagccctagcagcctgtctgccagcgtgggagacagagtgaccatcacctgtagagccagccaggacgtgaacacagccgtggcttggtatcagcagaagcctggcaaggcccctaagctgctgatctacagcgccagctttctgtacagcggcgtgcccagcagattcagcggaagcagaagcggcaccgacttcaccctgacaatatccagcctccagcctgaggacttcgccacctactactgccagcaggcttacaccacacctccaacattcggccagggcaccaaggtggaaatcaagagaacaggcggaggcggaagtggaggcggaggatctggcggcggaggctctgaagtgcagctggttgaatcaggtggcggcctggttcaacctggcggatctctgagactgagctgtgccgccagcggcttcaacatcaaggacacctacatccactgggtccgacaggcccctggcaaaggacttgaatgggtcgccagaatctaccccaccaacggctacaccagatacgccgactctgtgaagggcagattcaccatcagcgccgacaccagcaagaacaccgcctacctccagatgaactccctgagagccgaggacaccgccgtgtactactgtagcagatggggcggagccggagcctacgctatggatgtttggggccagggaaccctggtcaccgtgtcatctacgcgtgagcagaaactgatctcggaagaggatctggcgaagcccaccacgacgccagcgccgcgaccaccaacaccggcgcccaccatcgcgtcgcagcccctgtccctgcgcccagaggcgtgccggccagcggcggggggcgcagtgcacacgagggggctggacttcgcctgtgacatctacatctgggcgcccttggccgggacttgtggggtccttctcctgtcactggttatcaccctttactgcaaacggggcagaaagaaactcctgtatatattcaaacaaccatttatgagaccagtacaaactactcaagaggaagatggctgtagctgccgatttccagaagaagaagaaggaggatgtgaactgagagtgaagttcagcaggagcgcagacgcccccgcgtaccagcagggccagaaccagctctataacgagctgaatctaggacgaagagaggagtacgatgttttggacaagagacgtggccgggaccctgagatggggggaaagccgagaaggaagaaccctcaggaaggcctgtacaatgaactgcagaaagataagatggcggaggcctacagtgagattgggatgaaaggcgagcgccggaggggcaaggggcacgatggcctttaccagggtctcagtacagccaccaaggacacctacgacgcccttcacatgcaggccctgccccctcgctctagtggctccggcgagggcagaggaagtctactaacctgcggagatgtggaagaaaatcctggcccacatatgaccgagtacaagcccacggtgcgcctcgccacccgcgacgacgtccccagggccgtacgcaccctcgccgccgcgttcgccgactaccccgccacgcgccacaccgtcgatccggaccgccacatcgagcgggtcaccgagctgcaagaactcttcctcacgcgcgtcgggctcgacatcggcaaggtgtgggtcgcggacgacggcgccgcggtggcggtctggaccacgccggagagcgtcgaagcgggggcggtgttcgccgagatcggcccgcgcatggccgagttgagcggttcccggctggccgcgcagcaacagatggaaggcctcctggcgccgcaccggcccaaggagcccgcgtggttcctggccaccgtcggcgtctcgcccgaccaccagggcaagggtctgggcagcgccgtcgtgctccccggagtggaggcggccgagcgcgccggggtgcccgccttcctggagacctccgcgccccgcaacctccccttctacgagcggctcggcttcaccgtcaccgccgacgtcgaggtgcccgaaggaccgcgcacctggtgcatgacccgcaagcccggtgcctga

SEQ ID NO: 8859 - DNA, 2163 bp, Artificial Sequence
  Synthetic Polynucloetide
atggccttaccagtgaccgccttgctcctgccgctggccttgctgctccacgccgccaggccggacatccagatgacacagagccctagcagcctgtctgccagcgtgggagacagagtgaccatcacctgtagagccagccaggacgtgaacacagccgtggcttggtatcagcagaagcctggcaaggcccctaagctgctgatctacagcgccagctttctgtacagcggcgtgcccagcagattcagcggaagcagaagcggcaccgacttcaccctgacaatatccagcctccagcctgaggacttcgccacctactactgccagcaggcttacaccacacctccaacattcggccagggcaccaaggtggaaatcaagagaacaggcggaggcggaagtggaggcggaggatctggcggcggaggctctgaagtgcagctggttgaatcaggtggcggcctggttcaacctggcggatctctgagactgagctgtgccgccagcggcttcaacatcaaggacacctacatccactgggtccgacaggcccctggcaaaggacttgaatgggtcgccagaatctaccccaccaacggctacaccagatacgccgactctgtgaagggcagattcaccatcagcgccgacaccagcaagaacaccgcctacctccagatgaactccctgagagccgaggacaccgccgtgtactactgtagcagatggggcggagccggagcctacgctatggatgtttggggccagggaaccctggtcaccgtgtcatctacgcgtgagcagaaactgatctcggaagaggatctgaaaattgaagttatgtatcctcctccttacctagacaatgagaagagcaatggaaccattatccatgtgaaagggaaacacctttgtccaagtcccctatttcccggaccttctaagcccttttgggtgctggtggtggttgggggagtcctggcttgctatagcttgctagtaacagtggcctttattattttctgggtgaggagtaagaggagcaggctcctgcacagtgactacatgaacatgactccacgccgccccggacccacccgcaagcattaccagccctatgccccaccacgcgacttcgcagcctatcgctccagagtgaagttcagcaggagcgcagacgcccccgcgtaccagcagggccagaaccagctctataacgagctcaatctaggacgaagagaggagtacgatgttttggacaagagacgtggccgggaccctgagatggggggaaagccgagaaggaagaaccctcaggaaggcctgtacaatgaactgcagaaagataagatggcggaggcctacagtgagattgggatgaaaggcgagcgccggaggggcaaggggcacgatggcctttaccagggtctcagtacagccaccaaggacacctacgacgcccttcacatgcaggccctgccccctcgctctagtggctccggcgagggcagaggaagtctactaacctgcggagatgtggaagaaaatcctggcccacatatgaccgagtacaagcccacggtgcgcctcgccacccgcgacgacgtccccagggccgtacgcaccctcgccgccgcgttcgccgactaccccgccacgcgccacaccgtcgatccggaccgccacatcgagcgggtcaccgagctgcaagaactcttcctcacgcgcgtcgggctcgacatcggcaaggtgtgggtcgcggacgacggcgccgcggtggcggtctggaccacgccggagagcgtcgaagcgggggcggtgttcgccgagatcggcccgcgcatggccgagttgagcggttcccggctggccgcgcagcaacagatggaaggcctcctggcgccgcaccggcccaaggagcccgcgtggttcctggccaccgtcggcgtctcgcccgaccaccagggcaagggtctgggcagcgccgtcgtgctccccggagtggaggcggccgagcgcgccggggtgcccgccttcctggagacctccgcgccccgcaacctccccttctacgagcggctcggcttcaccgtcaccgccgacgtcgaggtgcccgaaggaccgcgcacctggtgcatgacccgcaagcccggtgcctga

SEQ ID NO: 8860 - DNA, 1491 bp, Artificial Sequence
  Synthetic Polynucloetide
atggccttaccagtgaccgccttgctcctgccgctggccttgctgctccacgccgccaggccggacatccagatgacacagagccctagcagcctgtctgccagcgtgggagacagagtgaccatcacctgtagagccagccaggacgtgaacacagccgtggcttggtatcagcagaagcctggcaaggcccctaagctgctgatctacagcgccagctttctgtacagcggcgtgcccagcagattcagcggaagcagaagcggcaccgacttcaccctgacaatatccagcctccagcctgaggacttcgccacctactactgccagcaggcttacaccacacctccaacattcggccagggcaccaaggtggaaatcaagagaacaggcggaggcggaagtggaggcggaggatctggcggcggaggctctgaagtgcagctggttgaatcaggtggcggcctggttcaacctggcggatctctgagactgagctgtgccgccagcggcttcaacatcaaggacacctacatccactgggtccgacaggcccctggcaaaggacttgaatgggtcgccagaatctaccccaccaacggctacaccagatacgccgactctgtgaagggcagattcaccatcagcgccgacaccagcaagaacaccgcctacctccagatgaactccctgagagccgaggacaccgccgtgtactactgtagcagatggggcggagccggagcctacgctatggatgtttggggccagggaaccctggtcaccgtgtcatctacgcgtgagcagaaactgatctcggaagaggatctgaaaattgaagttatgtatcctcctccttacctagacaatgagaagagcaatggaaccattatccatgtgaaagggaaacacctttgtccaagtcccctatttcccggaccttctaagcccttttgggtgctggtggtggttgggggagtcctggcttgctatagcttgctagtaacagtggcctttattattttctgggtgaggagtaagaggagcaggctcctgcacagtgactacatgaacatgactccacgccgccccggacccacccgcaagcattaccagccctatgccccaccacgcgacttcgcagcctatcgctccagagtgaagttcagcaggagcgcagacgcccccgcgtaccagcagggccagaaccagctctataacgagctcaatctaggacgaagagaggagtacgatgttttggacaagagacgtggccgggaccctgagatggggggaaagccgagaaggaagaaccctcaggaaggcctgtacaatgaactgcagaaagataagatggcggaggcctacagtgagattgggatgaaaggcgagcgccggaggggcaaggggcacgatggcctttaccagggtctcagtacagccaccaaggacacctacgacgcccttcacatgcaggccctgccccctcgc

SEQ ID NO: 8861 - DNA, 1512 bp, Artificial Sequence
  Synthetic Polynucloetide
atggccttaccagtgaccgccttgctcctgccgctggccttgctgctccacgccgccaggccggacatccagatgacacagagccctagcagcctgtctgccagcgtgggagacagagtgaccatcacctgtagagccagccaggacgtgaacacagccgtggcttggtatcagcagaagcctggcaaggcccctaagctgctgatctacagcgccagctttctgtacagcggcgtgcccagcagattcagcggaagcagaagcggcaccgacttcaccctgacaatatccagcctccagcctgaggacttcgccacctactactgccagcaggcttacaccacacctccaacattcggccagggcaccaaggtggaaatcaagagaacaggcggaggcggaagtggaggcggaggatctggcggcggaggctctgaagtgcagctggttgaatcaggtggcggcctggttcaacctggcggatctctgagactgagctgtgccgccagcggcttcaacatcaaggacacctacatccactgggtccgacaggcccctggcaaaggacttgaatgggtcgccagaatctaccccaccaacggctacaccagatacgccgactctgtgaagggcagattcaccatcagcgccgacaccagcaagaacaccgcctacctccagatgaactccctgagagccgaggacaccgccgtgtactactgtagcagatggggcggagccggagcctacgctatggatgtttggggccagggaaccctggtcaccgtgtcatctacgcgtgagcagaaactgatctcggaagaggatctggcgaagcccaccacgacgccagcgccgcgaccaccaacaccggcgcccaccatcgcgtcgcagcccctgtccctgcgcccagaggcgtgccggccagcggcggggggcgcagtgcacacgagggggctggacttcgcctgtgacatctacatctgggcgcccttggccgggacttgtggggtccttctcctgtcactggttatcaccctttactgcaaacggggcagaaagaaactcctgtatatattcaaacaaccatttatgagaccagtacaaactactcaagaggaagatggctgtagctgccgatttccagaagaagaagaaggaggatgtgaactgagagtgaagttcagcaggagcgcagacgcccccgcgtaccagcagggccagaaccagctctataacgagctgaatctaggacgaagagaggagtacgatgttttggacaagagacgtggccgggaccctgagatggggggaaagccgagaaggaagaaccctcaggaaggcctgtacaatgaactgcagaaagataagatggcggaggcctacagtgagattgggatgaaaggcgagcgccggaggggcaaggggcacgatggcctttaccagggtctcagtacagccaccaaggacacctacgacgcccttcacatgcaggccctgccccctcgctga

SEQ ID NO: 8862 - DNA, 1512 bp, Artificial Sequence
  Synthetic Polynucloetide
atggccttaccagtgaccgccttgctcctgccgctggccttgctgctccacgccgccaggccggaagtgcagctggttgaatcaggtggcggcctggttcaacctggcggatctctgagactgagctgtgccgccagcggcttcaacatcaaggacacctacatccactgggtccgacaggcccctggcaaaggacttgaatgggtcgccagaatctaccccaccaacggctacaccagatacgccgactctgtgaagggcagattcaccatcagcgccgacaccagcaagaacaccgcctacctccagatgaactccctgagagccgaggacaccgccgtgtactactgtagcagatggggcggagccggagcctacgctatggatgtttggggccagggaaccctggtcaccgtgtcatctggcggaggcggaagtggaggcggaggatctggcggcggaggctctgacatccagatgacacagagccctagcagcctgtctgccagcgtgggagacagagtgaccatcacctgtagagccagccaggacgtgaacacagccgtggcttggtatcagcagaagcctggcaaggcccctaagctgctgatctacagcgccagctttctgtacagcggcgtgcccagcagattcagcggaagcagaagcggcaccgacttcaccctgacaatatccagcctccagcctgaggacttcgccacctactactgccagcaggcttacaccacacctccaacattcggccagggcaccaaggtggaaatcaagagaacaacgcgtgagcagaaactgatctcggaagaggatctggcgaagcccaccacgacgccagcgccgcgaccaccaacaccggcgcccaccatcgcgtcgcagcccctgtccctgcgcccagaggcgtgccggccagcggcggggggcgcagtgcacacgagggggctggacttcgcctgtgacatctacatctgggcgcccttggccgggacttgtggggtccttctcctgtcactggttatcaccctttactgcaaacggggcagaaagaaactcctgtatatattcaaacaaccatttatgagaccagtacaaactactcaagaggaagatggctgtagctgccgatttccagaagaagaagaaggaggatgtgaactgagagtgaagttcagcaggagcgcagacgcccccgcgtaccagcagggccagaaccagctctataacgagctgaatctaggacgaagagaggagtacgatgttttggacaagagacgtggccgggaccctgagatggggggaaagccgagaaggaagaaccctcaggaaggcctgtacaatgaactgcagaaagataagatggcggaggcctacagtgagattgggatgaaaggcgagcgccggaggggcaaggggcacgatggcctttaccagggtctcagtacagccaccaaggacacctacgacgcccttcacatgcaggccctgccccctcgctga

SEQ ID NO: 8863 - DNA, 2751 bp, Artificial Sequence
  Synthetic Polynucloetide
atggccttaccagtgaccgccttgctcctgccgctggccttgctgctccacgccgccaggccggacatccagatgacacagagccctagcagcctgtctgccagcgtgggagacagagtgaccatcacctgtagagccagccaggacgtgaacacagccgtggcttggtatcagcagaagcctggcaaggcccctaagctgctgatctacagcgccagctttctgtacagcggcgtgcccagcagattcagcggaagcagaagcggcaccgacttcaccctgacaatatccagcctccagcctgaggacttcgccacctactactgccagcaggcttacaccacacctccaacattcggccagggcaccaaggtggaaatcaagagaacaggcggaggcggaagtggaggcggaggatctggcggcggaggctctgaagtgcagctggttgaatcaggtggcggcctggttcaacctggcggatctctgagactgagctgtgccgccagcggcttcaacatcaaggacacctacatccactgggtccgacaggcccctggcaaaggacttgaatgggtcgccagaatctaccccaccaacggctacaccagatacgccgactctgtgaagggcagattcaccatcagcgccgacaccagcaagaacaccgcctacctccagatgaactccctgagagccgaggacaccgccgtgtactactgtagcagatggggcggagccggagcctacgctatggatgtttggggccagggaaccctggtcaccgtgtcatctacgcgtgagcagaaactgatctcggaagaggatctggcgaagcccaccacgacgccagcgccgcgaccaccaacaccggcgcccaccatcgcgtcgcagcccctgtccctgcgcccagaggcgtgccggccagcggcggggggcgcagtgcacacgagggggctggacttcgcctgtgacatctacatctgggcgcccttggccgggacttgtggggtccttctcctgtcactggttatcaccctttactgcgggcgcgccagagtgaagttcagcaggagcgcagacgcccccgcgtaccagcagggccagaaccagctctataacgagctgaatctaggacgaagagaggagtacgatgttttggacaagagacgtggccgggaccctgagatggggggaaagccgagaaggaagaaccctcaggaaggcctgtacaatgaactgcagaaagataagatggcggaggcctacagtgagattgggatgaaaggcgagcgccggaggggcaaggggcacgatggcctttaccagggtctcagtacagccaccaaggacacctacgacgcccttcacatgcaggccctgccccctcgctctagaggatctggagcaacaaacttctcactactcaaacaagcaggtgacgtggaggagaatcccgggcctgggatccacatggccacttacgaggttctctgtgaggtggcgcggaaactgggcacggatgacagggaagtggtattgttcctcctaaacgtgttcatacctcaacccacactggcccaattaattggagctcttagagctttaaaggaggagggcaggttaacgtttcccctgttagcggaatgtctgtttcgtgcaggtcgcagagacctcttgcgcgacctgcttcacttagacccgcgttttttagagcgccacctagcgggcacaatgagttatttcagcccttatcagctcactgttctccacgtagacggggagctgtgtgcgagggatattaggtctttgatatttttaagcaaggacactatagggtctcgcagcacaccacagacattcttacactgggtgtactgtatggaaaacttagacctactgggtcccactgacgtggatgccctaatgtcaatgcttagatctttgtcaagagtagacctacagcgccaagtgcaaaccctaatgggccttcacctttccggcccatcacactcccaacactatcgccatacaccactcgagaccgatttctacgactacaaggacgacgatgacaagactagtggctccggcgagggcagaggaagtctactaacctgcggagatgtggaagaaaatcctggcccacatatgaccgagtacaagcccacggtgcgcctcgccacccgcgacgacgtccccagggccgtacgcaccctcgccgccgcgttcgccgactaccccgccacgcgccacaccgtcgatccggaccgccacatcgagcgggtcaccgagctgcaagaactcttcctcacgcgcgtcgggctcgacatcggcaaggtgtgggtcgcggacgacggcgccgcggtggcggtctggaccacgccggagagcgtcgaagcgggggcggtgttcgccgagatcggcccgcgcatggccgagttgagcggttcccggctggccgcgcagcaacagatggaaggcctcctggcgccgcaccggcccaaggagcccgcgtggttcctggccaccgtcggcgtctcgcccgaccaccagggcaagggtctgggcagcgccgtcgtgctccccggagtggaggcggccgagcgcgccggggtgcccgccttcctggagacctccgcgccccgcaacctccccttctacgagcggctcggcttcaccgtcaccgccgacgtcgaggtgcccgaaggaccgcgcacctggtgcatgacccgcaagcccggtgcctga

SEQ ID NO: 8864 - DNA, 2571 bp, Artificial Sequence
  Synthetic Polynucloetide
atggccttaccagtgaccgccttgctcctgccgctggccttgctgctccacgccgccaggccggacatccagatgacacagagccctagcagcctgtctgccagcgtgggagacagagtgaccatcacctgtagagccagccaggacgtgaacacagccgtggcttggtatcagcagaagcctggcaaggcccctaagctgctgatctacagcgccagctttctgtacagcggcgtgcccagcagattcagcggaagcagaagcggcaccgacttcaccctgacaatatccagcctccagcctgaggacttcgccacctactactgccagcaggcttacaccacacctccaacattcggccagggcaccaaggtggaaatcaagagaacactcgagatccagaaccctgatcctgccgtgtaccagctgcgggatagcaagagcagcgacaagagcgtgtgtctgttcaccgacttcgacagccagaccaacgtgtcccagagcaaggactccgacgtgtacatcaccgataagtgcgtgctggacatgcggagcatggacttcaagagcaactccgccgtggcctggtccaacaagtccgatttcgcctgcgccaacgccttcaacaacagcattatccccgaggacacattcttcccaagcagcgacgtgccctgcgacgtgaagctggtggaaaagagcttcgagacagacaccaacctgaacttccagaacctgagcgtgatcggcttcagaatcctgctgctgaaagtggccggctttaacctgctgatgaccctgcggctgtggtccagccgcgccaagagaagcggatctggcgtgaagcagaccctgaatttcgacctgctgaagctggctggcgacgtggaatccaacccaggccctactagtatggactggatttggcgcatccttttccttgtcggcgctgctaccggcgcgcattccttcgaagaagtgcagctggttgaatcaggtggcggcctggttcaacctggcggatctctgagactgagctgtgccgccagcggcttcaacatcaaggacacctacatccactgggtccgacaggcccctggcaaaggacttgaatgggtcgccagaatctaccccaccaacggctacaccagatacgccgactctgtgaagggcagattcaccatcagcgccgacaccagcaagaacaccgcctacctccagatgaactccctgagagccgaggacaccgccgtgtactactgtagcagatggggcggagccggagcctacgctatggatgtttggggccagggaaccctggtcaccgtgtcatctacgcgtgaggacctgaagaacgtgttcccacctgaggtggccgtgttcgagcctagcaaggccgagatcgcccacacccagaaagccaccctcgtgtgcctggctaccggcttctaccccgaccatgtggaactgtcttggtgggtcaacggcaaagaggtgcacagcggcgtgtgtaccgacccccagccactgaaagaacagcccgccctgaacgacagccggtactgcctgagcagcagactgagagtgtccgccaccttctggcagaacccccggaaccacttcagatgccaggtgcagttctacggcctgagcgagaacgacgagtggacccaggacagagccaagcccgtgacccagatcgtgtctgccgaagcctggggcagagccgattgcggcatcaccagcgccagctaccaccagggcgtgctgagcgccaccatcctgtacgagatcctgctgggcaaggccaccctgtacgccgtgctggtgtctgccctggtgctgatggctatggtcaagcggaaggacagccggggaagggccaagcgatctggatctggagcaacaaacttctcactactcaaacaagcaggtgacgtggaggagaatcccgggccttctagaggccatatgaccgagtacaagcccacggtgcgcctcgccacccgcgacgacgtccccagggccgtacgcaccctcgccgccgcgttcgccgactaccccgccacgcgccacaccgtcgatccggaccgccacatcgagcgggtcaccgagctgcaagaactcttcctcacgcgcgtcgggctcgacatcggcaaggtgtgggtcgcggacgacggcgccgcggtggcggtctggaccacgccggagagcgtcgaagcgggggcggtgttcgccgagatcggcccgcgcatggccgagttgagcggttcccggctggccgcgcagcaacagatggaaggcctcctggcgccgcaccggcccaaggagcccgcgtggttcctggccaccgtcggcgtctcgcccgaccaccagggcaagggtctgggcagcgccgtcgtgctccccggagtggaggcggccgagcgcgccggggtgcccgccttcctggagacctccgcgccccgcaacctccccttctacgagcggctcggcttcaccgtcaccgccgacgtcgaggtgcccgaaggaccgcgcacctggtgcatgacccgcaagcccggtgcctga

SEQ ID NO: 8865 - DNA, 2568 bp, Artificial Sequence
  Synthetic Polynucloetide
atggccttaccagtgaccgccttgctcctgccgctggccttgctgctccacgccgccaggccggacatccagatgacacagagccctagcagcctgtctgccagcgtgggagacagagtgaccatcacctgtagagccagccaggacgtgaacacagccgtggcttggtatcagcagaagcctggcaaggcccctaagctgctgatctacagcgccagctttctgtacagcggcgtgcccagcagattcagcggaagcagaagcggcaccgacttcaccctgacaatatccagcctccagcctgaggacttcgccacctactactgccagcaggcttacaccacacctccaacattcggccagggcaccaaggtggaaatcaagagaacactcgaggacctgaagaacgtgttcccacctgaggtggccgtgttcgagcctagcaaggccgagatcgcccacacccagaaagccaccctcgtgtgcctggctaccggcttctaccccgaccatgtggaactgtcttggtgggtcaacggcaaagaggtgcacagcggcgtgtgtaccgacccccagccactgaaagaacagcccgccctgaacgacagccggtactgcctgagcagcagactgagagtgtccgccaccttctggcagaacccccggaaccacttcagatgccaggtgcagttctacggcctgagcgagaacgacgagtggacccaggacagagccaagcccgtgacccagatcgtgtctgccgaagcctggggcagagccgattgcggcatcaccagcgccagctaccaccagggcgtgctgagcgccaccatcctgtacgagatcctgctgggcaaggccaccctgtacgccgtgctggtgtctgccctggtgctgatggctatggtcaagcggaaggacagccggggaagggccaagcgatctggatctggagcaacaaacttctcactactcaaacaagcaggtgacgtggaggagaatcccgggcctactagtatggactggatttggcgcatccttttccttgtcggcgctgctaccggcgcgcattccttcgaagaagtgcagctggttgaatcaggtggcggcctggttcaacctggcggatctctgagactgagctgtgccgccagcggcttcaacatcaaggacacctacatccactgggtccgacaggcccctggcaaaggacttgaatgggtcgccagaatctaccccaccaacggctacaccagatacgccgactctgtgaagggcagattcaccatcagcgccgacaccagcaagaacaccgcctacctccagatgaactccctgagagccgaggacaccgccgtgtactactgtagcagatggggcggagccggagcctacgctatggatgtttggggccagggaaccctggtcaccgtgtcatctacgcgtatccagaaccctgatcctgccgtgtaccagctgcgggatagcaagagcagcgacaagagcgtgtgtctgttcaccgacttcgacagccagaccaacgtgtcccagagcaaggactccgacgtgtacatcaccgataagtgcgtgctggacatgcggagcatggacttcaagagcaactccgccgtggcctggtccaacaagtccgatttcgcctgcgccaacgccttcaacaacagcattatccccgaggacacattcttcccaagcagcgacgtgccctgcgacgtgaagctggtggaaaagagcttcgagacagacaccaacctgaacttccagaacctgagcgtgatcggcttcagaatcctgctgctgaaagtggccggctttaacctgctgatgaccctgcggctgtggtccagccgcgccaagagaagcggatctggcgtgaagcagaccctgaatttcgacctgctgaagctggctggcgacgtggaatccaacccaggcccttctagaggccatatgaccgagtacaagcccacggtgcgcctcgccacccgcgacgacgtccccagggccgtacgcaccctcgccgccgcgttcgccgactaccccgccacgcgccacaccgtcgatccggaccgccacatcgagcgggtcaccgagctgcaagaactcttcctcacgcgcgtcgggctcgacatcggcaaggtgtgggtcgcggacgacggcgccgcggtggcggtctggaccacgccggagagcgtcgaagcgggggcggtgttcgccgagatcggcccgcgcatggccgagttgagcggttcccggctggccgcgcagcaacagatggaaggcctcctggcgccgcaccggcccaaggagcccgcgtggttcctggccaccgtcggcgtctcgcccgaccaccagggcaagggtctgggcagcgccgtcgtgctccccggagtggaggcggccgagcgcgccggggtgcccgccttcctggagacctccgcgccccgcaacctccccttctacgagcggctcggcttcaccgtcaccgccgacgtcgaggtgcccgaaggaccgcgcacctggtgcatgacccgcaagcccggtgcctga

SEQ ID NO: 8866 - DNA, 1866 bp, Artificial Sequence
  Synthetic Polynucloetide
atggccttaccagtgaccgccttgctcctgccgctggccttgctgctccacgccgccaggccggacatccagatgacacagagccctagcagcctgtctgccagcgtgggagacagagtgaccatcacctgtagagccagccaggacgtgaacacagccgtggcttggtatcagcagaagcctggcaaggcccctaagctgctgatctacagcgccagctttctgtacagcggcgtgcccagcagattcagcggaagcagaagcggcaccgacttcaccctgacaatatccagcctccagcctgaggacttcgccacctactactgccagcaggcttacaccacacctccaacattcggccagggcaccaaggtggaaatcaagagaacactcgaggacctgaagaacgtgttcccacctgaggtggccgtgttcgagcctagcgaggccgagatcagccacacccagaaagccaccctcgtgtgcctggctaccggcttctaccccgaccatgtggaactgtcttggtgggtcaacggcaaagaggtgcacagcggcgtgtgtaccgacccccagccactgaaagaacagcccgccctgaacgacagccggtactgcctgagcagcagactgagagtgtccgccaccttctggcagaacccccggaaccacttcagatgccaggtgcagttctacggcctgagcgagaacgacgagtggacccaggacagagccaagcccgtgacccagatcgtgtctgccgaagcctggggcagagccgattgcggctttaccagcgagagctaccagcagggcgtgctgagcgccaccatcctgtacgagatcctgctgggcaaggccaccctgtacgccgtgctggtgtctgccctggtgctgatggctatggtcaagcggaaggacagccggggaagggccaagcgatctggatctggagcaacaaacttctcactactcaaacaagcaggtgacgtggaggagaatcccgggcctactagtatggactggatttggcgcatccttttccttgtcggcgctgctaccggcgcgcattccttcgaagaagtgcagctggttgaatcaggtggcggcctggttcaacctggcggatctctgagactgagctgtgccgccagcggcttcaacatcaaggacacctacatccactgggtccgacaggcccctggcaaaggacttgaatgggtcgccagaatctaccccaccaacggctacaccagatacgccgactctgtgaagggcagattcaccatcagcgccgacaccagcaagaacaccgcctacctccagatgaactccctgagagccgaggacaccgccgtgtactactgtagcagatggggcggagccggagcctacgctatggatgtttggggccagggaaccctggtcaccgtgtcatctacgcgtatccagaaccctgatcctgccgtgtaccagctgcgggatagcaagagcagcgacaagagcgtgtgtctgttcaccgacttcgacagccagaccaacgtgtcccagagcaaggactccgacgtgtacatcaccgataagtgcgtgctggacatgcggagcatggacttcaagagcaactccgccgtggcctggtccaacaagtccgatttcgcctgcgccaacgccttcaacaacagcattatccccgaggacacattcttcccaagccccgagagcagctgcgacgtgaagctggtggaaaagagcttcgagacagacaccaacctgaacttccagaacctgagcgtgatcggcttcagaatcctgctgctgaaagtggccggctttaacctgctgatgaccctgcggctgtggtccagc

SEQ ID NO: 8867 - DNA, 2541 bp, Artificial Sequence
  Synthetic Polynucloetide
atggccttaccagtgaccgccttgctcctgccgctggccttgctgctccacgccgccaggccggacatccagatgacacagagccctagcagcctgtctgccagcgtgggagacagagtgaccatcacctgtagagccagccaggacgtgaacacagccgtggcttggtatcagcagaagcctggcaaggcccctaagctgctgatctacagcgccagctttctgtacagcggcgtgcccagcagattcagcggaagcagaagcggcaccgacttcaccctgacaatatccagcctccagcctgaggacttcgccacctactactgccagcaggcttacaccacacctccaacattcggccagggcaccaaggtggaaatcaagagaacactcgaggacctgaagaacgtgttcccacctgaggtggccgtgttcgagcctagcgaggccgagatcagccacacccagaaagccaccctcgtgtgcctggctaccggcttctaccccgaccatgtggaactgtcttggtgggtcaacggcaaagaggtgcacagcggcgtgtgtaccgacccccagccactgaaagaacagcccgccctgaacgacagccggtactgcctgagcagcagactgagagtgtccgccaccttctggcagaacccccggaaccacttcagatgccaggtgcagttctacggcctgagcgagaacgacgagtggacccaggacagagccaagcccgtgacccagatcgtgtctgccgaagcctggggcagagccgattgcggctttaccagcgagagctaccagcagggcgtgctgagcgccaccatcctgtacgagatcctgctgggcaaggccaccctgtacgccgtgctggtgtctgccctggtgctgatggctatggtcaagcggaaggacagccggggaagggccaagcgatctggatctggagcaacaaacttctcactactcaaacaagcaggtgacgtggaggagaatcccgggcctactagtatggactggatttggcgcatccttttccttgtcggcgctgctaccggcgcgcattccttcgaagaagtgcagctggttgaatcaggtggcggcctggttcaacctggcggatctctgagactgagctgtgccgccagcggcttcaacatcaaggacacctacatccactgggtccgacaggcccctggcaaaggacttgaatgggtcgccagaatctaccccaccaacggctacaccagatacgccgactctgtgaagggcagattcaccatcagcgccgacaccagcaagaacaccgcctacctccagatgaactccctgagagccgaggacaccgccgtgtactactgtagcagatggggcggagccggagcctacgctatggatgtttggggccagggaaccctggtcaccgtgtcatctacgcgtatccagaaccctgatcctgccgtgtaccagctgcgggatagcaagagcagcgacaagagcgtgtgtctgttcaccgacttcgacagccagaccaacgtgtcccagagcaaggactccgacgtgtacatcaccgataagtgcgtgctggacatgcggagcatggacttcaagagcaactccgccgtggcctggtccaacaagtccgatttcgcctgcgccaacgccttcaacaacagcattatccccgaggacacattcttcccaagccccgagagcagctgcgacgtgaagctggtggaaaagagcttcgagacagacaccaacctgaacttccagaacctgagcgtgatcggcttcagaatcctgctgctgaaagtggccggctttaacctgctgatgaccctgcggctgtggtccagccgcgccaagagaagcggatctggcgtgaagcagaccctgaatttcgacctgctgaagctggctggcgacgtggaatccaacccaggcccttctagaggcgggatccacaccatggctacctacgaggtgctgtgcgaggtggcaagaaagctgggcaccgacgacagagaagtggtgctgttcctgctgaacgtgttcatccctcagcctacactggcccagctgatcggtgcactgagagccctgaaagaggaaggccggctgacctttcctctgctggccgaatgcctgttcagagccggaagaagggatctgctgcgggacctgctgcatctggaccccagatttctggaaagacacctggccggcaccatgagctacttcagcccttaccagctgaccgtgctgcacgttgacggcgaactgtgcgccagagatattcggagcctgatcttcctgagcaaggacaccatcggcagccggtctacccctcagacatttctgcactgggtgtactgcatggaaaacctggacctgctcggccccacagatgtggatgccctgatgtccatgctgagaagcctgagcagagtggacctccagagacaggtgcagacactgatgggactgcacctgagcggacctagccacagccagcactacagacacacccct

SEQ ID NO: 8868 - DNA, 1878 bp, Artificial Sequence
  Synthetic Polynucloetide
atggccttaccagtgaccgccttgctcctgccgctggccttgctgctccacgccgccaggccggacatccagatgacacagagccctagcagcctgtctgccagcgtgggagacagagtgaccatcacctgtagagccagccaggacgtgaacacagccgtggcttggtatcagcagaagcctggcaaggcccctaagctgctgatctacagcgccagctttctgtacagcggcgtgcccagcagattcagcggaagcagaagcggcaccgacttcaccctgacaatatccagcctccagcctgaggacttcgccacctactactgccagcaggcttacaccacacctccaacattcggccagggcaccaaggtggaaatcaagagaacactcgagatccagaaccctgatcctgccgtgtaccagctgcgggatagcaagagcagcgacaagagcgtgtgtctgttcaccgacttcgacagccagaccaacgtgtcccagagcaaggactccgacgtgtacatcaccgataagtgcgtgctggacatgcggagcatggacttcaagagcaactccgccgtggcctggtccaacaagtccgatttcgcctgcgccaacgccttcaacaacagcattatccccgaggacacattcttcccaagccccgagagcagctgcgacgtgaagctggtggaaaagagcttcgagacagacaccaacctgaacttccagaacctgagcgtgatcggcttcagaatcctgctgctgaaagtggccggctttaacctgctgatgaccctgcggctgtggtccagccgcgccaagagaagcggatctggcgtgaagcagaccctgaatttcgacctgctgaagctggctggcgacgtggaatccaacccaggccctactagtatggactggatttggcgcatccttttccttgtcggcgctgctaccggcgcgcattccttcgaagaagtgcagctggttgaatcaggtggcggcctggttcaacctggcggatctctgagactgagctgtgccgccagcggcttcaacatcaaggacacctacatccactgggtccgacaggcccctggcaaaggacttgaatgggtcgccagaatctaccccaccaacggctacaccagatacgccgactctgtgaagggcagattcaccatcagcgccgacaccagcaagaacaccgcctacctccagatgaactccctgagagccgaggacaccgccgtgtactactgtagcagatggggcggagccggagcctacgctatggatgtttggggccagggaaccctggtcaccgtgtcatctacgcgtgaggacctgaagaacgtgttcccacctgaggtggccgtgttcgagcctagcgaggccgagatcagccacacccagaaagccaccctcgtgtgcctggctaccggcttctaccccgaccatgtggaactgtcttggtgggtcaacggcaaagaggtgcacagcggcgtgtgtaccgacccccagccactgaaagaacagcccgccctgaacgacagccggtactgcctgagcagcagactgagagtgtccgccaccttctggcagaacccccggaaccacttcagatgccaggtgcagttctacggcctgagcgagaacgacgagtggacccaggacagagccaagcccgtgacccagatcgtgtctgccgaagcctggggcagagccgattgcggctttaccagcgagagctaccagcagggcgtgctgagcgccaccatcctgtacgagatcctgctgggcaaggccaccctgtacgccgtgctggtgtctgccctggtgctgatggctatggtcaagcggaaggacagccgggga

SEQ ID NO: 8869 - DNA, 2544 bp, Artificial Sequence
  Synthetic Polynucloetide
atggccttaccagtgaccgccttgctcctgccgctggccttgctgctccacgccgccaggccggacatccagatgacacagagccctagcagcctgtctgccagcgtgggagacagagtgaccatcacctgtagagccagccaggacgtgaacacagccgtggcttggtatcagcagaagcctggcaaggcccctaagctgctgatctacagcgccagctttctgtacagcggcgtgcccagcagattcagcggaagcagaagcggcaccgacttcaccctgacaatatccagcctccagcctgaggacttcgccacctactactgccagcaggcttacaccacacctccaacattcggccagggcaccaaggtggaaatcaagagaacactcgagatccagaaccctgatcctgccgtgtaccagctgcgggatagcaagagcagcgacaagagcgtgtgtctgttcaccgacttcgacagccagaccaacgtgtcccagagcaaggactccgacgtgtacatcaccgataagtgcgtgctggacatgcggagcatggacttcaagagcaactccgccgtggcctggtccaacaagtccgatttcgcctgcgccaacgccttcaacaacagcattatccccgaggacacattcttcccaagccccgagagcagctgcgacgtgaagctggtggaaaagagcttcgagacagacaccaacctgaacttccagaacctgagcgtgatcggcttcagaatcctgctgctgaaagtggccggctttaacctgctgatgaccctgcggctgtggtccagccgcgccaagagaagcggatctggcgtgaagcagaccctgaatttcgacctgctgaagctggctggcgacgtggaatccaacccaggccctactagtatggactggatttggcgcatccttttccttgtcggcgctgctaccggcgcgcattccttcgaagaagtgcagctggttgaatcaggtggcggcctggttcaacctggcggatctctgagactgagctgtgccgccagcggcttcaacatcaaggacacctacatccactgggtccgacaggcccctggcaaaggacttgaatgggtcgccagaatctaccccaccaacggctacaccagatacgccgactctgtgaagggcagattcaccatcagcgccgacaccagcaagaacaccgcctacctccagatgaactccctgagagccgaggacaccgccgtgtactactgtagcagatggggcggagccggagcctacgctatggatgtttggggccagggaaccctggtcaccgtgtcatctacgcgtgaggacctgaagaacgtgttcccacctgaggtggccgtgttcgagcctagcgaggccgagatcagccacacccagaaagccaccctcgtgtgcctggctaccggcttctaccccgaccatgtggaactgtcttggtgggtcaacggcaaagaggtgcacagcggcgtgtgtaccgacccccagccactgaaagaacagcccgccctgaacgacagccggtactgcctgagcagcagactgagagtgtccgccaccttctggcagaacccccggaaccacttcagatgccaggtgcagttctacggcctgagcgagaacgacgagtggacccaggacagagccaagcccgtgacccagatcgtgtctgccgaagcctggggcagagccgattgcggctttaccagcgagagctaccagcagggcgtgctgagcgccaccatcctgtacgagatcctgctgggcaaggccaccctgtacgccgtgctggtgtctgccctggtgctgatggctatggtcaagcggaaggacagccggggaagggccaagcgatctggatctggagcaacaaacttctcactactcaaacaagcaggtgacgtggaggagaatcccgggccttctagaggcgggatccacaccatggctacctacgaggtgctgtgcgaggtggcaagaaagctgggcaccgacgacagagaagtggtgctgttcctgctgaacgtgttcatccctcagcctacactggcccagctgatcggtgcactgagagccctgaaagaggaaggccggctgacctttcctctgctggccgaatgcctgttcagagccggaagaagggatctgctgcgggacctgctgcatctggaccccagatttctggaaagacacctggccggcaccatgagctacttcagcccttaccagctgaccgtgctgcacgttgacggcgaactgtgcgccagagatattcggagcctgatcttcctgagcaaggacaccatcggcagccggtctacccctcagacatttctgcactgggtgtactgcatggaaaacctggacctgctcggccccacagatgtggatgccctgatgtccatgctgagaagcctgagcagagtggacctccagagacaggtgcagacactgatgggactgcacctgagcggacctagccacagccagcactacagacacacccct

SEQ ID NO: 8870 - DNA, 2703 bp, Artificial Sequence
  Synthetic Polynucloetide
atggccttaccagtgaccgccttgctcctgccgctggccttgctgctccacgccgccaggccgctcgaggggaaaccaattcccaaccctcttctgggactggattcaaccggcagcggcgaggacctgaagaacgtgttcccacctgaggtggccgtgttcgagcctagcaaggccgagatcgcccacacccagaaagccaccctcgtgtgcctggctaccggcttctaccccgaccatgtggaactgtcttggtgggtcaacggcaaagaggtgcacagcggcgtgtgtaccgacccccagccactgaaagaacagcccgccctgaacgacagccggtactgcctgagcagcagactgagagtgtccgccaccttctggcagaacccccggaaccacttcagatgccaggtgcagttctacggcctgagcgagaacgacgagtggacccaggacagagccaagcccgtgacccagatcgtgtctgccgaagcctggggcagagccgattgcggcatcaccagcgccagctaccaccagggcgtgctgagcgccaccatcctgtacgagatcctgctgggcaaggccaccctgtacgccgtgctggtgtctgccctggtgctgatggctatggtcaagcggaaggacagccggggaagggccaagcgatctggatctggagcaacaaacttctcactactcaaacaagcaggtgacgtggaggagaatcccgggcctactagcatggccttaccagtgaccgccttgctcctgccgctggccttgctgctccacgccgccaggccggacatccagatgacacagagccctagcagcctgtctgccagcgtgggagacagagtgaccatcacctgtagagccagccaggacgtgaacacagccgtggcttggtatcagcagaagcctggcaaggcccctaagctgctgatctacagcgccagctttctgtacagcggcgtgcccagcagattcagcggaagcagaagcggcaccgacttcaccctgacaatatccagcctccagcctgaggacttcgccacctactactgccagcaggcttacaccacacctccaacattcggccagggcaccaaggtggaaatcaagagaacaggcggaggcggaagtggaggcggaggatctggcggcggaggctctgaagtgcagctggttgaatcaggtggcggcctggttcaacctggcggatctctgagactgagctgtgccgccagcggcttcaacatcaaggacacctacatccactgggtccgacaggcccctggcaaaggacttgaatgggtcgccagaatctaccccaccaacggctacaccagatacgccgactctgtgaagggcagattcaccatcagcgccgacaccagcaagaacaccgcctacctccagatgaactccctgagagccgaggacaccgccgtgtactactgtagcagatggggcggagccggagcctacgctatggatgtttggggccagggaaccctggtcaccgtgtcatctacgcgtgagcagaaactgatctcggaagaggatgggagcggcatccagaaccctgatcctgccgtgtaccagctgcgggatagcaagagcagcgacaagagcgtgtgtctgttcaccgacttcgacagccagaccaacgtgtcccagagcaaggactccgacgtgtacatcaccgataagtgcgtgctggacatgcggagcatggacttcaagagcaactccgccgtggcctggtccaacaagtccgatttcgcctgcgccaacgccttcaacaacagcattatccccgaggacacattcttcccaagcagcgacgtgccctgcgacgtgaagctggtggaaaagagcttcgagacagacaccaacctgaacttccagaacctgagcgtgatcggcttcagaatcctgctgctgaaagtggccggctttaacctgctgatgaccctgcggctgtggtccagccgcgccaagagaagcggatctggcgtgaagcagaccctgaatttcgacctgctgaagctggctggcgacgtggaatccaacccaggcccttctagaggccatatgaccgagtacaagcccacggtgcgcctcgccacccgcgacgacgtccccagggccgtacgcaccctcgccgccgcgttcgccgactaccccgccacgcgccacaccgtcgatccggaccgccacatcgagcgggtcaccgagctgcaagaactcttcctcacgcgcgtcgggctcgacatcggcaaggtgtgggtcgcggacgacggcgccgcggtggcggtctggaccacgccggagagcgtcgaagcgggggcggtgttcgccgagatcggcccgcgcatggccgagttgagcggttcccggctggccgcgcagcaacagatggaaggcctcctggcgccgcaccggcccaaggagcccgcgtggttcctggccaccgtcggcgtctcgcccgaccaccagggcaagggtctgggcagcgccgtcgtgctccccggagtggaggcggccgagcgcgccggggtgcccgccttcctggagacctccgcgccccgcaacctccccttctacgagcggctcggcttcaccgtcaccgccgacgtcgaggtgcccgaaggaccgcgcacctggtgcatgacccgcaagcccggtgcctga

SEQ ID NO: 8871 - DNA, 2706 bp, Artificial Sequence
  Synthetic Polynucloetide
atggccttaccagtgaccgccttgctcctgccgctggccttgctgctccacgccgccaggccgctcgagcagaaactgatctcggaagaggatctgggctccggcgatcgccctgatcctgccgtgtaccagctgcgggatagcaagagcagcgacaagagcgtgtgtctgttcaccgacttcgacagccagaccaacgtgtcccagagcaaggactccgacgtgtacatcaccgataagtgcgtgctggacatgcggagcatggacttcaagagcaactccgccgtggcctggtccaacaagtccgatttcgcctgcgccaacgccttcaacaacagcattatccccgaggacacattcttcccaagccccgagagcagctgcgacgtgaagctggtggaaaagagcttcgagacagacaccaacctgaacttccagaacctgagcgtgatcggcttcagaatcctgctgctgaaagtggccggctttaacctgctgatgaccctgcggctgtggtccagctctagtcgcgccaagagaagcggatctggcgtgaagcagaccctgaatttcgacctgctgaagctggctggcgacgtggaatccaacccaggccccactagcatggccttaccagtgaccgccttgctcctgccgctggccttgctgctccacgccgccaggccggacatccagatgacacagagccctagcagcctgtctgccagcgtgggagacagagtgaccatcacctgtagagccagccaggacgtgaacacagccgtggcttggtatcagcagaagcctggcaaggcccctaagctgctgatctacagcgccagctttctgtacagcggcgtgcccagcagattcagcggaagcagaagcggcaccgacttcaccctgacaatatccagcctccagcctgaggacttcgccacctactactgccagcaggcttacaccacacctccaacattcggccagggcaccaaggtggaaatcaagagaacaggcggaggcggaagtggaggcggaggatctggcggcggaggctctgaagtgcagctggttgaatcaggtggcggcctggttcaacctggcggatctctgagactgagctgtgccgccagcggcttcaacatcaaggacacctacatccactgggtccgacaggcccctggcaaaggacttgaatgggtcgccagaatctaccccaccaacggctacaccagatacgccgactctgtgaagggcagattcaccatcagcgccgacaccagcaagaacaccgcctacctccagatgaactccctgagagccgaggacaccgccgtgtactactgtagcagatggggcggagccggagcctacgctatggatgtttggggccagggaaccctggtcaccgtgtcatctacgcgtgggaaaccaattcccaaccctcttctgggactggattcaaccggcagcggcgaggacctgaagaacgtgttcccacctgaggtggccgtgttcgagcctagcgaggccgagatcagccacacccagaaagccaccctcgtgtgcctggctaccggcttctaccccgaccatgtggaactgtcttggtgggtcaacggcaaagaggtgcacagcggcgtgtgtaccgacccccagccactgaaagaacagcccgccctgaacgacagccggtactgcctgagcagcagactgagagtgtccgccaccttctggcagaacccccggaaccacttcagatgccaggtgcagttctacggcctgagcgagaacgacgagtggacccaggacagagccaagcccgtgacccagatcgtgtctgccgaagcctggggcagagccgattgcggctttaccagcgagagctaccagcagggcgtgctgagcgccaccatcctgtacgagatcctgctgggcaaggccaccctgtacgccgtgctggtgtctgccctggtgctgatggctatggtcaagcggaaggacagccggggaagggccaagcgatctggatctggagcaacaaacttctcactactcaaacaagcaggtgacgtggaggagaatcccgggccttctagaggccatatgaccgagtacaagcccacggtgcgcctcgccacccgcgacgacgtccccagggccgtacgcaccctcgccgccgcgttcgccgactaccccgccacgcgccacaccgtcgatccggaccgccacatcgagcgggtcaccgagctgcaagaactcttcctcacgcgcgtcgggctcgacatcggcaaggtgtgggtcgcggacgacggcgccgcggtggcggtctggaccacgccggagagcgtcgaagcgggggcggtgttcgccgagatcggcccgcgcatggccgagttgagcggttcccggctggccgcgcagcaacagatggaaggcctcctggcgccgcaccggcccaaggagcccgcgtggttcctggccaccgtcggcgtctcgcccgaccaccagggcaagggtctgggcagcgccgtcgtgctccccggagtggaggcggccgagcgcgccggggtgcccgccttcctggagacctccgcgccccgcaacctccccttctacgagcggctcggcttcaccgtcaccgccgacgtcgaggtgcccgaaggaccgcgcacctggtgcatgacccgcaagcccggtgcctga

SEQ ID NO: 8872 - DNA, 2568 bp, Artificial Sequence
  Synthetic Polynucloetide
atggccttaccagtgaccgccttgctcctgccgctggccttgctgctccacgccgccaggccggacatccagatgacacagagccctagcagcctgtctgccagcgtgggagacagagtgaccatcacctgtagagccagccaggacgtgaacacagccgtggcttggtatcagcagaagcctggcaaggcccctaagctgctgatctacagcgccagctttctgtacagcggcgtgcccagcagattcagcggaagcagaagcggcaccgacttcaccctgacaatatccagcctccagcctgaggacttcgccacctactactgccagcaggcttacaccacacctccaacattcggccagggcaccaaggtggaaatcaagagaacactcgaggacctgaagaacgtgttcccacctgaggtggccgtgttcgagcctagcgaggccgagatcagccacacccagaaagccaccctcgtgtgcctggctaccggcttctaccccgaccatgtggaactgtcttggtgggtcaacggcaaagaggtgcacagcggcgtgtctaccgacccccagccactgaaagaacagcccgccctgaacgacagccggtactgcctgagcagcagactgagagtgtccgccaccttctggcagaacccccggaaccacttcagatgccaggtgcagttctacggcctgagcgagaacgacgagtggacccaggacagagccaagcccgtgacccagatcgtgtctgccgaagcctggggcagagccgattgcggctttaccagcgagagctaccagcagggcgtgctgagcgccaccatcctgtacgagatcctgctgggcaaggccaccctgtacgccgtgctggtgtctgccctggtgctgatggctatggtcaagcggaaggacagccggggaagggccaagcgatctggatctggagcaacaaacttctcactactcaaacaagcaggtgacgtggaggagaatcccgggcctactagtatggactggatttggcgcatccttttccttgtcggcgctgctaccggcgcgcattccttcgaagaagtgcagctggttgaatcaggtggcggcctggttcaacctggcggatctctgagactgagctgtgccgccagcggcttcaacatcaaggacacctacatccactgggtccgacaggcccctggcaaaggacttgaatgggtcgccagaatctaccccaccaacggctacaccagatacgccgactctgtgaagggcagattcaccatcagcgccgacaccagcaagaacaccgcctacctccagatgaactccctgagagccgaggacaccgccgtgtactactgtagcagatggggcggagccggagcctacgctatggatgtttggggccagggaaccctggtcaccgtgtcatctacgcgtatccagaaccctgatcctgccgtgtaccagctgcgggatagcaagagcagcgacaagagcgtgtgtctgttcaccgacttcgacagccagaccaacgtgtcccagagcaaggactccgacgtgtacatcaccgataagaccgtgctggacatgcggagcatggacttcaagagcaactccgccgtggcctggtccaacaagtccgatttcgcctgcgccaacgccttcaacaacagcattatccccgaggacacattcttcccaagccccgagagcagctgcgacgtgaagctggtggaaaagagcttcgagacagacaccaacctgaacttccagaacctgagcgtgatcggcttcagaatcctgctgctgaaagtggccggctttaacctgctgatgaccctgcggctgtggtccagccgcgccaagagaagcggatctggcgtgaagcagaccctgaatttcgacctgctgaagctggctggcgacgtggaatccaacccaggcccttctagaggccatatgaccgagtacaagcccacggtgcgcctcgccacccgcgacgacgtccccagggccgtacgcaccctcgccgccgcgttcgccgactaccccgccacgcgccacaccgtcgatccggaccgccacatcgagcgggtcaccgagctgcaagaactcttcctcacgcgcgtcgggctcgacatcggcaaggtgtgggtcgcggacgacggcgccgcggtggcggtctggaccacgccggagagcgtcgaagcgggggcggtgttcgccgagatcggcccgcgcatggccgagttgagcggttcccggctggccgcgcagcaacagatggaaggcctcctggcgccgcaccggcccaaggagcccgcgtggttcctggccaccgtcggcgtctcgcccgaccaccagggcaagggtctgggcagcgccgtcgtgctccccggagtggaggcggccgagcgcgccggggtgcccgccttcctggagacctccgcgccccgcaacctccccttctacgagcggctcggcttcaccgtcaccgccgacgtcgaggtgcccgaaggaccgcgcacctggtgcatgacccgcaagcccggtgcctga

SEQ ID NO: 8873 - DNA, 2814 bp, Artificial Sequence
  Synthetic Polynucloetide
atggccttaccagtgaccgccttgctcctgccgctggccttgctgctccacgccgccaggccggacatccagatgacacagagccctagcagcctgtctgccagcgtgggagacagagtgaccatcacctgtagagccagccaggacgtgaacacagccgtggcttggtatcagcagaagcctggcaaggcccctaagctgctgatctacagcgccagctttctgtacagcggcgtgcccagcagattcagcggaagcagaagcggcaccgacttcaccctgacaatatccagcctccagcctgaggacttcgccacctactactgccagcaggcttacaccacacctccaacattcggccagggcaccaaggtggaaatcaagagaacactcgaggacctgaagaacgtgttcccacctgaggtggccgtgttcgagcctagcgaggccgagatcagccacacccagaaagccaccctcgtgtgcctggctaccggcttctaccccgaccatgtggaactgtcttggtgggtcaacggcaaagaggtgcacagcggcgtgtctaccgacccccagccactgaaagaacagcccgccctgaacgacagccggtactgcctgagcagcagactgagagtgtccgccaccttctggcagaacccccggaaccacttcagatgccaggtgcagttctacggcctgagcgagaacgacgagtggacccaggacagagccaagcccgtgacccagatcgtgtctgccgaagcctggggcagagccgattgcggctttaccagcgagagctaccagcagggcgtgctgagcgccaccatcctgtacgagatcctgctgggcaaggccaccctgtacgccgtgctggtgtctgccctggtgctgatggctatggtcaagcggaaggacagccggggaagggccaagcgatctggatctggagcaacaaacttctcactactcaaacaagcaggtgacgtggaggagaatcccgggcctactagtatggactggatttggcgcatccttttccttgtcggcgctgctaccggcgcgcattccttcgaagaagtgcagctggttgaatcaggtggcggcctggttcaacctggcggatctctgagactgagctgtgccgccagcggcttcaacatcaaggacacctacatccactgggtccgacaggcccctggcaaaggacttgaatgggtcgccagaatctaccccaccaacggctacaccagatacgccgactctgtgaagggcagattcaccatcagcgccgacaccagcaagaacaccgcctacctccagatgaactccctgagagccgaggacaccgccgtgtactactgtagcagatggggcggagccggagcctacgctatggatgtttggggccagggaaccctggtcaccgtgtcatctacgcgtgagcagaaactgatctcggaagaggatgggagcggcaccccattcccttctctggcccctcccatcatgctgctggtggacggcaagcagcagatggtggtcgtgtgcctggtgctggatgtggccccacctggactggacagccccatctggtttagcgccggcaatggctctgccctggacgcctttacctacggcccaagccctgccaccgatggcacctggacaaatctggcccacctgagcctgcccagcgaggaactggcttcttgggagcctctcgtgtgccacacaggacctggcgctgagggacacagcagatccacccagcctatgcacctgtctggcgaggccagcaccgccagaacctgtcctcaggaacctctgagaggcacccctggcggagcactgtggctgggagtgctgagactgctgctgttcaagctgctgctgtttgacctgctgctgacctgctcctgtctgtgcgatcctgccggccctctgccttctcctgccaccaccacaagactgagagccctgggcagccacagactgcaccctgccacagagacaggcggcagagaggccacaagcagccctagaccccagcccagagacagaagatggggcgataccccccctggcagaaagcctggatctccagtccgcgccaagagaagcggatctggcgtgaagcagaccctgaatttcgacctgctgaagctggctggcgacgtggaatccaacccaggcccttctagaggccatatgaccgagtacaagcccacggtgcgcctcgccacccgcgacgacgtccccagggccgtacgcaccctcgccgccgcgttcgccgactaccccgccacgcgccacaccgtcgatccggaccgccacatcgagcgggtcaccgagctgcaagaactcttcctcacgcgcgtcgggctcgacatcggcaaggtgtgggtcgcggacgacggcgccgcggtggcggtctggaccacgccggagagcgtcgaagcgggggcggtgttcgccgagatcggcccgcgcatggccgagttgagcggttcccggctggccgcgcagcaacagatggaaggcctcctggcgccgcaccggcccaaggagcccgcgtggttcctggccaccgtcggcgtctcgcccgaccaccagggcaagggtctgggcagcgccgtcgtgctccccggagtggaggcggccgagcgcgccggggtgcccgccttcctggagacctccgcgccccgcaacctccccttctacgagcggctcggcttcaccgtcaccgccgacgtcgaggtgcccgaaggaccgcgcacctggtgcatgacccgcaagcccggtgcctga

SEQ ID NO: 8874 - DNA, 2868 bp, Artificial Sequence
  Synthetic Polynucloetide
atggccttaccagtgaccgccttgctcctgccgctggccttgctgctccacgccgccaggccgctcgaggacctgaagaacgtgttcccacctgaggtggccgtgttcgagcctagcgaggccgagatcagccacacccagaaagccaccctcgtgtgcctggctaccggcttctaccccgaccatgtggaactgtcttggtgggtcaacggcaaagaggtgcacagcggcgtgtctaccgacccccagccactgaaagaacagcccgccctgaacgacagccggtactgcctgagcagcagactgagagtgtccgccaccttctggcagaacccccggaaccacttcagatgccaggtgcagttctacggcctgagcgagaacgacgagtggacccaggacagagccaagcccgtgacccagatcgtgtctgccgaagcctggggcagagccgattgcggctttaccagcgagagctaccagcagggcgtgctgagcgccaccatcctgtacgagatcctgctgggcaaggccaccctgtacgccgtgctggtgtctgccctggtgctgatggctatggtcaagcggaaggacagccggggaagggccaagcgatctggatctggagcaacaaacttctcactactcaaacaagcaggtgacgtggaggagaatcccgggcctactagcatggccttaccagtgaccgccttgctcctgccgctggccttgctgctccacgccgccaggccggacatccagatgacacagagccctagcagcctgtctgccagcgtgggagacagagtgaccatcacctgtagagccagccaggacgtgaacacagccgtggcttggtatcagcagaagcctggcaaggcccctaagctgctgatctacagcgccagctttctgtacagcggcgtgcccagcagattcagcggaagcagaagcggcaccgacttcaccctgacaatatccagcctccagcctgaggacttcgccacctactactgccagcaggcttacaccacacctccaacattcggccagggcaccaaggtggaaatcaagagaacaggcggaggcggaagtggaggcggaggatctggcggcggaggctctgaagtgcagctggttgaatcaggtggcggcctggttcaacctggcggatctctgagactgagctgtgccgccagcggcttcaacatcaaggacacctacatccactgggtccgacaggcccctggcaaaggacttgaatgggtcgccagaatctaccccaccaacggctacaccagatacgccgactctgtgaagggcagattcaccatcagcgccgacaccagcaagaacaccgcctacctccagatgaactccctgagagccgaggacaccgccgtgtactactgtagcagatggggcggagccggagcctacgctatggatgtttggggccagggaaccctggtcaccgtgtcatctacgcgtgagcagaaactgatctcggaagaggatctggggagcggcaccccattcccttctctggcccctcccatcatgctgctggtggacggcaagcagcagatggtggtcgtgtgcctggtgctggatgtggccccacctggactggacagccccatctggtttagcgccggcaatggctctgccctggacgcctttacctacggcccaagccctgccaccgatggcacctggacaaatctggcccacctgagcctgcccagcgaggaactggcttcttgggagcctctcgtgtgccacacaggacctggcgctgagggacacagcagatccacccagcctatgcacctgtctggcgaggccagcaccgccagaacctgtcctcaggaacctctgagaggcacccctggcggagcactgtggctgggagtgctgagactgctgctgttcaagctgctgctgtttgacctgctgctgacctgctcctgtctgtgcgatcctgccggccctctgccttctcctgccaccaccacaagactgagagccctgggcagccacagactgcaccctgccacagagacaggcggcagagaggccacaagcagccctagaccccagcccagagacagaagatggggcgataccccccctggcagaaagcctggatctccagtccgcgccaagagaagcggatctggcgtgaagcagaccctgaatttcgacctgctgaagctggctggcgacgtggaatccaacccaggcccttctagatctagaggccatatgaccgagtacaagcccacggtgcgcctcgccacccgcgacgacgtccccagggccgtacgcaccctcgccgccgcgttcgccgactaccccgccacgcgccacaccgtcgatccggaccgccacatcgagcgggtcaccgagctgcaagaactcttcctcacgcgcgtcgggctcgacatcggcaaggtgtgggtcgcggacgacggcgccgcggtggcggtctggaccacgccggagagcgtcgaagcgggggcggtgttcgccgagatcggcccgcgcatggccgagttgagcggttcccggctggccgcgcagcaacagatggaaggcctcctggcgccgcaccggcccaaggagcccgcgtggttcctggccaccgtcggcgtctcgcccgaccaccagggcaagggtctgggcagcgccgtcgtgctccccggagtggaggcggccgagcgcgccggggtgcccgccttcctggagacctccgcgccccgcaacctccccttctacgagcggctcggcttcaccgtcaccgccgacgtcgaggtgcccgaaggaccgcgcacctggtgcatgacccgcaagcccggtgcctga

SEQ ID NO: 8875 - DNA, 2679 bp, Artificial Sequence
  Synthetic Polynucloetide
atggccttaccagtgaccgccttgctcctgccgctggccttgctgctccacgccgccaggccggacatccagatgacacagagccctagcagcctgtctgccagcgtgggagacagagtgaccatcacctgtagagccagccaggacgtgaacacagccgtggcttggtatcagcagaagcctggcaaggcccctaagctgctgatctacagcgccagctttctgtacagcggcgtgcccagcagattcagcggaagcagaagcggcaccgacttcaccctgacaatatccagcctccagcctgaggacttcgccacctactactgccagcaggcttacaccacacctccaacattcggccagggcaccaaggtggaaatcaagagaacactcgaggggaaaccaattcccaaccctcttctgggactggattcaaccggcagcggcgacaagcagctggacgccgacgtgtcccccaagcctaccatcttcctgccctctatcgccgagacaaagctccagaaggccggcacctacctgtgcctgctggaaaagttcttcccagatgtgattaagatccactggcaggaaaagaagtccaacaccatcctgggcagccaggaaggcaacaccatgaagaccaacgacacctacatgaagttcagctggctgaccgtgcccgagaagtccctggacaaagaacacagatgcatcgtgcggcacgaaaacaacaagaacggcgtggaccaggaaatcatcttcccacccatcaagaccgatgtgattacaatggaccccaaggacaactgctccaaggacgccaacgataccctgctgctccagctgaccaacaccagcgcctactacatgtacttgttgctgctgctgaagtccgtggtgtacttcgccatcatcacatgctgcctgctgcggagaaccgccttctgctgcaacggcgagaagtctagggccaagcgatctggatctggagcaacaaacttctcactactcaaacaagcaggtgacgtggaggagaatcccgggcctactagtatggactggatttggcgcatccttttccttgtcggcgctgctaccggcgcgcattccttcgaagaagtgcagctggttgaatcaggtggcggcctggttcaacctggcggatctctgagactgagctgtgccgccagcggcttcaacatcaaggacacctacatccactgggtccgacaggcccctggcaaaggacttgaatgggtcgccagaatctaccccaccaacggctacaccagatacgccgactctgtgaagggcagattcaccatcagcgccgacaccagcaagaacaccgcctacctccagatgaactccctgagagccgaggacaccgccgtgtactactgtagcagatggggcggagccggagcctacgctatggatgtttggggccagggaaccctggtcaccgtgtcatctacgcgtgagcagaaactgatctcggaagaggatgggagcggcagccagcctcacaccaagcccagcgtgttcgtgatgaagaacggcaccaacgtggcctgcctcgtgaaagagttctaccccaaggacatcaggatcaacctggtgtccagcaagaagatcaccgagttcgaccccgccatcgtgatctcccccagcggcaagtacaacgccgtgaagctggggaagtacgaggacagcaacagcgtgacctgctccgtgcagcacgacaacaagaccgtgcacagcaccgactttgaagtgaaaaccgactccaccgaccacgtgaagcccaaagagacagagaacaccaagcagcccagcaagagctgccacaagcccaaggccatcgtgcacaccgagaaagtgaacatgatgagcctgaccgtgctgggcctgcggatgctgttcgccaaaaccgtggccgtgaacttcctgctgaccgccaagctgttcttcctccgcgccaagagaagcggatctggcgtgaagcagaccctgaatttcgacctgctgaagctggctggcgacgtggaatccaacccaggcccttctagaggccatatgaccgagtacaagcccacggtgcgcctcgccacccgcgacgacgtccccagggccgtacgcaccctcgccgccgcgttcgccgactaccccgccacgcgccacaccgtcgatccggaccgccacatcgagcgggtcaccgagctgcaagaactcttcctcacgcgcgtcgggctcgacatcggcaaggtgtgggtcgcggacgacggcgccgcggtggcggtctggaccacgccggagagcgtcgaagcgggggcggtgttcgccgagatcggcccgcgcatggccgagttgagcggttcccggctggccgcgcagcaacagatggaaggcctcctggcgccgcaccggcccaaggagcccgcgtggttcctggccaccgtcggcgtctcgcccgaccaccagggcaagggtctgggcagcgccgtcgtgctccccggagtggaggcggccgagcgcgccggggtgcccgccttcctggagacctccgcgccccgcaacctccccttctacgagcggctcggcttcaccgtcaccgccgacgtcgaggtgcccgaaggaccgcgcacctggtgcatgacccgcaagcccggtgcctga

SEQ ID NO: 8876 - DNA, 1890 bp, Artificial Sequence
  Synthetic Polynucloetide
atggccttaccagtgaccgccttgctcctgccgctggccttgctgctccacgccgccaggccggacatccagatgacacagagccctagcagcctgtctgccagcgtgggagacagagtgaccatcacctgtagagccagccaggacgtgaacacagccgtggcttggtatcagcagaagcctggcaaggcccctaagctgctgatctacagcgccagctttctgtacagcggcgtgcccagcagattcagcggaagcagaagcggcaccgacttcaccctgacaatatccagcctccagcctgaggacttcgccacctactactgccagcaggcttacaccacacctccaacattcggccagggcaccaaggtggaaatcaagagaacactcgagagccagcctcacaccaagcccagcgtgttcgtgatgaagaacggcaccaacgtggcctgcctcgtgaaagagttctaccccaaggacatcaggatcaacctggtgtccagcaagaagatcaccgagttcgaccccgccatcgtgatctcccccagcggcaagtacaacgccgtgaagctggggaagtacgaggacagcaacagcgtgacctgctccgtgcagcacgacaacaagaccgtgcacagcaccgactttgaagtgaaaaccgactccaccgaccacgtgaagcccaaagagacagagaacaccaagcagcccagcaagagctgccacaagcccaaggccatcgtgcacaccgagaaagtgaacatgatgagcctgaccgtgctgggcctgcggatgctgttcgccaaaaccgtggccgtgaacttcctgctgaccgccaagctgttcttcctcagggccaagcgatctggatctggagcaacaaacttctcactactcaaacaagcaggtgacgtggaggagaatcccgggcctactagtatggactggatttggcgcatccttttccttgtcggcgctgctaccggcgcgcattccttcgaagaagtgcagctggttgaatcaggtggcggcctggttcaacctggcggatctctgagactgagctgtgccgccagcggcttcaacatcaaggacacctacatccactgggtccgacaggcccctggcaaaggacttgaatgggtcgccagaatctaccccaccaacggctacaccagatacgccgactctgtgaagggcagattcaccatcagcgccgacaccagcaagaacaccgcctacctccagatgaactccctgagagccgaggacaccgccgtgtactactgtagcagatggggcggagccggagcctacgctatggatgtttggggccagggaaccctggtcaccgtgtcatctacgcgtgacaagcagctggacgccgacgtgtcccccaagcctaccatcttcctgccctctatcgccgagacaaagctccagaaggccggcacctacctgtgcctgctggaaaagttcttcccagatgtgattaagatccactggcaggaaaagaagtccaacaccatcctgggcagccaggaaggcaacaccatgaagaccaacgacacctacatgaagttcagctggctgaccgtgcccgagaagtccctggacaaagaacacagatgcatcgtgcggcacgaaaacaacaagaacggcgtggaccaggaaatcatcttcccacccatcaagaccgatgtgattacaatggaccccaaggacaactgctccaaggacgccaacgataccctgctgctccagctgaccaacaccagcgcctactacatgtacttgttgctgctgctgaagtccgtggtgtacttcgccatcatcacatgctgcctgctgcggagaaccgccttctgctgcaacggcgagaagtct

SEQ ID NO: 8877 - DNA, 2724 bp, Artificial Sequence
  Synthetic Polynucloetide
atggccttaccagtgaccgccttgctcctgccgctggccttgctgctccacgccgccaggccgctcgaggggaaaccaattcccaaccctcttctgggactggattcaaccggcagcggcgacaagcagctggacgccgacgtgtcccccaagcctaccatcttcctgccctctatcgccgagacaaagctccagaaggccggcacctacctgtgcctgctggaaaagttcttcccagatgtgattaagatccactggcaggaaaagaagtccaacaccatcctgggcagccaggaaggcaacaccatgaagaccaacgacacctacatgaagttcagctggctgaccgtgcccgagaagtccctggacaaagaacacagatgcatcgtgcggcacgaaaacaacaagaacggcgtggaccaggaaatcatcttcccacccatcaagaccgatgtgattacaatggaccccaaggacaactgctccaaggacgccaacgataccctgctgctccagctgaccaacaccagcgcctactacatgtacttgttgctgctgctgaagtccgtggtgtacttcgccatcatcacatgctgcctgctgcggagaaccgccttctgctgcaacggcgagaagtctagggccaagcgatctggatctggagcaacaaacttctcactactcaaacaagcaggtgacgtggaggagaatcccgggcctactagcatggccttaccagtgaccgccttgctcctgccgctggccttgctgctccacgccgccaggccggacatccagatgacacagagccctagcagcctgtctgccagcgtgggagacagagtgaccatcacctgtagagccagccaggacgtgaacacagccgtggcttggtatcagcagaagcctggcaaggcccctaagctgctgatctacagcgccagctttctgtacagcggcgtgcccagcagattcagcggaagcagaagcggcaccgacttcaccctgacaatatccagcctccagcctgaggacttcgccacctactactgccagcaggcttacaccacacctccaacattcggccagggcaccaaggtggaaatcaagagaacaggcggaggcggaagtggaggcggaggatctggcggcggaggctctgaagtgcagctggttgaatcaggtggcggcctggttcaacctggcggatctctgagactgagctgtgccgccagcggcttcaacatcaaggacacctacatccactgggtccgacaggcccctggcaaaggacttgaatgggtcgccagaatctaccccaccaacggctacaccagatacgccgactctgtgaagggcagattcaccatcagcgccgacaccagcaagaacaccgcctacctccagatgaactccctgagagccgaggacaccgccgtgtactactgtagcagatggggcggagccggagcctacgctatggatgtttggggccagggaaccctggtcaccgtgtcatctacgcgtgagcagaaactgatctcggaagaggatgggagcggcagccagcctcacaccaagcccagcgtgttcgtgatgaagaacggcaccaacgtggcctgcctcgtgaaagagttctaccccaaggacatcaggatcaacctggtgtccagcaagaagatcaccgagttcgaccccgccatcgtgatctcccccagcggcaagtacaacgccgtgaagctggggaagtacgaggacagcaacagcgtgacctgctccgtgcagcacgacaacaagaccgtgcacagcaccgactttgaagtgaaaaccgactccaccgaccacgtgaagcccaaagagacagagaacaccaagcagcccagcaagagctgccacaagcccaaggccatcgtgcacaccgagaaagtgaacatgatgagcctgaccgtgctgggcctgcggatgctgttcgccaaaaccgtggccgtgaacttcctgctgaccgccaagctgttcttcctccgcgccaagagaagcggatctggcgtgaagcagaccctgaatttcgacctgctgaagctggctggcgacgtggaatccaacccaggcccttctagaggccatatgaccgagtacaagcccacggtgcgcctcgccacccgcgacgacgtccccagggccgtacgcaccctcgccgccgcgttcgccgactaccccgccacgcgccacaccgtcgatccggaccgccacatcgagcgggtcaccgagctgcaagaactcttcctcacgcgcgtcgggctcgacatcggcaaggtgtgggtcgcggacgacggcgccgcggtggcggtctggaccacgccggagagcgtcgaagcgggggcggtgttcgccgagatcggcccgcgcatggccgagttgagcggttcccggctggccgcgcagcaacagatggaaggcctcctggcgccgcaccggcccaaggagcccgcgtggttcctggccaccgtcggcgtctcgcccgaccaccagggcaagggtctgggcagcgccgtcgtgctccccggagtggaggcggccgagcgcgccggggtgcccgccttcctggagacctccgcgccccgcaacctccccttctacgagcggctcggcttcaccgtcaccgccgacgtcgaggtgcccgaaggaccgcgcacctggtgcatgacccgcaagcccggtgcctga

SEQ ID NO: 8878 - DNA, 3099 bp, Artificial Sequence
  Synthetic Polynucloetide
atggccttaccagtgaccgccttgctcctgccgctggccttgctgctccacgccgccaggccggacatccagatgacacagagccctagcagcctgtctgccagcgtgggagacagagtgaccatcacctgtagagccagccaggacgtgaacacagccgtggcttggtatcagcagaagcctggcaaggcccctaagctgctgatctacagcgccagctttctgtacagcggcgtgcccagcagattcagcggaagcagaagcggcaccgacttcaccctgacaatatccagcctccagcctgaggacttcgccacctactactgccagcaggcttacaccacacctccaacattcggccagggcaccaaggtggaaatcaagagaacaggacagcctaaggccaatcctaccgtgacactgttccctccaagcagcgaagaactccaggccaacaaggccacacttgtgtgcctgatctccgacttctaccctggggctgtgacagtggcttggaaggccgatggatctcctgtgaaagccggcgtggaaaccaccaagccatccaagcagagcaacaacaaatacgccgccagctcctacctgagcctgacacctgagcagtggaagtcccacagatcctacagctgccaagtgacccacgaaggcagcaccgtggaaaagacagtggcccctacagagtgcagcggatcccagagcttcggcctgctggaccccaagctgtgctacctgctggatggcatcctgttcatctacggcgtgatcctgaccgccctgttcctgagagtgaagttcagcagaagcgccgacgcccctgcctaccagcagggacagaaccaactgtacaacgagctgaacctgggcagacgggaagagtacgacgtgctggacaagcggagaggcagggaccctgagatgggcggaaagccccagcggagaaagaacccccaggaaggactgtataacgaactccagaaagacaagatggccgaagcctacagcgagatcggcatgaagggcgagcggagaagaggcaagggccacgatggcctgtaccagggcctgagcaccgccaccaaggacacctatgacgccctgcacatgcaggccctgcctccaagaagggccaagcgatctggatctggagcaacaaacttctcactactcaaacaagcaggtgacgtggaggagaatcccgggcctactagtatggactggatttggcgcatccttttccttgtcggcgctgctaccggcgcgcattccttcgaagaagtgcagctggttgaatcaggtggcggcctggttcaacctggcggatctctgagactgagctgtgccgccagcggcttcaacatcaaggacacctacatccactgggtccgacaggcccctggcaaaggacttgaatgggtcgccagaatctaccccaccaacggctacaccagatacgccgactctgtgaagggcagattcaccatcagcgccgacaccagcaagaacaccgcctacctccagatgaactccctgagagccgaggacaccgccgtgtactactgtagcagatggggcggagccggagcctacgctatggatgtttggggccagggaaccctggtcaccgtgtcatctgcctctacaaagggaccctccgtgtttcctctggctcccagcagcaagtctacaagcggaggaacagccgctctgggctgcctggtcaaggattactttcccgagcctgtgaccgtgtcctggaatagcggagcactgacaagcggcgtgcacacctttccagccgtgctgcaaagcagcggcctgtactctctgagcagcgtggtcacagtgcctagctctagcctgggcacccagacctacatctgcaatgtgaaccacaagcctagcaacaccaaggtggacaagagagtggaacccaagagctgtggtacccagagttttgggttgttggaccctaaattgtgctatctgttggacggaatcctgttcatttacggagtgatcctgaccgcattgttcctgcgggttaagttttccagatccgcagacgcacccgcttaccaacaagggcagaaccaactctacaatgaacttaatttggggcggagggaagagtacgacgttctggacaaaaggaggggacgagatcccgagatgggcggaaagcctcagcgaaggaagaatccgcaagaggggctttataacgaactccagaaagataaaatggcagaagcctatagtgagattgggatgaagggagaaaggaggaggggtaaaggtcacgatgggttgtaccaaggattgagcacagccactaaagatacctatgatgcgctccacatgcaggccctgccgccaagacgcgccaagagaagcggatctggcgtgaagcagaccctgaatttcgacctgctgaagctggctggcgacgtggaatccaacccaggcccttctagaggccatatgaccgagtacaagcccacggtgcgcctcgccacccgcgacgacgtccccagggccgtacgcaccctcgccgccgcgttcgccgactaccccgccacgcgccacaccgtcgatccggaccgccacatcgagcgggtcaccgagctgcaagaactcttcctcacgcgcgtcgggctcgacatcggcaaggtgtgggtcgcggacgacggcgccgcggtggcggtctggaccacgccggagagcgtcgaagcgggggcggtgttcgccgagatcggcccgcgcatggccgagttgagcggttcccggctggccgcgcagcaacagatggaaggcctcctggcgccgcaccggcccaaggagcccgcgtggttcctggccaccgtcggcgtctcgcccgaccaccagggcaagggtctgggcagcgccgtcgtgctccccggagtggaggcggccgagcgcgccggggtgcccgccttcctggagacctccgcgccccgcaacctccccttctacgagcggctcggcttcaccgtcaccgccgacgtcgaggtgcccgaaggaccgcgcacctggtgcatgacccgcaagcccggtgcctga

SEQ ID NO: 8879 - DNA, 2454 bp, Artificial Sequence
  Synthetic Polynucloetide
atggccttaccagtgaccgccttgctcctgccgctggccttgctgctccacgccgccaggccggacatccagatgacacagagccctagcagcctgtctgccagcgtgggagacagagtgaccatcacctgtagagccagccaggacgtgaacacagccgtggcttggtatcagcagaagcctggcaaggcccctaagctgctgatctacagcgccagctttctgtacagcggcgtgcccagcagattcagcggaagcagaagcggcaccgacttcaccctgacaatatccagcctccagcctgaggacttcgccacctactactgccagcaggcttacaccacacctccaacattcggccagggcaccaaggtggaaatcaagagaacactcgaggacctgaagaacgtgttcccacctgaggtggccgtgttcgagcctagcgaggccgagatcagccacacccagaaagccaccctcgtgtgcctggctaccggcttctaccccgaccatgtggaactgtcttggtgggtcaacggcaaagaggtgcacagcggcgtgtctaccgacccccagccactgaaagaacagcccgccctgaacgacagccggtactgcctgagcagcagactgagagtgtccgccaccttctggcagaacccccggaaccacttcagatgccaggtgcagttctacggcctgagcgagaacgacgagtggacccaggacagagccaagcccgtgacccagatcgtgtctgccgaagcctggggcagagccgattgcggatcccagagcttcggcctgctggaccccaagctgtgctacctgctggatggcatcctgttcatctacggcgtgatcctgaccgccctgttcctgagagtgaagttcagcagaagcgccgacgcccctgcctaccagcagggacagaaccaactgtacaacgagctgaacctgggcagacgggaagagtacgacgtgctggacaagcggagaggcagggaccctgagatgggcggaaagccccagcggagaaagaacccccaggaaggactgtataacgaactccagaaagacaagatggccgaagcctacagcgagatcggcatgaagggcgagcggagaagaggcaagggccacgatggcctgtaccagggcctgagcaccgccaccaaggacacctatgacgccctgcacatgcaggccctgcctccaagaagggccaagcgatctggatctggagcaacaaacttctcactactcaaacaagcaggtgacgtggaggagaatcccgggcctactagtatggactggatttggcgcatccttttccttgtcggcgctgctaccggcgcgcattccttcgaagaagtgcagctggttgaatcaggtggcggcctggttcaacctggcggatctctgagactgagctgtgccgccagcggcttcaacatcaaggacacctacatccactgggtccgacaggcccctggcaaaggacttgaatgggtcgccagaatctaccccaccaacggctacaccagatacgccgactctgtgaagggcagattcaccatcagcgccgacaccagcaagaacaccgcctacctccagatgaactccctgagagccgaggacaccgccgtgtactactgtagcagatggggcggagccggagcctacgctatggatgtttggggccagggaaccctggtcaccgtgtcatctacgcgtatccagaaccctgatcctgccgtgtaccagctgcgggatagcaagagcagcgacaagagcgtgtgtctgttcaccgacttcgacagccagaccaacgtgtcccagagcaaggactccgacgtgtacatcaccgataagaccgtgctggacatgcggagcatggacttcaagagcaactccgccgtggcctggtccaacaagtccgatttcgcctgcgccaacgccttcaacaacagcattatccccgaggacacattcttcccaagccccgagagcagctgcggtacccagagttttgggttgttggaccctaaattgtgctatctgttggacggaatcctgttcatttacggagtgatcctgaccgcattgttcctgcgggttaagttttccagatccgcagacgcacccgcttaccaacaagggcagaaccaactctacaatgaacttaatttggggcggagggaagagtacgacgttctggacaaaaggaggggacgagatcccgagatgggcggaaagcctcagcgaaggaagaatccgcaagaggggctttataacgaactccagaaagataaaatggcagaagcctatagtgagattgggatgaagggagaaaggaggaggggtaaaggtcacgatgggttgtaccaaggattgagcacagccactaaagatacctatgatgcgctccacatgcaggccctgccgccaaga

SEQ ID NO: 8880 - DNA, 2454 bp, Artificial Sequence
  Synthetic Polynucloetide
atggccttaccagtgaccgccttgctcctgccgctggccttgctgctccacgccgccaggccggacatccagatgacacagagccctagcagcctgtctgccagcgtgggagacagagtgaccatcacctgtagagccagccaggacgtgaacacagccgtggcttggtatcagcagaagcctggcaaggcccctaagctgctgatctacagcgccagctttctgtacagcggcgtgcccagcagattcagcggaagcagaagcggcaccgacttcaccctgacaatatccagcctccagcctgaggacttcgccacctactactgccagcaggcttacaccacacctccaacattcggccagggcaccaaggtggaaatcaagagaacactcgaggacctgaagaacgtgttcccacctgaggtggccgtgttcgagcctagcaaggccgagatcgcccacacccagaaagccaccctcgtgtgcctggctaccggcttctaccccgaccatgtggaactgtcttggtgggtcaacggcaaagaggtgcacagcggcgtgtgtaccgacccccagccactgaaagaacagcccgccctgaacgacagccggtactgcctgagcagcagactgagagtgtccgccaccttctggcagaacccccggaaccacttcagatgccaggtgcagttctacggcctgagcgagaacgacgagtggacccaggacagagccaagcccgtgacccagatcgtgtctgccgaagcctggggcagagccgattgcggatcccagagcttcggcctgctggaccccaagctgtgctacctgctggatggcatcctgttcatctacggcgtgatcctgaccgccctgttcctgagagtgaagttcagcagaagcgccgacgcccctgcctaccagcagggacagaaccaactgtacaacgagctgaacctgggcagacgggaagagtacgacgtgctggacaagcggagaggcagggaccctgagatgggcggaaagccccagcggagaaagaacccccaggaaggactgtataacgaactccagaaagacaagatggccgaagcctacagcgagatcggcatgaagggcgagcggagaagaggcaagggccacgatggcctgtaccagggcctgagcaccgccaccaaggacacctatgacgccctgcacatgcaggccctgcctccaagaagggccaagcgatctggatctggagcaacaaacttctcactactcaaacaagcaggtgacgtggaggagaatcccgggcctactagtatggactggatttggcgcatccttttccttgtcggcgctgctaccggcgcgcattccttcgaagaagtgcagctggttgaatcaggtggcggcctggttcaacctggcggatctctgagactgagctgtgccgccagcggcttcaacatcaaggacacctacatccactgggtccgacaggcccctggcaaaggacttgaatgggtcgccagaatctaccccaccaacggctacaccagatacgccgactctgtgaagggcagattcaccatcagcgccgacaccagcaagaacaccgcctacctccagatgaactccctgagagccgaggacaccgccgtgtactactgtagcagatggggcggagccggagcctacgctatggatgtttggggccagggaaccctggtcaccgtgtcatctacgcgtatccagaaccctgatcctgccgtgtaccagctgcgggatagcaagagcagcgacaagagcgtgtgtctgttcaccgacttcgacagccagaccaacgtgtcccagagcaaggactccgacgtgtacatcaccgataagtgcgtgctggacatgcggagcatggacttcaagagcaactccgccgtggcctggtccaacaagtccgatttcgcctgcgccaacgccttcaacaacagcattatccccgaggacacattcttcccaagcagcgacgtgccctgcggtacccagagttttgggttgttggaccctaaattgtgctatctgttggacggaatcctgttcatttacggagtgatcctgaccgcattgttcctgcgggttaagttttccagatccgcagacgcacccgcttaccaacaagggcagaaccaactctacaatgaacttaatttggggcggagggaagagtacgacgttctggacaaaaggaggggacgagatcccgagatgggcggaaagcctcagcgaaggaagaatccgcaagaggggctttataacgaactccagaaagataaaatggcagaagcctatagtgagattgggatgaagggagaaaggaggaggggtaaaggtcacgatgggttgtaccaaggattgagcacagccactaaagatacctatgatgcgctccacatgcaggccctgccgccaaga

SEQ ID NO: 8881 - DNA, 2667 bp, Artificial Sequence
  Synthetic Polynucloetide
atggccttaccagtgaccgccttgctcctgccgctggccttgctgctccacgccgccaggccggacatccagatgacacagagccctagcagcctgtctgccagcgtgggagacagagtgaccatcacctgtagagccagccaggacgtgaacacagccgtggcttggtatcagcagaagcctggcaaggcccctaagctgctgatctacagcgccagctttctgtacagcggcgtgcccagcagattcagcggaagcagaagcggcaccgacttcaccctgacaatatccagcctccagcctgaggacttcgccacctactactgccagcaggcttacaccacacctccaacattcggccagggcaccaaggtggaaatcaagagaacactcgaggggaaaccaattcccaaccctcttctgggactggattcaaccggcagcggcgaggacctgaagaacgtgttcccacctgaggtggccgtgttcgagcctagcgaggccgagatcagccacacccagaaagccaccctcgtgtgcctggctaccggcttctaccccgaccatgtggaactgtcttggtgggtcaacggcaaagaggtgcacagcggcgtgtctaccgacccccagccactgaaagaacagcccgccctgaacgacagccggtactgcctgagcagcagactgagagtgtccgccaccttctggcagaacccccggaaccacttcagatgccaggtgcagttctacggcctgagcgagaacgacgagtggacccaggacagagccaagcccgtgacccagatcgtgtctgccgaagcctggggcagagccgattgcggatcccagagcttcggcctgctggaccccaagctgtgctacctgctggatggcatcctgttcatctacggcgtgatcctgaccgccctgttcctgagagtgaagttcagcagaagcgccgacgcccctgcctaccagcagggacagaaccaactgtacaacgagctgaacctgggcagacgggaagagtacgacgtgctggacaagcggagaggcagggaccctgagatgggcggaaagccccagcggagaaagaacccccaggaaggactgtataacgaactccagaaagacaagatggccgaagcctacagcgagatcggcatgaagggcgagcggagaagaggcaagggccacgatggcctgtaccagggcctgagcaccgccaccaaggacacctatgacgccctgcacatgcaggccctgcctccaagaagggccaagcgatctggatctggagcaacaaacttctcactactcaaacaagcaggtgacgtggaggagaatcccgggcctactagtatggactggatttggcgcatccttttccttgtcggcgctgctaccggcgcgcattccttcgaagaagtgcagctggttgaatcaggtggcggcctggttcaacctggcggatctctgagactgagctgtgccgccagcggcttcaacatcaaggacacctacatccactgggtccgacaggcccctggcaaaggacttgaatgggtcgccagaatctaccccaccaacggctacaccagatacgccgactctgtgaagggcagattcaccatcagcgccgacaccagcaagaacaccgcctacctccagatgaactccctgagagccgaggacaccgccgtgtactactgtagcagatggggcggagccggagcctacgctatggatgtttggggccagggaaccctggtcaccgtgtcatctacgcgtgagcagaaactgatctcggaagaggatgggagcggcatccagaaccctgatcctgccgtgtaccagctgcgggatagcaagagcagcgacaagagcgtgtgtctgttcaccgacttcgacagccagaccaacgtgtcccagagcaaggactccgacgtgtacatcaccgataagaccgtgctggacatgcggagcatggacttcaagagcaactccgccgtggcctggtccaacaagtccgatttcgcctgcgccaacgccttcaacaacagcattatccccgaggacacattcttcccaagccccgagagcagctgcggtacccagagttttgggttgttggaccctaaattgtgctatctgttggacggaatcctgttcatttacggagtgatcctgaccgcattgttcctgaggagcaagcggtcacggctgctccacagcgattacatgaatatgacaccacgaagaccgggtcctactcgcaaacactaccaaccctacgcacctccccgcgactttgcagcgtaccgatctcgggttaagttttccagatccgcagacgcacccgcttaccaacaagggcagaaccaactctacaatgaacttaatttggggcggagggaagagtacgacgttctggacaaaaggaggggacgagatcccgagatgggcggaaagcctcagcgaaggaagaatccgcaagaggggctttataacgaactccagaaagataaaatggcagaagcctatagtgagattgggatgaagggagaaaggaggaggggtaaaggtcacgatgggttgtaccaaggattgagcacagccactaaagatacctatgatgcgctccacatgcaggccctgccgccaaga

SEQ ID NO: 8882 - DNA, 2790 bp, Artificial Sequence
  Synthetic Polynucloetide
atggccttaccagtgaccgccttgctcctgccgctggccttgctgctccacgccgccaggccggacatccagatgacacagagccctagcagcctgtctgccagcgtgggagacagagtgaccatcacctgtagagccagccaggacgtgaacacagccgtggcttggtatcagcagaagcctggcaaggcccctaagctgctgatctacagcgccagctttctgtacagcggcgtgcccagcagattcagcggaagcagaagcggcaccgacttcaccctgacaatatccagcctccagcctgaggacttcgccacctactactgccagcaggcttacaccacacctccaacattcggccagggcaccaaggtggaaatcaagagaacactcgaggggaaaccaattcccaaccctcttctgggactggattcaaccggcagcggcgaggacctgaagaacgtgttcccacctgaggtggccgtgttcgagcctagcgaggccgagatcagccacacccagaaagccaccctcgtgtgcctggctaccggcttctaccccgaccatgtggaactgtcttggtgggtcaacggcaaagaggtgcacagcggcgtgtctaccgacccccagccactgaaagaacagcccgccctgaacgacagccggtactgcctgagcagcagactgagagtgtccgccaccttctggcagaacccccggaaccacttcagatgccaggtgcagttctacggcctgagcgagaacgacgagtggacccaggacagagccaagcccgtgacccagatcgtgtctgccgaagcctggggcagagccgattgcggatcccagagcttcggcctgctggaccccaagctgtgctacctgctggatggcatcctgttcatctacggcgtgatcctgaccgccctgttcctgaggagtaagaggagcaggctcctgcacagtgactacatgaacatgactccacgccgccccggacccacccgcaagcattaccagccctatgccccaccacgcgacttcgcagcctatcgctccagagtgaagttcagcagaagcgccgacgcccctgcctaccagcagggacagaaccaactgtacaacgagctgaacctgggcagacgggaagagtacgacgtgctggacaagcggagaggcagggaccctgagatgggcggaaagccccagcggagaaagaacccccaggaaggactgtataacgaactccagaaagacaagatggccgaagcctacagcgagatcggcatgaagggcgagcggagaagaggcaagggccacgatggcctgtaccagggcctgagcaccgccaccaaggacacctatgacgccctgcacatgcaggccctgcctccaagaagggccaagcgatctggatctggagcaacaaacttctcactactcaaacaagcaggtgacgtggaggagaatcccgggcctactagtatggactggatttggcgcatccttttccttgtcggcgctgctaccggcgcgcattccttcgaagaagtgcagctggttgaatcaggtggcggcctggttcaacctggcggatctctgagactgagctgtgccgccagcggcttcaacatcaaggacacctacatccactgggtccgacaggcccctggcaaaggacttgaatgggtcgccagaatctaccccaccaacggctacaccagatacgccgactctgtgaagggcagattcaccatcagcgccgacaccagcaagaacaccgcctacctccagatgaactccctgagagccgaggacaccgccgtgtactactgtagcagatggggcggagccggagcctacgctatggatgtttggggccagggaaccctggtcaccgtgtcatctacgcgtgagcagaaactgatctcggaagaggatgggagcggcatccagaaccctgatcctgccgtgtaccagctgcgggatagcaagagcagcgacaagagcgtgtgtctgttcaccgacttcgacagccagaccaacgtgtcccagagcaaggactccgacgtgtacatcaccgataagaccgtgctggacatgcggagcatggacttcaagagcaactccgccgtggcctggtccaacaagtccgatttcgcctgcgccaacgccttcaacaacagcattatccccgaggacacattcttcccaagccccgagagcagctgcggtacccagagttttgggttgttggaccctaaattgtgctatctgttggacggaatcctgttcatttacggagtgatcctgaccgcattgttcctgaggagcaagcggtcacggctgctccacagcgattacatgaatatgacaccacgaagaccgggtcctactcgcaaacactaccaaccctacgcacctccccgcgactttgcagcgtaccgatctcgggttaagttttccagatccgcagacgcacccgcttaccaacaagggcagaaccaactctacaatgaacttaatttggggcggagggaagagtacgacgttctggacaaaaggaggggacgagatcccgagatgggcggaaagcctcagcgaaggaagaatccgcaagaggggctttataacgaactccagaaagataaaatggcagaagcctatagtgagattgggatgaagggagaaaggaggaggggtaaaggtcacgatgggttgtaccaaggattgagcacagccactaaagatacctatgatgcgctccacatgcaggccctgccgccaaga

SEQ ID NO: 8883 - DNA, 2673 bp, Artificial Sequence
  Synthetic Polynucloetide
atggccttaccagtgaccgccttgctcctgccgctggccttgctgctccacgccgccaggccggacatccagatgacacagagccctagcagcctgtctgccagcgtgggagacagagtgaccatcacctgtagagccagccaggacgtgaacacagccgtggcttggtatcagcagaagcctggcaaggcccctaagctgctgatctacagcgccagctttctgtacagcggcgtgcccagcagattcagcggaagcagaagcggcaccgacttcaccctgacaatatccagcctccagcctgaggacttcgccacctactactgccagcaggcttacaccacacctccaacattcggccagggcaccaaggtggaaatcaagagaacactcgaggggaaaccaattcccaaccctcttctgggactggattcaaccggcagcggcgaggacctgaagaacgtgttcccacctgaggtggccgtgttcgagcctagcgaggccgagatcagccacacccagaaagccaccctcgtgtgcctggctaccggcttctaccccgaccatgtggaactgtcttggtgggtcaacggcaaagaggtgcacagcggcgtgtctaccgacccccagccactgaaagaacagcccgccctgaacgacagccggtactgcctgagcagcagactgagagtgtccgccaccttctggcagaacccccggaaccacttcagatgccaggtgcagttctacggcctgagcgagaacgacgagtggacccaggacagagccaagcccgtgacccagatcgtgtctgccgaagcctggggcagagccgattgcggatcccagagcttcggcctgctggaccccaagctgtgctacctgctggatggcatcctgttcatctacggcgtgatcctgaccgccctgttcctgagagtgaagttcagcagaagcgccgacgcccctgcctaccagcagggacagaaccaactgtacaacgagctgaacctgggcagacgggaagagtacgacgtgctggacaagcggagaggcagggaccctgagatgggcggaaagccccagcggagaaagaacccccaggaaggactgtataacgaactccagaaagacaagatggccgaagcctacagcgagatcggcatgaagggcgagcggagaagaggcaagggccacgatggcctgtaccagggcctgagcaccgccaccaaggacacctatgacgccctgcacatgcaggccctgcctccaagaagggccaagcgatctggatctggagcaacaaacttctcactactcaaacaagcaggtgacgtggaggagaatcccgggcctactagtatggactggatttggcgcatccttttccttgtcggcgctgctaccggcgcgcattccttcgaagaagtgcagctggttgaatcaggtggcggcctggttcaacctggcggatctctgagactgagctgtgccgccagcggcttcaacatcaaggacacctacatccactgggtccgacaggcccctggcaaaggacttgaatgggtcgccagaatctaccccaccaacggctacaccagatacgccgactctgtgaagggcagattcaccatcagcgccgacaccagcaagaacaccgcctacctccagatgaactccctgagagccgaggacaccgccgtgtactactgtagcagatggggcggagccggagcctacgctatggatgtttggggccagggaaccctggtcaccgtgtcatctacgcgtgagcagaaactgatctcggaagaggatctggggagcggcatccagaaccctgatcctgccgtgtaccagctgcgggatagcaagagcagcgacaagagcgtgtgtctgttcaccgacttcgacagccagaccaacgtgtcccagagcaaggactccgacgtgtacatcaccgataagaccgtgctggacatgcggagcatggacttcaagagcaactccgccgtggcctggtccaacaagtccgatttcgcctgcgccaacgccttcaacaacagcattatccccgaggacacattcttcccaagccccgagagcagctgcggtacccagagttttgggttgttggaccctaaattgtgctatctgttggacggaatcctgttcatttacggagtgatcctgaccgcattgttcctgaagagaggccggaagaagctgctgtacatcttcaagcagcctttcatgcggcccgtgcagaccacccaggaagaggacggctgctcctgccggttccccgaggaagaagaaggcggctgcgagctgcgggttaagttttccagatccgcagacgcacccgcttaccaacaagggcagaaccaactctacaatgaacttaatttggggcggagggaagagtacgacgttctggacaaaaggaggggacgagatcccgagatgggcggaaagcctcagcgaaggaagaatccgcaagaggggctttataacgaactccagaaagataaaatggcagaagcctatagtgagattgggatgaagggagaaaggaggaggggtaaaggtcacgatgggttgtaccaaggattgagcacagccactaaagatacctatgatgcgctccacatgcaggccctgccgccaaga

SEQ ID NO: 8884 - DNA, 2799 bp, Artificial Sequence
  Synthetic Polynucloetide
atggccttaccagtgaccgccttgctcctgccgctggccttgctgctccacgccgccaggccggacatccagatgacacagagccctagcagcctgtctgccagcgtgggagacagagtgaccatcacctgtagagccagccaggacgtgaacacagccgtggcttggtatcagcagaagcctggcaaggcccctaagctgctgatctacagcgccagctttctgtacagcggcgtgcccagcagattcagcggaagcagaagcggcaccgacttcaccctgacaatatccagcctccagcctgaggacttcgccacctactactgccagcaggcttacaccacacctccaacattcggccagggcaccaaggtggaaatcaagagaacactcgaggggaaaccaattcccaaccctcttctgggactggattcaaccggcagcggcgaggacctgaagaacgtgttcccacctgaggtggccgtgttcgagcctagcgaggccgagatcagccacacccagaaagccaccctcgtgtgcctggctaccggcttctaccccgaccatgtggaactgtcttggtgggtcaacggcaaagaggtgcacagcggcgtgtctaccgacccccagccactgaaagaacagcccgccctgaacgacagccggtactgcctgagcagcagactgagagtgtccgccaccttctggcagaacccccggaaccacttcagatgccaggtgcagttctacggcctgagcgagaacgacgagtggacccaggacagagccaagcccgtgacccagatcgtgtctgccgaagcctggggcagagccgattgcggatcccagagcttcggcctgctggaccccaagctgtgctacctgctggatggcatcctgttcatctacggcgtgatcctgaccgccctgttcctgaaacggggcagaaagaaactcctgtatatattcaaacaaccatttatgagaccagtacaaactactcaagaggaagatggctgtagctgccgatttccagaagaagaagaaggaggatgtgaactgagagtgaagttcagcagaagcgccgacgcccctgcctaccagcagggacagaaccaactgtacaacgagctgaacctgggcagacgggaagagtacgacgtgctggacaagcggagaggcagggaccctgagatgggcggaaagccccagcggagaaagaacccccaggaaggactgtataacgaactccagaaagacaagatggccgaagcctacagcgagatcggcatgaagggcgagcggagaagaggcaagggccacgatggcctgtaccagggcctgagcaccgccaccaaggacacctatgacgccctgcacatgcaggccctgcctccaagaagggccaagcgatctggatctggagcaacaaacttctcactactcaaacaagcaggtgacgtggaggagaatcccgggcctactagtatggactggatttggcgcatccttttccttgtcggcgctgctaccggcgcgcattccttcgaagaagtgcagctggttgaatcaggtggcggcctggttcaacctggcggatctctgagactgagctgtgccgccagcggcttcaacatcaaggacacctacatccactgggtccgacaggcccctggcaaaggacttgaatgggtcgccagaatctaccccaccaacggctacaccagatacgccgactctgtgaagggcagattcaccatcagcgccgacaccagcaagaacaccgcctacctccagatgaactccctgagagccgaggacaccgccgtgtactactgtagcagatggggcggagccggagcctacgctatggatgtttggggccagggaaccctggtcaccgtgtcatctacgcgtgagcagaaactgatctcggaagaggatctggggagcggcatccagaaccctgatcctgccgtgtaccagctgcgggatagcaagagcagcgacaagagcgtgtgtctgttcaccgacttcgacagccagaccaacgtgtcccagagcaaggactccgacgtgtacatcaccgataagaccgtgctggacatgcggagcatggacttcaagagcaactccgccgtggcctggtccaacaagtccgatttcgcctgcgccaacgccttcaacaacagcattatccccgaggacacattcttcccaagccccgagagcagctgcggtacccagagttttgggttgttggaccctaaattgtgctatctgttggacggaatcctgttcatttacggagtgatcctgaccgcattgttcctgaagagaggccggaagaagctgctgtacatcttcaagcagcctttcatgcggcccgtgcagaccacccaggaagaggacggctgctcctgccggttccccgaggaagaagaaggcggctgcgagctgcgggttaagttttccagatccgcagacgcacccgcttaccaacaagggcagaaccaactctacaatgaacttaatttggggcggagggaagagtacgacgttctggacaaaaggaggggacgagatcccgagatgggcggaaagcctcagcgaaggaagaatccgcaagaggggctttataacgaactccagaaagataaaatggcagaagcctatagtgagattgggatgaagggagaaaggaggaggggtaaaggtcacgatgggttgtaccaaggattgagcacagccactaaagatacctatgatgcgctccacatgcaggccctgccgccaaga

SEQ ID NO: 8885 - DNA, 2472 bp, Artificial Sequence
  Synthetic Polynucloetide
atggccttaccagtgaccgccttgctcctgccgctggccttgctgctccacgccgccaggccggacatccagatgacacagagccctagcagcctgtctgccagcgtgggagacagagtgaccatcacctgtagagccagccaggacgtgaacacagccgtggcttggtatcagcagaagcctggcaaggcccctaagctgctgatctacagcgccagctttctgtacagcggcgtgcccagcagattcagcggaagcagaagcggcaccgacttcaccctgacaatatccagcctccagcctgaggacttcgccacctactactgccagcaggcttacaccacacctccaacattcggccagggcaccaaggtggaaatcaagagaacactcgagcagagcttcggcctgctggaccccaagctgtgctacctgctggatggcatcctgttcatctacggcgtgatcctgaccgccctgttcctgagagtgaagttcagcagaagcgccgacgcccctgcctaccagcagggacagaaccaactgtacaacgagctgaacctgggcagacgggaagagtacgacgtgctggacaagcggagaggcagggaccctgagatgggcggaaagccccagcggagaaagaacccccaggaaggactgtataacgaactccagaaagacaagatggccgaagcctacagcgagatcggcatgaagggcgagcggagaagaggcaagggccacgatggcctgtaccagggcctgagcaccgccaccaaggacacctatgacgccctgcacatgcaggccctgcctccaagaagggccaagcgatctggatctggagcaacaaacttctcactactcaaacaagcaggtgacgtggaggagaatcccgggcctactagtatggactggatttggcgcatccttttccttgtcggcgctgctaccggcgcgcattccttcgaagaagtgcagctggttgaatcaggtggcggcctggttcaacctggcggatctctgagactgagctgtgccgccagcggcttcaacatcaaggacacctacatccactgggtccgacaggcccctggcaaaggacttgaatgggtcgccagaatctaccccaccaacggctacaccagatacgccgactctgtgaagggcagattcaccatcagcgccgacaccagcaagaacaccgcctacctccagatgaactccctgagagccgaggacaccgccgtgtactactgtagcagatggggcggagccggagcctacgctatggatgtttggggccagggaaccctggtcaccgtgtcatctacgcgtcagagttttgggttgttggaccctaaattgtgctatctgttggacggaatcctgttcatttacggagtgatcctgaccgcattgttcctgcgggttaagttttccagatccgcagacgcacccgcttaccaacaagggcagaaccaactctacaatgaacttaatttggggcggagggaagagtacgacgttctggacaaaaggaggggacgagatcccgagatgggcggaaagcctcagcgaaggaagaatccgcaagaggggctttataacgaactccagaaagataaaatggcagaagcctatagtgagattgggatgaagggagaaaggaggaggggtaaaggtcacgatgggttgtaccaaggattgagcacagccactaaagatacctatgatgcgctccacatgcaggccctgccgccaagacgcgccaagagaagcggatctggcgtgaagcagaccctgaatttcgacctgctgaagctggctggcgacgtggaatccaacccaggcccttctagaggccatatgaccgagtacaagcccacggtgcgcctcgccacccgcgacgacgtccccagggccgtacgcaccctcgccgccgcgttcgccgactaccccgccacgcgccacaccgtcgatccggaccgccacatcgagcgggtcaccgagctgcaagaactcttcctcacgcgcgtcgggctcgacatcggcaaggtgtgggtcgcggacgacggcgccgcggtggcggtctggaccacgccggagagcgtcgaagcgggggcggtgttcgccgagatcggcccgcgcatggccgagttgagcggttcccggctggccgcgcagcaacagatggaaggcctcctggcgccgcaccggcccaaggagcccgcgtggttcctggccaccgtcggcgtctcgcccgaccaccagggcaagggtctgggcagcgccgtcgtgctccccggagtggaggcggccgagcgcgccggggtgcccgccttcctggagacctccgcgccccgcaacctccccttctacgagcggctcggcttcaccgtcaccgccgacgtcgaggtgcccgaaggaccgcgcacctggtgcatgacccgcaagcccggtgcctga

SEQ ID NO: 8886 - DNA, 1944 bp, Artificial Sequence
  Synthetic Polynucloetide
atggccttaccagtgaccgccttgctcctgccgctggccttgctgctccacgccgccaggccggacatccagatgacacagagccctagcagcctgtctgccagcgtgggagacagagtgaccatcacctgtagagccagccaggacgtgaacacagccgtggcttggtatcagcagaagcctggcaaggcccctaagctgctgatctacagcgccagctttctgtacagcggcgtgcccagcagattcagcggaagcagaagcggcaccgacttcaccctgacaatatccagcctccagcctgaggacttcgccacctactactgccagcaggcttacaccacacctccaacattcggccagggcaccaaggtggaaatcaagagaacactcgagggacagcctaaggccaatcctaccgtgacactgttccctccaagcagcgaagaactccaggccaacaaggccacacttgtgtgcctgatctccgacttctaccctggggctgtgacagtggcttggaaggccgatggatctcctgtgaaagccggcgtggaaaccaccaagccatccaagcagagcaacaacaaatacgccgccagctcctacctgagcctgacacctgagcagtggaagtcccacagatcctacagctgccaagtgacccacgaaggcagcaccgtggaaaagacagtggcccctacagagtgcagccccatcaagaccgatgtgattacaatggaccccaaggacaactgctccaaggacgccaacgataccctgctgctccagctgaccaacaccagcgcctactacatgtacttgttgctgctgctgaagtccgtggtgtacttcgccatcatcacatgctgcctgctgcggagaaccgccttctgctgcaacggcgagaagtctagggccaagcgatctggatctggagcaacaaacttctcactactcaaacaagcaggtgacgtggaggagaatcccgggcctactagtatggactggatttggcgcatccttttccttgtcggcgctgctaccggcgcgcattccttcgaagaagtgcagctggttgaatcaggtggcggcctggttcaacctggcggatctctgagactgagctgtgccgccagcggcttcaacatcaaggacacctacatccactgggtccgacaggcccctggcaaaggacttgaatgggtcgccagaatctaccccaccaacggctacaccagatacgccgactctgtgaagggcagattcaccatcagcgccgacaccagcaagaacaccgcctacctccagatgaactccctgagagccgaggacaccgccgtgtactactgtagcagatggggcggagccggagcctacgctatggatgtttggggccagggaaccctggtcaccgtgtcatctacgcgtgcctctacaaagggaccctccgtgtttcctctggctcccagcagcaagtctacaagcggaggaacagccgctctgggctgcctggtcaaggattactttcccgagcctgtgaccgtgtcctggaatagcggagcactgacaagcggcgtgcacacctttccagccgtgctgcaaagcagcggcctgtactctctgagcagcgtggtcacagtgcctagctctagcctgggcacccagacctacatctgcaatgtgaaccacaagcctagcaacaccaaggtggacaagagagtggaacccaagagctgtgaagtgaaaaccgactccaccgaccacgtgaagcccaaagagacagagaacaccaagcagcccagcaagagctgccacaagcccaaggccatcgtgcacaccgagaaagtgaacatgatgagcctgaccgtgctgggcctgcggatgctgttcgccaaaaccgtggccgtgaacttcctgctgaccgccaagctgttcttcctc

SEQ ID NO: 8887 - DNA, 1878 bp, Artificial Sequence
  Synthetic Polynucloetide
atggccttaccagtgaccgccttgctcctgccgctggccttgctgctccacgccgccaggccggacatccagatgacacagagccctagcagcctgtctgccagcgtgggagacagagtgaccatcacctgtagagccagccaggacgtgaacacagccgtggcttggtatcagcagaagcctggcaaggcccctaagctgctgatctacagcgccagctttctgtacagcggcgtgcccagcagattcagcggaagcagaagcggcaccgacttcaccctgacaatatccagcctccagcctgaggacttcgccacctactactgccagcaggcttacaccacacctccaacattcggccagggcaccaaggtggaaatcaagagaacactcgagggacagcctaaggccaatcctaccgtgacactgttccctccaagcagcgaagaactccaggccaacaaggccacacttgtgtgcctgatctccgacttctaccctggggctgtgacagtggcttggaaggccgatggatctcctgtgaaagccggcgtggaaaccaccaagccatccaagcagagcaacaacaaatacgccgccagctcctacctgagcctgacacctgagcagtggaagtcccacagatcctacagctgccaagtgacccacgaaggcagcaccgtggaaaagacagtggcccctacagagtgcagcggcagagccgattgcggcatcaccagcgccagctaccaccagggcgtgctgagcgccaccatcctgtacgagatcctgctgggcaaggccaccctgtacgccgtgctggtgtctgccctggtgctgatggctatggtcaagcggaaggacagccggggaagggccaagcgatctggatctggagcaacaaacttctcactactcaaacaagcaggtgacgtggaggagaatcccgggcctactagtatggactggatttggcgcatccttttccttgtcggcgctgctaccggcgcgcattccttcgaagaagtgcagctggttgaatcaggtggcggcctggttcaacctggcggatctctgagactgagctgtgccgccagcggcttcaacatcaaggacacctacatccactgggtccgacaggcccctggcaaaggacttgaatgggtcgccagaatctaccccaccaacggctacaccagatacgccgactctgtgaagggcagattcaccatcagcgccgacaccagcaagaacaccgcctacctccagatgaactccctgagagccgaggacaccgccgtgtactactgtagcagatggggcggagccggagcctacgctatggatgtttggggccagggaaccctggtcaccgtgtcatctacgcgtgcctctacaaagggaccctccgtgtttcctctggctcccagcagcaagtctacaagcggaggaacagccgctctgggctgcctggtcaaggattactttcccgagcctgtgaccgtgtcctggaatagcggagcactgacaagcggcgtgcacacctttccagccgtgctgcaaagcagcggcctgtactctctgagcagcgtggtcacagtgcctagctctagcctgggcacccagacctacatctgcaatgtgaaccacaagcctagcaacaccaaggtggacaagagagtggaacccaagagctgtatccccgaggacacattcttcccaagcagcgacgtgccctgcgacgtgaagctggtggaaaagagcttcgagacagacaccaacctgaacttccagaacctgagcgtgatcggcttcagaatcctgctgctgaaagtggccggctttaacctgctgatgaccctgcggctgtggtccagc

SEQ ID NO: 8888 - DNA, 1878 bp, Artificial Sequence
  Synthetic Polynucloetide
atggccttaccagtgaccgccttgctcctgccgctggccttgctgctccacgccgccaggccggacatccagatgacacagagccctagcagcctgtctgccagcgtgggagacagagtgaccatcacctgtagagccagccaggacgtgaacacagccgtggcttggtatcagcagaagcctggcaaggcccctaagctgctgatctacagcgccagctttctgtacagcggcgtgcccagcagattcagcggaagcagaagcggcaccgacttcaccctgacaatatccagcctccagcctgaggacttcgccacctactactgccagcaggcttacaccacacctccaacattcggccagggcaccaaggtggaaatcaagagaacactcgagggacagcctaaggccaatcctaccgtgacactgttccctccaagcagcgaagaactccaggccaacaaggccacacttgtgtgcctgatctccgacttctaccctggggctgtgacagtggcttggaaggccgatggatctcctgtgaaagccggcgtggaaaccaccaagccatccaagcagagcaacaacaaatacgccgccagctcctacctgagcctgacacctgagcagtggaagtcccacagatcctacagctgccaagtgacccacgaaggcagcaccgtggaaaagacagtggcccctacagagtgcagcggcagagccgattgcggctttaccagcgagagctaccagcagggcgtgctgagcgccaccatcctgtacgagatcctgctgggcaaggccaccctgtacgccgtgctggtgtctgccctggtgctgatggctatggtcaagcggaaggacagccggggaagggccaagcgatctggatctggagcaacaaacttctcactactcaaacaagcaggtgacgtggaggagaatcccgggcctactagtatggactggatttggcgcatccttttccttgtcggcgctgctaccggcgcgcattccttcgaagaagtgcagctggttgaatcaggtggcggcctggttcaacctggcggatctctgagactgagctgtgccgccagcggcttcaacatcaaggacacctacatccactgggtccgacaggcccctggcaaaggacttgaatgggtcgccagaatctaccccaccaacggctacaccagatacgccgactctgtgaagggcagattcaccatcagcgccgacaccagcaagaacaccgcctacctccagatgaactccctgagagccgaggacaccgccgtgtactactgtagcagatggggcggagccggagcctacgctatggatgtttggggccagggaaccctggtcaccgtgtcatctacgcgtgcctctacaaagggaccctccgtgtttcctctggctcccagcagcaagtctacaagcggaggaacagccgctctgggctgcctggtcaaggattactttcccgagcctgtgaccgtgtcctggaatagcggagcactgacaagcggcgtgcacacctttccagccgtgctgcaaagcagcggcctgtactctctgagcagcgtggtcacagtgcctagctctagcctgggcacccagacctacatctgcaatgtgaaccacaagcctagcaacaccaaggtggacaagagagtggaacccaagagctgtatccccgaggacacattcttcccaagccccgagagcagctgcgacgtgaagctggtggaaaagagcttcgagacagacaccaacctgaacttccagaacctgagcgtgatcggcttcagaatcctgctgctgaaagtggccggctttaacctgctgatgaccctgcggctgtggtccagc

SEQ ID NO: 8889 - DNA, 1356 bp, Artificial Sequence
  Synthetic Polynucloetide
atggccttaccagtgaccgccttgctcctgccgctggccttgctgctccacgccgccaggccggacatccagatgacacagagccctagcagcctgtctgccagcgtgggagacagagtgaccatcacctgtagagccagccaggacgtgaacacagccgtggcttggtatcagcagaagcctggcaaggcccctaagctgctgatctacagcgccagctttctgtacagcggcgtgcccagcagattcagcggaagcagaagcggcaccgacttcaccctgacaatatccagcctccagcctgaggacttcgccacctactactgccagcaggcttacaccacacctccaacattcggccagggcaccaaggtggaaatcaagagaacaggcggaggcggaagtggaggcggaggatctggcggcggaggctctgaagtgcagctggttgaatcaggtggcggcctggttcaacctggcggatctctgagactgagctgtgccgccagcggcttcaacatcaaggacacctacatccactgggtccgacaggcccctggcaaaggacttgaatgggtcgccagaatctaccccaccaacggctacaccagatacgccgactctgtgaagggcagattcaccatcagcgccgacaccagcaagaacaccgcctacctccagatgaactccctgagagccgaggacaccgccgtgtactactgtagcagatggggcggagccggagcctacgctatggatgtttggggccagggaaccctggtcaccgtgtcatctacgcgtgacggtaacgaggagatgggaggaatcactcaaaccccttacaaagtctcaatttcaggaacaactgttatccttacatgtccccagtatcctggcagcgagatcctttggcagcataacgacaagaatatagggggagatgaagacgataagaatatcggatctgacgaggatcacttgagcctgaaagagttctccgagcttgaacaaagcggatattatgtgtgctatccgcgcgggtcaaagccggaagacgctaacttttacctttatctccgagccagagtgtgcgaaaattgcatggaaatggacgttatgtccgttgctacaatagttatcgtagatatatgcatcacgggtggactgcttctgctggtttattattggtccaagaatagaaaggccaaagctaaacccgtgaccagaggcgctggcgcaggcggaaggcaaaggggacaaaacaaagaacggccaccaccagtgccaaatccagattatgagcctattcggaaaggacagagggacctgtactctggcctgaatcagagaagaatc

SEQ ID NO: 8890 - DNA, 1251 bp, Artificial Sequence
  Synthetic Polynucloetide
atggccttaccagtgaccgccttgctcctgccgctggccttgctgctccacgccgccaggccggacatccagatgacacagagccctagcagcctgtctgccagcgtgggagacagagtgaccatcacctgtagagccagccaggacgtgaacacagccgtggcttggtatcagcagaagcctggcaaggcccctaagctgctgatctacagcgccagctttctgtacagcggcgtgcccagcagattcagcggaagcagaagcggcaccgacttcaccctgacaatatccagcctccagcctgaggacttcgccacctactactgccagcaggcttacaccacacctccaacattcggccagggcaccaaggtggaaatcaagagaacaggcggaggcggaagtggaggcggaggatctggcggcggaggctctgaagtgcagctggttgaatcaggtggcggcctggttcaacctggcggatctctgagactgagctgtgccgccagcggcttcaacatcaaggacacctacatccactgggtccgacaggcccctggcaaaggacttgaatgggtcgccagaatctaccccaccaacggctacaccagatacgccgactctgtgaagggcagattcaccatcagcgccgacaccagcaagaacaccgcctacctccagatgaactccctgagagccgaggacaccgccgtgtactactgtagcagatggggcggagccggagcctacgctatggatgtttggggccagggaaccctggtcaccgtgtcatctacgcgtttcaagatccccatcgaggaactggaagatcgggtgttcgtgaactgcaacacctctatcacctgggtggaaggcaccgtgggaacactgctgagcgacatcaccagactggacctcggcaagcggattctggaccctcggggcatctacagatgcaacggcaccgacatctacaaggacaaagaaagcaccgtgcaggtccactacagaatgtgccagtcctgcgtggaactggaccctgctacagtggccggcatcatcgtgaccgatgtgatcgctactctgctgctggctctgggagtgttctgcttcgccggacacgaaacaggcagactgtctggcgctgccgatacacaggccctgctgagaaacgaccaagtgtatcagcccctgcgcgacagagatgatgcccagtattctcacctcggcggcaactgggctagaaacaag

SEQ ID NO: 8891 - DNA, 1281 bp, Artificial Sequence
  Synthetic Polynucloetide
atggccttaccagtgaccgccttgctcctgccgctggccttgctgctccacgccgccaggccggacatccagatgacacagagccctagcagcctgtctgccagcgtgggagacagagtgaccatcacctgtagagccagccaggacgtgaacacagccgtggcttggtatcagcagaagcctggcaaggcccctaagctgctgatctacagcgccagctttctgtacagcggcgtgcccagcagattcagcggaagcagaagcggcaccgacttcaccctgacaatatccagcctccagcctgaggacttcgccacctactactgccagcaggcttacaccacacctccaacattcggccagggcaccaaggtggaaatcaagagaacaggcggaggcggaagtggaggcggaggatctggcggcggaggctctgaagtgcagctggttgaatcaggtggcggcctggttcaacctggcggatctctgagactgagctgtgccgccagcggcttcaacatcaaggacacctacatccactgggtccgacaggcccctggcaaaggacttgaatgggtcgccagaatctaccccaccaacggctacaccagatacgccgactctgtgaagggcagattcaccatcagcgccgacaccagcaagaacaccgcctacctccagatgaactccctgagagccgaggacaccgccgtgtactactgtagcagatggggcggagccggagcctacgctatggatgtttggggccagggaaccctggtcaccgtgtcatctacgcgtcagagcatcaagggcaaccacctggtcaaggtgtacgactaccaagaggacggcagcgtgctgctgacatgtgatgccgaggccaagaacatcacctggtttaaggacggcaagatgatcggcttcctgaccgaggacaagaagaagtggaacctgggcagcaacgctaaggaccccagaggcatgtatcagtgcaagggcagccagaacaagagcaagcccctccaggtgtactaccggatgtgccagaactgcatcgagctgaacgccgctaccatcagcggctttctgttcgccgagatcgtgtccatcttcgtgctggccgtgggcgtgtactttatcgctggacaggatggcgtgcggcagagcagagcttccgataagcaaaccctgctgcctaacgaccagctgtaccagcctctgaaggacagagaggacgaccagtacagccacctccagggcaatcagctgagaagaaac

SEQ ID NO: 8892 - DNA, 1230 bp, Artificial Sequence
  Synthetic Polynucloetide
atggccttaccagtgaccgccttgctcctgccgctggccttgctgctccacgccgccaggccggacatccagatgacacagagccctagcagcctgtctgccagcgtgggagacagagtgaccatcacctgtagagccagccaggacgtgaacacagccgtggcttggtatcagcagaagcctggcaaggcccctaagctgctgatctacagcgccagctttctgtacagcggcgtgcccagcagattcagcggaagcagaagcggcaccgacttcaccctgacaatatccagcctccagcctgaggacttcgccacctactactgccagcaggcttacaccacacctccaacattcggccagggcaccaaggtggaaatcaagagaacaggcggaggcggaagtggaggcggaggatctggcggcggaggctctgaagtgcagctggttgaatcaggtggcggcctggttcaacctggcggatctctgagactgagctgtgccgccagcggcttcaacatcaaggacacctacatccactgggtccgacaggcccctggcaaaggacttgaatgggtcgccagaatctaccccaccaacggctacaccagatacgccgactctgtgaagggcagattcaccatcagcgccgacaccagcaagaacaccgcctacctccagatgaactccctgagagccgaggacaccgccgtgtactactgtagcagatggggcggagccggagcctacgctatggatgtttggggccagggaaccctggtcaccgtgtcatctacgcgtcagagttttgggttgttggaccctaaattgtgctatctgttggacggaatcctgttcatttacggagtgatcctgaccgcattgttcctgcgggttaagttttccagatccgcagacgcacccgcttaccaacaagggcagaaccaactctacaatgaacttaatttggggcggagggaagagtacgacgttctggacaaaaggaggggacgagatcccgagatgggcggaaagcctcagcgaaggaagaatccgcaagaggggctttataacgaactccagaaagataaaatggcagaagcctatagtgagattgggatgaagggagaaaggaggaggggtaaaggtcacgatgggttgtaccaaggattgagcacagccactaaagatacctatgatgcgctccacatgcaggccctgccgccaaga
